United States Patent Application Publication US 2023/0212319 A1 - sequence listing, part 8

SEQ ID NO: 10292 - DNA, 2010 bp, Artificial Sequence
  Synthetic Polynucloetide
atggccttaccagtgaccgccttgctcctgccgctggccttgctgctccacgccgccaggccggacatccagatgacacagagccctagcagcctgtccgtgtccgtgggagacagagtgaccatcacatgcaaggccagccagaacgtgcggacagtggtggcttggtatcagcagaagcctggactggcccctaagacactgatctacctggcctccaacagacacaccggcgtgccaagcagattttctggcagcggctctggcaccgacttcaccttcacaatatccagcctccagcctgaggacattgccacctacttttgccagcagcactggtcttaccctctgacctttggacagggcaccaaggtggaagtgaagagaggcggaggcggaagtggaggcggaggatctggcggcggaggctctgaagttcagctgcttgaatctggcggcggactggttcaacctggcggatctctgagactgagctgtgccgcctctggcttcgccttcagcacctacgatatgagctgggtccgacaggcccctggcaaaggacttgaatgggtcgccacaatcagcagcggcggcagctacacctactacctggatagcgtgaagggcagattcaccatcagccgggacagcagcaagaacaccctgtacctccagatgaactccctccaggccgaggactccgccatctactattgtgcccctaccaccgtggtgcctttcgcctattggggacagggaaccctggtcaccgttagctctacgcgtgggtctggaggcggaggcagcggcggaggcgggagcggccagagcatcaagggcaaccacctggtcaaggtgtacgactaccaagaggacggcagcgtgctgctgacatgtgatgccgaggccaagaacatcacctggtttaaggacggcaagatgatcggcttcctgaccgaggacaagaagaagtggaacctgggcagcaacgctaaggaccccagaggcatgtatcagtgcaagggcagccagaacaagagcaagcccctccaggtgtactaccggatgtgccagaactgcatcgagctgaacgccgctaccatcagcggctttctgttcgccgagatcgtgtccatcttcgtgctggccgtgggcgtgtactttatcgctggacaggatggcgtgcggcagagcagagcttccgataagcaaaccctgctgcctaacgaccagctgtaccagcctctgaaggacagagaggacgaccagtacagccacctccagggcaatcagctgagaagaaaccgcgccaagagaagcggatctggcgtgaagcagaccctgaatttcgacctgctgaagctggctggcgacgtggaatccaacccaggcccttctagaggccatatgaccgagtacaagcccacggtgcgcctcgccacccgcgacgacgtccccagggccgtacgcaccctcgccgccgcgttcgccgactaccccgccacgcgccacaccgtcgatccggaccgccacatcgagcgggtcaccgagctgcaagaactcttcctcacgcgcgtcgggctcgacatcggcaaggtgtgggtcgcggacgacggcgccgcggtggcggtctggaccacgccggagagcgtcgaagcgggggcggtgttcgccgagatcggcccgcgcatggccgagttgagcggttcccggctggccgcgcagcaacagatggaaggcctcctggcgccgcaccggcccaaggagcccgcgtggttcctggccaccgtcggcgtctcgcccgaccaccagggcaagggtctgggcagcgccgtcgtgctccccggagtggaggcggccgagcgcgccggggtgcccgccttcctggagacctccgcgccccgcaacctccccttctacgagcggctcggcttcaccgtcaccgccgacgtcgaggtgcccgaaggaccgcgcacctggtgcatgacccgcaagcccggtgcctga

SEQ ID NO: 10293 - DNA, 1959 bp, Artificial Sequence
  Synthetic Polynucloetide
atggccttaccagtgaccgccttgctcctgccgctggccttgctgctccacgccgccaggccggacatccagatgacacagagccctagcagcctgtccgtgtccgtgggagacagagtgaccatcacatgcaaggccagccagaacgtgcggacagtggtggcttggtatcagcagaagcctggactggcccctaagacactgatctacctggcctccaacagacacaccggcgtgccaagcagattttctggcagcggctctggcaccgacttcaccttcacaatatccagcctccagcctgaggacattgccacctacttttgccagcagcactggtcttaccctctgacctttggacagggcaccaaggtggaagtgaagagaggcggaggcggaagtggaggcggaggatctggcggcggaggctctgaagttcagctgcttgaatctggcggcggactggttcaacctggcggatctctgagactgagctgtgccgcctctggcttcgccttcagcacctacgatatgagctgggtccgacaggcccctggcaaaggacttgaatgggtcgccacaatcagcagcggcggcagctacacctactacctggatagcgtgaagggcagattcaccatcagccgggacagcagcaagaacaccctgtacctccagatgaactccctccaggccgaggactccgccatctactattgtgcccctaccaccgtggtgcctttcgcctattggggacagggaaccctggtcaccgttagctctacgcgtgggtctggaggcggaggcagcggcggaggcgggagcggccagagttttgggttgttggaccctaaattgtgctatctgttggacggaatcctgttcatttacggagtgatcctgaccgcattgttcctgcgggttaagttttccagatccgcagacgcacccgcttaccaacaagggcagaaccaactctacaatgaacttaatttggggcggagggaagagtacgacgttctggacaaaaggaggggacgagatcccgagatgggcggaaagcctcagcgaaggaagaatccgcaagaggggctttataacgaactccagaaagataaaatggcagaagcctatagtgagattgggatgaagggagaaaggaggaggggtaaaggtcacgatgggttgtaccaaggattgagcacagccactaaagatacctatgatgcgctccacatgcaggccctgccgccaagacgcgccaagagaagcggatctggcgtgaagcagaccctgaatttcgacctgctgaagctggctggcgacgtggaatccaacccaggcccttctagaggccatatgaccgagtacaagcccacggtgcgcctcgccacccgcgacgacgtccccagggccgtacgcaccctcgccgccgcgttcgccgactaccccgccacgcgccacaccgtcgatccggaccgccacatcgagcgggtcaccgagctgcaagaactcttcctcacgcgcgtcgggctcgacatcggcaaggtgtgggtcgcggacgacggcgccgcggtggcggtctggaccacgccggagagcgtcgaagcgggggcggtgttcgccgagatcggcccgcgcatggccgagttgagcggttcccggctggccgcgcagcaacagatggaaggcctcctggcgccgcaccggcccaaggagcccgcgtggttcctggccaccgtcggcgtctcgcccgaccaccagggcaagggtctgggcagcgccgtcgtgctccccggagtggaggcggccgagcgcgccggggtgcccgccttcctggagacctccgcgccccgcaacctccccttctacgagcggctcggcttcaccgtcaccgccgacgtcgaggtgcccgaaggaccgcgcacctggtgcatgacccgcaagcccggtgcctga

SEQ ID NO: 10294 - DNA, 2259 bp, Artificial Sequence
  Synthetic Polynucloetide
atggccttaccagtgaccgccttgctcctgccgctggccttgctgctccacgccgccaggccggaagtgcagctggttgaatctggcggaggactggttcagcctggcggatctctgagactgtcttgtgccgccagcggcttcagcttcagcgacttttggatgagctgggtccgacaggcccctggcaaaggacttgaatgggtcgccacaatcagccaggccggcagcgagaaggactacgtggactctgtgaagggcagattcaccatcagccgggacaacgccaagaagtccctgtacctccagatgaacagcctgagagccgaggacaccgccgtgtactattgtgcctctggcgtgtacagcttcgactacagaggccagggcaccctggtcacagtctcttctggtaccggcggaggcggatctggcggcggaggtagcggtggcggaggatctgaattcgacatccagatgacacagagccctagcagcctgtccgtgtccgtgggagacagagtgaccatcacatgcaaggccagccagaacgtgcggacagtggtggcttggtatcagcagaagcctggactggcccctaagacactgatctacctggcctccaacagacacaccggcgtgccaagcagattttctggcagcggctctggcaccgacttcaccttcacaatatccagcctccagcctgaggacattgccacctacttttgccagcagcactggtcttaccctctgacctttggacagggcaccaaggtggaagtgaagagactcgaggacctgaagaacgtgttcccacctgaggtggccgtgttcgagcctagcgaggccgagatcagccacacccagaaagccaccctcgtgtgcctggctaccggcttctaccccgaccatgtggaactgtcttggtgggtcaacggcaaagaggtgcacagcggcgtgtgtaccgacccccagccactgaaagaacagcccgccctgaacgacagccggtactgcctgagcagcagactgagagtgtccgccaccttctggcagaacccccggaaccacttcagatgccaggtgcagttctacggcctgagcgagaacgacgagtggacccaggacagagccaagcccgtgacccagatcgtgtctgccgaagcctggggcagagccgattgcggctttaccagcgagagctaccagcagggcgtgctgagcgccaccatcctgtacgagatcctgctgggcaaggccaccctgtacgccgtgctggtgtctgccctggtgctgatggctatggtcaagcggaaggacagccggggaagggccaagcgatctggatctggagcaacaaacttctcactactcaaacaagcaggtgacgtggaggagaatcccgggcctactagtatggactggatttggcgcatccttttccttgtcggcgctgctaccggcgcgcattccttcgaagaagttcagctgcttgaatctggcggcggactggttcaacctggcggatctctgagactgagctgtgccgcctctggcttcgccttcagcacctacgatatgagctgggtccgacaggcccctggcaaaggacttgaatgggtcgccacaatcagcagcggcggcagctacacctactacctggatagcgtgaagggcagattcaccatcagccgggacagcagcaagaacaccctgtacctccagatgaactccctccaggccgaggactccgccatctactattgtgcccctaccaccgtggtgcctttcgcctattggggacagggaaccctggtcaccgttagctctacgcgtatccagaaccctgatcctgccgtgtaccagctgcgggatagcaagagcagcgacaagagcgtgtgtctgttcaccgacttcgacagccagaccaacgtgtcccagagcaaggactccgacgtgtacatcaccgataagtgcgtgctggacatgcggagcatggacttcaagagcaactccgccgtggcctggtccaacaagtccgatttcgcctgcgccaacgccttcaacaacagcattatccccgaggacacattcttcccaagccccgagagcagctgcgacgtgaagctggtggaaaagagcttcgagacagacaccaacctgaacttccagaacctgagcgtgatcggcttcagaatcctgctgctgaaagtggccggctttaacctgctgatgaccctgcggctgtggtccagc

SEQ ID NO: 10295 - DNA, 2271 bp, Artificial Sequence
  Synthetic Polynucloetide
atggccttaccagtgaccgccttgctcctgccgctggccttgctgctccacgccgccaggccggaagtgcagctggttgaatctggcggaggactggttcagcctggcggatctctgagactgtcttgtgccgccagcggcttcagcttcagcgacttttggatgagctgggtccgacaggcccctggcaaaggacttgaatgggtcgccacaatcagccaggccggcagcgagaaggactacgtggactctgtgaagggcagattcaccatcagccgggacaacgccaagaagtccctgtacctccagatgaacagcctgagagccgaggacaccgccgtgtactattgtgcctctggcgtgtacagcttcgactacagaggccagggcaccctggtcacagtctcttctggtaccggcggaggcggatctggcggcggaggtagcggtggcggaggatctgaattcgacatccagatgacacagagccctagcagcctgtccgtgtccgtgggagacagagtgaccatcacatgcaaggccagccagaacgtgcggacagtggtggcttggtatcagcagaagcctggactggcccctaagacactgatctacctggcctccaacagacacaccggcgtgccaagcagattttctggcagcggctctggcaccgacttcaccttcacaatatccagcctccagcctgaggacattgccacctacttttgccagcagcactggtcttaccctctgacctttggacagggcaccaaggtggaagtgaagagactcgagatccagaaccctgatcctgccgtgtaccagctgcgggatagcaagagcagcgacaagagcgtgtgtctgttcaccgacttcgacagccagaccaacgtgtcccagagcaaggactccgacgtgtacatcaccgataagtgcgtgctggacatgcggagcatggacttcaagagcaactccgccgtggcctggtccaacaagtccgatttcgcctgcgccaacgccttcaacaacagcattatccccgaggacacattcttcccaagccccgagagcagctgcgacgtgaagctggtggaaaagagcttcgagacagacaccaacctgaacttccagaacctgagcgtgatcggcttcagaatcctgctgctgaaagtggccggctttaacctgctgatgaccctgcggctgtggtccagccgcgccaagagaagcggatctggcgtgaagcagaccctgaatttcgacctgctgaagctggctggcgacgtggaatccaacccaggccctactagtatggactggatttggcgcatccttttccttgtcggcgctgctaccggcgcgcattccttcgaagaagttcagctgcttgaatctggcggcggactggttcaacctggcggatctctgagactgagctgtgccgcctctggcttcgccttcagcacctacgatatgagctgggtccgacaggcccctggcaaaggacttgaatgggtcgccacaatcagcagcggcggcagctacacctactacctggatagcgtgaagggcagattcaccatcagccgggacagcagcaagaacaccctgtacctccagatgaactccctccaggccgaggactccgccatctactattgtgcccctaccaccgtggtgcctttcgcctattggggacagggaaccctggtcaccgttagctctacgcgtgaggacctgaagaacgtgttcccacctgaggtggccgtgttcgagcctagcgaggccgagatcagccacacccagaaagccaccctcgtgtgcctggctaccggcttctaccccgaccatgtggaactgtcttggtgggtcaacggcaaagaggtgcacagcggcgtgtgtaccgacccccagccactgaaagaacagcccgccctgaacgacagccggtactgcctgagcagcagactgagagtgtccgccaccttctggcagaacccccggaaccacttcagatgccaggtgcagttctacggcctgagcgagaacgacgagtggacccaggacagagccaagcccgtgacccagatcgtgtctgccgaagcctggggcagagccgattgcggctttaccagcgagagctaccagcagggcgtgctgagcgccaccatcctgtacgagatcctgctgggcaaggccaccctgtacgccgtgctggtgtctgccctggtgctgatggctatggtcaagcggaaggacagccgggga

SEQ ID NO: 10296 - DNA, 2847 bp, Artificial Sequence
  Synthetic Polynucloetide
atggccttaccagtgaccgccttgctcctgccgctggccttgctgctccacgccgccaggccggaagtgcagctggttgaatctggcggaggactggttcagcctggcggatctctgagactgtcttgtgccgccagcggcttcagcttcagcgacttttggatgagctgggtccgacaggcccctggcaaaggacttgaatgggtcgccacaatcagccaggccggcagcgagaaggactacgtggactctgtgaagggcagattcaccatcagccgggacaacgccaagaagtccctgtacctccagatgaacagcctgagagccgaggacaccgccgtgtactattgtgcctctggcgtgtacagcttcgactacagaggccagggcaccctggtcacagtctcttctggtaccggcggaggcggatctggcggcggaggtagcggtggcggaggatctgaattcgacatccagatgacacagagccctagcagcctgtccgtgtccgtgggagacagagtgaccatcacatgcaaggccagccagaacgtgcggacagtggtggcttggtatcagcagaagcctggactggcccctaagacactgatctacctggcctccaacagacacaccggcgtgccaagcagattttctggcagcggctctggcaccgacttcaccttcacaatatccagcctccagcctgaggacattgccacctacttttgccagcagcactggtcttaccctctgacctttggacagggcaccaaggtggaagtgaagagactcgaggacctgaagaacgtgttcccacctgaggtggccgtgttcgagcctagcgaggccgagatcagccacacccagaaagccaccctcgtgtgcctggctaccggcttctaccccgaccatgtggaactgtcttggtgggtcaacggcaaagaggtgcacagcggcgtgtctaccgacccccagccactgaaagaacagcccgccctgaacgacagccggtactgcctgagcagcagactgagagtgtccgccaccttctggcagaacccccggaaccacttcagatgccaggtgcagttctacggcctgagcgagaacgacgagtggacccaggacagagccaagcccgtgacccagatcgtgtctgccgaagcctggggcagagccgattgcggatcccagagcttcggcctgctggaccccaagctgtgctacctgctggatggcatcctgttcatctacggcgtgatcctgaccgccctgttcctgagagtgaagttcagcagaagcgccgacgcccctgcctaccagcagggacagaaccaactgtacaacgagctgaacctgggcagacgggaagagtacgacgtgctggacaagcggagaggcagggaccctgagatgggcggaaagccccagcggagaaagaacccccaggaaggactgtataacgaactccagaaagacaagatggccgaagcctacagcgagatcggcatgaagggcgagcggagaagaggcaagggccacgatggcctgtaccagggcctgagcaccgccaccaaggacacctatgacgccctgcacatgcaggccctgcctccaagaagggccaagcgatctggatctggagcaacaaacttctcactactcaaacaagcaggtgacgtggaggagaatcccgggcctactagtatggactggatttggcgcatccttttccttgtcggcgctgctaccggcgcgcattccttcgaagaagttcagctgcttgaatctggcggcggactggttcaacctggcggatctctgagactgagctgtgccgcctctggcttcgccttcagcacctacgatatgagctgggtccgacaggcccctggcaaaggacttgaatgggtcgccacaatcagcagcggcggcagctacacctactacctggatagcgtgaagggcagattcaccatcagccgggacagcagcaagaacaccctgtacctccagatgaactccctccaggccgaggactccgccatctactattgtgcccctaccaccgtggtgcctttcgcctattggggacagggaaccctggtcaccgttagctctacgcgtatccagaaccctgatcctgccgtgtaccagctgcgggatagcaagagcagcgacaagagcgtgtgtctgttcaccgacttcgacagccagaccaacgtgtcccagagcaaggactccgacgtgtacatcaccgataagaccgtgctggacatgcggagcatggacttcaagagcaactccgccgtggcctggtccaacaagtccgatttcgcctgcgccaacgccttcaacaacagcattatccccgaggacacattcttcccaagccccgagagcagctgcggtacccagagttttgggttgttggaccctaaattgtgctatctgttggacggaatcctgttcatttacggagtgatcctgaccgcattgttcctgcgggttaagttttccagatccgcagacgcacccgcttaccaacaagggcagaaccaactctacaatgaacttaatttggggcggagggaagagtacgacgttctggacaaaaggaggggacgagatcccgagatgggcggaaagcctcagcgaaggaagaatccgcaagaggggctttataacgaactccagaaagataaaatggcagaagcctatagtgagattgggatgaagggagaaaggaggaggggtaaaggtcacgatgggttgtaccaaggattgagcacagccactaaagatacctatgatgcgctccacatgcaggccctgccgccaaga

SEQ ID NO: 10297 - DNA, 2337 bp, Artificial Sequence
  Synthetic Polynucloetide
atggccttaccagtgaccgccttgctcctgccgctggccttgctgctccacgccgccaggccggaagtgcagctggttgaatctggcggaggactggttcagcctggcggatctctgagactgtcttgtgccgccagcggcttcagcttcagcgacttttggatgagctgggtccgacaggcccctggcaaaggacttgaatgggtcgccacaatcagccaggccggcagcgagaaggactacgtggactctgtgaagggcagattcaccatcagccgggacaacgccaagaagtccctgtacctccagatgaacagcctgagagccgaggacaccgccgtgtactattgtgcctctggcgtgtacagcttcgactacagaggccagggcaccctggtcacagtctcttctggtaccggcggaggcggatctggcggcggaggtagcggtggcggaggatctgaattcgacatccagatgacacagagccctagcagcctgtccgtgtccgtgggagacagagtgaccatcacatgcaaggccagccagaacgtgcggacagtggtggcttggtatcagcagaagcctggactggcccctaagacactgatctacctggcctccaacagacacaccggcgtgccaagcagattttctggcagcggctctggcaccgacttcaccttcacaatatccagcctccagcctgaggacattgccacctacttttgccagcagcactggtcttaccctctgacctttggacagggcaccaaggtggaagtgaagagactcgagggacagcctaaggccaatcctaccgtgacactgttccctccaagcagcgaagaactccaggccaacaaggccacacttgtgtgcctgatctccgacttctaccctggggctgtgacagtggcttggaaggccgatggatctcctgtgaaagccggcgtggaaaccaccaagccatccaagcagagcaacaacaaatacgccgccagctcctacctgagcctgacacctgagcagtggaagtcccacagatcctacagctgccaagtgacccacgaaggcagcaccgtggaaaagacagtggcccctacagagtgcagccccatcaagaccgatgtgattacaatggaccccaaggacaactgctccaaggacgccaacgataccctgctgctccagctgaccaacaccagcgcctactacatgtacttgttgctgctgctgaagtccgtggtgtacttcgccatcatcacatgctgcctgctgcggagaaccgccttctgctgcaacggcgagaagtctagggccaagcgatctggatctggagcaacaaacttctcactactcaaacaagcaggtgacgtggaggagaatcccgggcctactagtatggactggatttggcgcatccttttccttgtcggcgctgctaccggcgcgcattccttcgaagaagttcagctgcttgaatctggcggcggactggttcaacctggcggatctctgagactgagctgtgccgcctctggcttcgccttcagcacctacgatatgagctgggtccgacaggcccctggcaaaggacttgaatgggtcgccacaatcagcagcggcggcagctacacctactacctggatagcgtgaagggcagattcaccatcagccgggacagcagcaagaacaccctgtacctccagatgaactccctccaggccgaggactccgccatctactattgtgcccctaccaccgtggtgcctttcgcctattggggacagggaaccctggtcaccgttagctctacgcgtgcctctacaaagggaccctccgtgtttcctctggctcccagcagcaagtctacaagcggaggaacagccgctctgggctgcctggtcaaggattactttcccgagcctgtgaccgtgtcctggaatagcggagcactgacaagcggcgtgcacacctttccagccgtgctgcaaagcagcggcctgtactctctgagcagcgtggtcacagtgcctagctctagcctgggcacccagacctacatctgcaatgtgaaccacaagcctagcaacaccaaggtggacaagagagtggaacccaagagctgtgaagtgaaaaccgactccaccgaccacgtgaagcccaaagagacagagaacaccaagcagcccagcaagagctgccacaagcccaaggccatcgtgcacaccgagaaagtgaacatgatgagcctgaccgtgctgggcctgcggatgctgttcgccaaaaccgtggccgtgaacttcctgctgaccgccaagctgttcttcctc

SEQ ID NO: 10298 - DNA, 2280 bp, Artificial Sequence
  Synthetic Polynucloetide
atggccttaccagtgaccgccttgctcctgccgctggccttgctgctccacgccgccaggccggaagtgcagctggttgaatctggcggaggactggttcagcctggcggatctctgagactgtcttgtgccgccagcggcttcagcttcagcgacttttggatgagctgggtccgacaggcccctggcaaaggacttgaatgggtcgccacaatcagccaggccggcagcgagaaggactacgtggactctgtgaagggcagattcaccatcagccgggacaacgccaagaagtccctgtacctccagatgaacagcctgagagccgaggacaccgccgtgtactattgtgcctctggcgtgtacagcttcgactacagaggccagggcaccctggtcacagtctcttctggtaccggcggaggcggatctggcggcggaggtagcggtggcggaggatctgaattcgacatccagatgacacagagccctagcagcctgtccgtgtccgtgggagacagagtgaccatcacatgcaaggccagccagaacgtgcggacagtggtggcttggtatcagcagaagcctggactggcccctaagacactgatctacctggcctccaacagacacaccggcgtgccaagcagattttctggcagcggctctggcaccgacttcaccttcacaatatccagcctccagcctgaggacattgccacctacttttgccagcagcactggtcttaccctctgacctttggacagggcaccaaggtggaagtgaagagactcgagggacagcctaaggccaatcctaccgtgacactgttccctccaagcagcgaagaactccaggccaacaaggccacacttgtgtgcctgatctccgacttctaccctggggctgtgacagtggcttggaaggccgatggatctcctgtgaaagccggcgtggaaaccaccaagccatccaagcagagcaacaacaaatacgccgccagctcctacctgagcctgacacctgagcagtggaagtcccacagatcctacagctgccaagtgacccacgaaggcagcaccgtggaaaagacagtggcccctacagagtgcagcggcagagccgattgcggctttaccagcgagagctaccagcagggcgtgctgagcgccaccatcctgtacgagatcctgctgggcaaggccaccctgtacgccgtgctggtgtctgccctggtgctgatggctatggtcaagcggaaggacagccggggacgcgccaagagaagcggatctggcgtgaagcagaccctgaatttcgacctgctgaagctggctggcgacgtggaatccaacccaggccctactagtatggactggatttggcgcatccttttccttgtcggcgctgctaccggcgcgcattccttcgaagaagttcagctgcttgaatctggcggcggactggttcaacctggcggatctctgagactgagctgtgccgcctctggcttcgccttcagcacctacgatatgagctgggtccgacaggcccctggcaaaggacttgaatgggtcgccacaatcagcagcggcggcagctacacctactacctggatagcgtgaagggcagattcaccatcagccgggacagcagcaagaacaccctgtacctccagatgaactccctccaggccgaggactccgccatctactattgtgcccctaccaccgtggtgcctttcgcctattggggacagggaaccctggtcaccgttagctctacgcgtgcctctacaaagggaccctccgtgtttcctctggctcccagcagcaagtctacaagcggaggaacagccgctctgggctgcctggtcaaggattactttcccgagcctgtgaccgtgtcctggaatagcggagcactgacaagcggcgtgcacacctttccagccgtgctgcaaagcagcggcctgtactctctgagcagcgtggtcacagtgcctagctctagcctgggcacccagacctacatctgcaatgtgaaccacaagcctagcaacaccaaggtggacaagagagtggaacccaagagctgtatccccgaggacacattcttcccaagccccgagagcagctgcgacgtgaagctggtggaaaagagcttcgagacagacaccaacctgaacttccagaacctgagcgtgatcggcttcagaatcctgctgctgaaagtggccggctttaacctgctgatgaccctgcggctgtggtccagc

SEQ ID NO: 10299 - DNA, 2682 bp, Artificial Sequence
  Synthetic Polynucloetide
atggccttaccagtgaccgccttgctcctgccgctggccttgctgctccacgccgccaggccggaagtgcagctggttgaatctggcggaggactggttcagcctggcggatctctgagactgtcttgtgccgccagcggcttcagcttcagcgacttttggatgagctgggtccgacaggcccctggcaaaggacttgaatgggtcgccacaatcagccaggccggcagcgagaaggactacgtggactctgtgaagggcagattcaccatcagccgggacaacgccaagaagtccctgtacctccagatgaacagcctgagagccgaggacaccgccgtgtactattgtgcctctggcgtgtacagcttcgactacagaggccagggcaccctggtcacagtctcttctggtaccggcggaggcggatctggcggcggaggtagcggtggcggaggatctgaattcgacatccagatgacacagagccctagcagcctgtccgtgtccgtgggagacagagtgaccatcacatgcaaggccagccagaacgtgcggacagtggtggcttggtatcagcagaagcctggactggcccctaagacactgatctacctggcctccaacagacacaccggcgtgccaagcagattttctggcagcggctctggcaccgacttcaccttcacaatatccagcctccagcctgaggacattgccacctacttttgccagcagcactggtcttaccctctgacctttggacagggcaccaaggtggaagtgaagagactcgagatccagaaccctgatcctgccgtgtaccagctgcgggatagcaagagcagcgacaagagcgtgtgtctgttcaccgacttcgacagccagaccaacgtgtcccagagcaaggactccgacgtgtacatcaccgataagtgcgtgctggacatgcggagcatggacttcaagagcaactccgccgtggcctggtccaacaagtccgatttcgcctgcgccaacgccttcaacaacagcattatccccgaggacacattcttcccaagccccgagagcagctgcgacgtgaagctggtggaaaagagcttcgagacagacaccaacctgaacttccagaacctgagcgtgatcggcttcagaatcctgctgctgaaagtggccggctttaacctgctgatgaccctgcggctgtggtccagccgcgccaagagaagcggatctggcgtgaagcagaccctgaatttcgacctgctgaagctggctggcgacgtggaatccaacccaggccctactagtatggactggatttggcgcatccttttccttgtcggcgctgctaccggcgcgcattccgggccccagctccagctgcaagagtctggacctggcctggtcaagcctagcgagacactgagcctgacctgtaccgtgtccggcgatagcatcagcagcggcgattactactggggctggatcagacagcctcctggcaaaggactggaatggatcggccacatctactacagcggcgtgacctactacaaccccagcctgaagtccagagtgaccatcagcgtggacaccagccggaaccagttctccctgaagctgtctagcgtgacagccgccgataccgccgtgtactactgcaccagagaggacagcagcaactggcggagtagaggccagggaacactggtcacagttagctctggatccggcggaggcggaagtggaggcggaggatctggcggcggaggctctttcgaagaagttcagctgcttgaatctggcggcggactggttcaacctggcggatctctgagactgagctgtgccgcctctggcttcgccttcagcacctacgatatgagctgggtccgacaggcccctggcaaaggacttgaatgggtcgccacaatcagcagcggcggcagctacacctactacctggatagcgtgaagggcagattcaccatcagccgggacagcagcaagaacaccctgtacctccagatgaactccctccaggccgaggactccgccatctactattgtgcccctaccaccgtggtgcctttcgcctattggggacagggaaccctggtcaccgttagctctacgcgtgaggacctgaagaacgtgttcccacctgaggtggccgtgttcgagcctagcgaggccgagatcagccacacccagaaagccaccctcgtgtgcctggctaccggcttctaccccgaccatgtggaactgtcttggtgggtcaacggcaaagaggtgcacagcggcgtgtgtaccgacccccagccactgaaagaacagcccgccctgaacgacagccggtactgcctgagcagcagactgagagtgtccgccaccttctggcagaacccccggaaccacttcagatgccaggtgcagttctacggcctgagcgagaacgacgagtggacccaggacagagccaagcccgtgacccagatcgtgtctgccgaagcctggggcagagccgattgcggctttaccagcgagagctaccagcagggcgtgctgagcgccaccatcctgtacgagatcctgctgggcaaggccaccctgtacgccgtgctggtgtctgccctggtgctgatggctatggtcaagcggaaggacagccgggga

SEQ ID NO: 10300 - DNA, 3258 bp, Artificial Sequence
  Synthetic Polynucloetide
atggccttaccagtgaccgccttgctcctgccgctggccttgctgctccacgccgccaggccggaagtgcagctggttgaatctggcggaggactggttcagcctggcggatctctgagactgtcttgtgccgccagcggcttcagcttcagcgacttttggatgagctgggtccgacaggcccctggcaaaggacttgaatgggtcgccacaatcagccaggccggcagcgagaaggactacgtggactctgtgaagggcagattcaccatcagccgggacaacgccaagaagtccctgtacctccagatgaacagcctgagagccgaggacaccgccgtgtactattgtgcctctggcgtgtacagcttcgactacagaggccagggcaccctggtcacagtctcttctggtaccggcggaggcggatctggcggcggaggtagcggtggcggaggatctgaattcgacatccagatgacacagagccctagcagcctgtccgtgtccgtgggagacagagtgaccatcacatgcaaggccagccagaacgtgcggacagtggtggcttggtatcagcagaagcctggactggcccctaagacactgatctacctggcctccaacagacacaccggcgtgccaagcagattttctggcagcggctctggcaccgacttcaccttcacaatatccagcctccagcctgaggacattgccacctacttttgccagcagcactggtcttaccctctgacctttggacagggcaccaaggtggaagtgaagagactcgaggacctgaagaacgtgttcccacctgaggtggccgtgttcgagcctagcgaggccgagatcagccacacccagaaagccaccctcgtgtgcctggctaccggcttctaccccgaccatgtggaactgtcttggtgggtcaacggcaaagaggtgcacagcggcgtgtctaccgacccccagccactgaaagaacagcccgccctgaacgacagccggtactgcctgagcagcagactgagagtgtccgccaccttctggcagaacccccggaaccacttcagatgccaggtgcagttctacggcctgagcgagaacgacgagtggacccaggacagagccaagcccgtgacccagatcgtgtctgccgaagcctggggcagagccgattgcggatcccagagcttcggcctgctggaccccaagctgtgctacctgctggatggcatcctgttcatctacggcgtgatcctgaccgccctgttcctgagagtgaagttcagcagaagcgccgacgcccctgcctaccagcagggacagaaccaactgtacaacgagctgaacctgggcagacgggaagagtacgacgtgctggacaagcggagaggcagggaccctgagatgggcggaaagccccagcggagaaagaacccccaggaaggactgtataacgaactccagaaagacaagatggccgaagcctacagcgagatcggcatgaagggcgagcggagaagaggcaagggccacgatggcctgtaccagggcctgagcaccgccaccaaggacacctatgacgccctgcacatgcaggccctgcctccaagaagggccaagcgatctggatctggagcaacaaacttctcactactcaaacaagcaggtgacgtggaggagaatcccgggcctactagtatggactggatttggcgcatccttttccttgtcggcgctgctaccggcgcgcattccgggccccagctccagctgcaagagtctggacctggcctggtcaagcctagcgagacactgagcctgacctgtaccgtgtccggcgatagcatcagcagcggcgattactactggggctggatcagacagcctcctggcaaaggactggaatggatcggccacatctactacagcggcgtgacctactacaaccccagcctgaagtccagagtgaccatcagcgtggacaccagccggaaccagttctccctgaagctgtctagcgtgacagccgccgataccgccgtgtactactgcaccagagaggacagcagcaactggcggagtagaggccagggaacactggtcacagttagctctggatccggcggaggcggaagtggaggcggaggatctggcggcggaggctctttcgaagaagttcagctgcttgaatctggcggcggactggttcaacctggcggatctctgagactgagctgtgccgcctctggcttcgccttcagcacctacgatatgagctgggtccgacaggcccctggcaaaggacttgaatgggtcgccacaatcagcagcggcggcagctacacctactacctggatagcgtgaagggcagattcaccatcagccgggacagcagcaagaacaccctgtacctccagatgaactccctccaggccgaggactccgccatctactattgtgcccctaccaccgtggtgcctttcgcctattggggacagggaaccctggtcaccgttagctctacgcgtatccagaaccctgatcctgccgtgtaccagctgcgggatagcaagagcagcgacaagagcgtgtgtctgttcaccgacttcgacagccagaccaacgtgtcccagagcaaggactccgacgtgtacatcaccgataagaccgtgctggacatgcggagcatggacttcaagagcaactccgccgtggcctggtccaacaagtccgatttcgcctgcgccaacgccttcaacaacagcattatccccgaggacacattcttcccaagccccgagagcagctgcggtacccagagttttgggttgttggaccctaaattgtgctatctgttggacggaatcctgttcatttacggagtgatcctgaccgcattgttcctgcgggttaagttttccagatccgcagacgcacccgcttaccaacaagggcagaaccaactctacaatgaacttaatttggggcggagggaagagtacgacgttctggacaaaaggaggggacgagatcccgagatgggcggaaagcctcagcgaaggaagaatccgcaagaggggctttataacgaactccagaaagataaaatggcagaagcctatagtgagattgggatgaagggagaaaggaggaggggtaaaggtcacgatgggttgtaccaaggattgagcacagccactaaagatacctatgatgcgctccacatgcaggccctgccgccaaga

SEQ ID NO: 10301 - DNA, 2748 bp, Artificial Sequence
  Synthetic Polynucloetide
atggccttaccagtgaccgccttgctcctgccgctggccttgctgctccacgccgccaggccggaagtgcagctggttgaatctggcggaggactggttcagcctggcggatctctgagactgtcttgtgccgccagcggcttcagcttcagcgacttttggatgagctgggtccgacaggcccctggcaaaggacttgaatgggtcgccacaatcagccaggccggcagcgagaaggactacgtggactctgtgaagggcagattcaccatcagccgggacaacgccaagaagtccctgtacctccagatgaacagcctgagagccgaggacaccgccgtgtactattgtgcctctggcgtgtacagcttcgactacagaggccagggcaccctggtcacagtctcttctggtaccggcggaggcggatctggcggcggaggtagcggtggcggaggatctgaattcgacatccagatgacacagagccctagcagcctgtccgtgtccgtgggagacagagtgaccatcacatgcaaggccagccagaacgtgcggacagtggtggcttggtatcagcagaagcctggactggcccctaagacactgatctacctggcctccaacagacacaccggcgtgccaagcagattttctggcagcggctctggcaccgacttcaccttcacaatatccagcctccagcctgaggacattgccacctacttttgccagcagcactggtcttaccctctgacctttggacagggcaccaaggtggaagtgaagagactcgagggacagcctaaggccaatcctaccgtgacactgttccctccaagcagcgaagaactccaggccaacaaggccacacttgtgtgcctgatctccgacttctaccctggggctgtgacagtggcttggaaggccgatggatctcctgtgaaagccggcgtggaaaccaccaagccatccaagcagagcaacaacaaatacgccgccagctcctacctgagcctgacacctgagcagtggaagtcccacagatcctacagctgccaagtgacccacgaaggcagcaccgtggaaaagacagtggcccctacagagtgcagccccatcaagaccgatgtgattacaatggaccccaaggacaactgctccaaggacgccaacgataccctgctgctccagctgaccaacaccagcgcctactacatgtacttgttgctgctgctgaagtccgtggtgtacttcgccatcatcacatgctgcctgctgcggagaaccgccttctgctgcaacggcgagaagtctagggccaagcgatctggatctggagcaacaaacttctcactactcaaacaagcaggtgacgtggaggagaatcccgggcctactagtatggactggatttggcgcatccttttccttgtcggcgctgctaccggcgcgcattccgggccccagctccagctgcaagagtctggacctggcctggtcaagcctagcgagacactgagcctgacctgtaccgtgtccggcgatagcatcagcagcggcgattactactggggctggatcagacagcctcctggcaaaggactggaatggatcggccacatctactacagcggcgtgacctactacaaccccagcctgaagtccagagtgaccatcagcgtggacaccagccggaaccagttctccctgaagctgtctagcgtgacagccgccgataccgccgtgtactactgcaccagagaggacagcagcaactggcggagtagaggccagggaacactggtcacagttagctctggatccggcggaggcggaagtggaggcggaggatctggcggcggaggctctttcgaagaagttcagctgcttgaatctggcggcggactggttcaacctggcggatctctgagactgagctgtgccgcctctggcttcgccttcagcacctacgatatgagctgggtccgacaggcccctggcaaaggacttgaatgggtcgccacaatcagcagcggcggcagctacacctactacctggatagcgtgaagggcagattcaccatcagccgggacagcagcaagaacaccctgtacctccagatgaactccctccaggccgaggactccgccatctactattgtgcccctaccaccgtggtgcctttcgcctattggggacagggaaccctggtcaccgttagctctacgcgtgcctctacaaagggaccctccgtgtttcctctggctcccagcagcaagtctacaagcggaggaacagccgctctgggctgcctggtcaaggattactttcccgagcctgtgaccgtgtcctggaatagcggagcactgacaagcggcgtgcacacctttccagccgtgctgcaaagcagcggcctgtactctctgagcagcgtggtcacagtgcctagctctagcctgggcacccagacctacatctgcaatgtgaaccacaagcctagcaacaccaaggtggacaagagagtggaacccaagagctgtgaagtgaaaaccgactccaccgaccacgtgaagcccaaagagacagagaacaccaagcagcccagcaagagctgccacaagcccaaggccatcgtgcacaccgagaaagtgaacatgatgagcctgaccgtgctgggcctgcggatgctgttcgccaaaaccgtggccgtgaacttcctgctgaccgccaagctgttcttcctc

SEQ ID NO: 10302 - DNA, 2691 bp, Artificial Sequence
  Synthetic Polynucloetide
atggccttaccagtgaccgccttgctcctgccgctggccttgctgctccacgccgccaggccggaagtgcagctggttgaatctggcggaggactggttcagcctggcggatctctgagactgtcttgtgccgccagcggcttcagcttcagcgacttttggatgagctgggtccgacaggcccctggcaaaggacttgaatgggtcgccacaatcagccaggccggcagcgagaaggactacgtggactctgtgaagggcagattcaccatcagccgggacaacgccaagaagtccctgtacctccagatgaacagcctgagagccgaggacaccgccgtgtactattgtgcctctggcgtgtacagcttcgactacagaggccagggcaccctggtcacagtctcttctggtaccggcggaggcggatctggcggcggaggtagcggtggcggaggatctgaattcgacatccagatgacacagagccctagcagcctgtccgtgtccgtgggagacagagtgaccatcacatgcaaggccagccagaacgtgcggacagtggtggcttggtatcagcagaagcctggactggcccctaagacactgatctacctggcctccaacagacacaccggcgtgccaagcagattttctggcagcggctctggcaccgacttcaccttcacaatatccagcctccagcctgaggacattgccacctacttttgccagcagcactggtcttaccctctgacctttggacagggcaccaaggtggaagtgaagagactcgagggacagcctaaggccaatcctaccgtgacactgttccctccaagcagcgaagaactccaggccaacaaggccacacttgtgtgcctgatctccgacttctaccctggggctgtgacagtggcttggaaggccgatggatctcctgtgaaagccggcgtggaaaccaccaagccatccaagcagagcaacaacaaatacgccgccagctcctacctgagcctgacacctgagcagtggaagtcccacagatcctacagctgccaagtgacccacgaaggcagcaccgtggaaaagacagtggcccctacagagtgcagcggcagagccgattgcggctttaccagcgagagctaccagcagggcgtgctgagcgccaccatcctgtacgagatcctgctgggcaaggccaccctgtacgccgtgctggtgtctgccctggtgctgatggctatggtcaagcggaaggacagccggggacgcgccaagagaagcggatctggcgtgaagcagaccctgaatttcgacctgctgaagctggctggcgacgtggaatccaacccaggccctactagtatggactggatttggcgcatccttttccttgtcggcgctgctaccggcgcgcattccgggccccagctccagctgcaagagtctggacctggcctggtcaagcctagcgagacactgagcctgacctgtaccgtgtccggcgatagcatcagcagcggcgattactactggggctggatcagacagcctcctggcaaaggactggaatggatcggccacatctactacagcggcgtgacctactacaaccccagcctgaagtccagagtgaccatcagcgtggacaccagccggaaccagttctccctgaagctgtctagcgtgacagccgccgataccgccgtgtactactgcaccagagaggacagcagcaactggcggagtagaggccagggaacactggtcacagttagctctggatccggcggaggcggaagtggaggcggaggatctggcggcggaggctctttcgaagaagttcagctgcttgaatctggcggcggactggttcaacctggcggatctctgagactgagctgtgccgcctctggcttcgccttcagcacctacgatatgagctgggtccgacaggcccctggcaaaggacttgaatgggtcgccacaatcagcagcggcggcagctacacctactacctggatagcgtgaagggcagattcaccatcagccgggacagcagcaagaacaccctgtacctccagatgaactccctccaggccgaggactccgccatctactattgtgcccctaccaccgtggtgcctttcgcctattggggacagggaaccctggtcaccgttagctctacgcgtgcctctacaaagggaccctccgtgtttcctctggctcccagcagcaagtctacaagcggaggaacagccgctctgggctgcctggtcaaggattactttcccgagcctgtgaccgtgtcctggaatagcggagcactgacaagcggcgtgcacacctttccagccgtgctgcaaagcagcggcctgtactctctgagcagcgtggtcacagtgcctagctctagcctgggcacccagacctacatctgcaatgtgaaccacaagcctagcaacaccaaggtggacaagagagtggaacccaagagctgtatccccgaggacacattcttcccaagccccgagagcagctgcgacgtgaagctggtggaaaagagcttcgagacagacaccaacctgaacttccagaacctgagcgtgatcggcttcagaatcctgctgctgaaagtggccggctttaacctgctgatgaccctgcggctgtggtccagc

SEQ ID NO: 10303 - DNA, 2262 bp, Artificial Sequence
  Synthetic Polynucloetide
atggccttaccagtgaccgccttgctcctgccgctggccttgctgctccacgccgccaggccggaagtgcaggttttggagtctggcggaggactggttcagcctggcggatctctgagactgtcttgtgccgccagcggcttcaccttcagcaactttgccatgagctgggtccgacaggcccctggcaaaggacttgaatgggtgtccacaatcagcggcagcgccggcacaacagattacgccgattctgtgaagggcagattcaccatcagccgggacaacagcaagaaaaccctgtacctccagatgaacagcctgcgcgtggaagataccgccgtgtactactgtgccgatggcagaggccccttcttcgattatcgcggccagggcacactggtcaccgtttcttctggtaccggcggaggcggatctggcggcggaggtagcggtggcggaggatctgaattcgacatccagatgacacagagccctagcagcctgtccgtgtccgtgggagacagagtgaccatcacatgcaaggccagccagaacgtgcggacagtggtggcttggtatcagcagaagcctggactggcccctaagacactgatctacctggcctccaacagacacaccggcgtgccaagcagattttctggcagcggctctggcaccgacttcaccttcacaatatccagcctccagcctgaggacattgccacctacttttgccagcagcactggtcttaccctctgacctttggacagggcaccaaggtggaagtgaagagactcgaggacctgaagaacgtgttcccacctgaggtggccgtgttcgagcctagcgaggccgagatcagccacacccagaaagccaccctcgtgtgcctggctaccggcttctaccccgaccatgtggaactgtcttggtgggtcaacggcaaagaggtgcacagcggcgtgtgtaccgacccccagccactgaaagaacagcccgccctgaacgacagccggtactgcctgagcagcagactgagagtgtccgccaccttctggcagaacccccggaaccacttcagatgccaggtgcagttctacggcctgagcgagaacgacgagtggacccaggacagagccaagcccgtgacccagatcgtgtctgccgaagcctggggcagagccgattgcggctttaccagcgagagctaccagcagggcgtgctgagcgccaccatcctgtacgagatcctgctgggcaaggccaccctgtacgccgtgctggtgtctgccctggtgctgatggctatggtcaagcggaaggacagccggggaagggccaagcgatctggatctggagcaacaaacttctcactactcaaacaagcaggtgacgtggaggagaatcccgggcctactagtatggactggatttggcgcatccttttccttgtcggcgctgctaccggcgcgcattccttcgaagaagttcagctgcttgaatctggcggcggactggttcaacctggcggatctctgagactgagctgtgccgcctctggcttcgccttcagcacctacgatatgagctgggtccgacaggcccctggcaaaggacttgaatgggtcgccacaatcagcagcggcggcagctacacctactacctggatagcgtgaagggcagattcaccatcagccgggacagcagcaagaacaccctgtacctccagatgaactccctccaggccgaggactccgccatctactattgtgcccctaccaccgtggtgcctttcgcctattggggacagggaaccctggtcaccgttagctctacgcgtatccagaaccctgatcctgccgtgtaccagctgcgggatagcaagagcagcgacaagagcgtgtgtctgttcaccgacttcgacagccagaccaacgtgtcccagagcaaggactccgacgtgtacatcaccgataagtgcgtgctggacatgcggagcatggacttcaagagcaactccgccgtggcctggtccaacaagtccgatttcgcctgcgccaacgccttcaacaacagcattatccccgaggacacattcttcccaagccccgagagcagctgcgacgtgaagctggtggaaaagagcttcgagacagacaccaacctgaacttccagaacctgagcgtgatcggcttcagaatcctgctgctgaaagtggccggctttaacctgctgatgaccctgcggctgtggtccagc

SEQ ID NO: 10304 - DNA, 2265 bp, Artificial Sequence
  Synthetic Polynucloetide
atggccttaccagtgaccgccttgctcctgccgctggccttgctgctccacgccgccaggccggacatccagatgacacagagccctagcagcctgtccgtgtccgtgggagacagagtgaccatcacatgcaaggccagccagaacgtgcggacagtggtggcttggtatcagcagaagcctggactggcccctaagacactgatctacctggcctccaacagacacaccggcgtgccaagcagattttctggcagcggctctggcaccgacttcaccttcacaatatccagcctccagcctgaggacattgccacctacttttgccagcagcactggtcttaccctctgacctttggacagggcaccaaggtggaagtgaagagactcgaggacctgaagaacgtgttcccacctgaggtggccgtgttcgagcctagcgaggccgagatcagccacacccagaaagccaccctcgtgtgcctggctaccggcttctaccccgaccatgtggaactgtcttggtgggtcaacggcaaagaggtgcacagcggcgtgtgtaccgacccccagccactgaaagaacagcccgccctgaacgacagccggtactgcctgagcagcagactgagagtgtccgccaccttctggcagaacccccggaaccacttcagatgccaggtgcagttctacggcctgagcgagaacgacgagtggacccaggacagagccaagcccgtgacccagatcgtgtctgccgaagcctggggcagagccgattgcggctttaccagcgagagctaccagcagggcgtgctgagcgccaccatcctgtacgagatcctgctgggcaaggccaccctgtacgccgtgctggtgtctgccctggtgctgatggctatggtcaagcggaaggacagccggggaagggccaagcgatctggatctggagcaacaaacttctcactactcaaacaagcaggtgacgtggaggagaatcccgggcctactagtatggactggatttggcgcatccttttccttgtcggcgctgctaccggcgcccattccgggcccgaagtgcagctggttgaatctggcggaggactggttcaggctggcggatctctgagactgtcttgtgccgccagcggcagaacctttagcatgggctggtttagacaggcccctggcaaagagagagagttcgtcgccgccatcacatactctggcggcagcccttactacgccgactctgtgaagggcagattcaccatcagccgggacaacgccaagaacaccgtgtacctccagatgaacagcctgaagcctgaggacaccgccgtgtactactgcgccgccaatccaacatacggcagcgactggaacgccgagaattggggccagggaacccaagtgacagtgtctagcggatccggcggcggaggatctggcggaggcggatctgggggcggaggctctttcgaagaagttcagctgcttgaatctggcggcggactggttcaacctggcggatctctgagactgagctgtgccgcctctggcttcgccttcagcacctacgatatgagctgggtccgacaggcccctggcaaaggacttgaatgggtcgccacaatcagcagcggcggcagctacacctactacctggatagcgtgaagggcagattcaccatcagccgggacagcagcaagaacaccctgtacctccagatgaactccctccaggccgaggactccgccatctactattgtgcccctaccaccgtggtgcctttcgcctattggggacagggaaccctggtcaccgttagctctacgcgtatccagaaccctgatcctgccgtgtaccagctgcgggatagcaagagcagcgacaagagcgtgtgtctgttcaccgacttcgacagccagaccaacgtgtcccagagcaaggactccgacgtgtacatcaccgataagtgcgtgctggacatgcggagcatggacttcaagagcaactccgccgtggcctggtccaacaagtccgatttcgcctgcgccaacgccttcaacaacagcattatccccgaggacacattcttcccaagccccgagagcagctgcgacgtgaagctggtggaaaagagcttcgagacagacaccaacctgaacttccagaacctgagcgtgatcggcttcagaatcctgctgctgaaagtggccggctttaacctgctgatgaccctgcggctgtggtccagc

SEQ ID NO: 10305 - DNA, 2646 bp, Artificial Sequence
  Synthetic Polynucloetide
atggccttaccagtgaccgccttgctcctgccgctggccttgctgctccacgccgccaggccggacatccagatgacacagagccctagcagcctgtccgtgtccgtgggagacagagtgaccatcacatgcaaggccagccagaacgtgcggacagtggtggcttggtatcagcagaagcctggactggcccctaagacactgatctacctggcctccaacagacacaccggcgtgccaagcagattttctggcagcggctctggcaccgacttcaccttcacaatatccagcctccagcctgaggacattgccacctacttttgccagcagcactggtcttaccctctgacctttggacagggcaccaaggtggaagtgaagagactcgaggacctgaagaacgtgttcccacctgaggtggccgtgttcgagcctagcgaggccgagatcagccacacccagaaagccaccctcgtgtgcctggctaccggcttctaccccgaccatgtggaactgtcttggtgggtcaacggcaaagaggtgcacagcggcgtgtgtaccgacccccagccactgaaagaacagcccgccctgaacgacagccggtactgcctgagcagcagactgagagtgtccgccaccttctggcagaacccccggaaccacttcagatgccaggtgcagttctacggcctgagcgagaacgacgagtggacccaggacagagccaagcccgtgacccagatcgtgtctgccgaagcctggggcagagccgattgcggctttaccagcgagagctaccagcagggcgtgctgagcgccaccatcctgtacgagatcctgctgggcaaggccaccctgtacgccgtgctggtgtctgccctggtgctgatggctatggtcaagcggaaggacagccggggaagggccaagcgatctggatctggagcaacaaacttctcactactcaaacaagcaggtgacgtggaggagaatcccgggcctactagtatggactggatttggcgcatccttttccttgtcggcgctgctaccggcgcccattcccaactgcaactgcaagagtctggccctggcctggtcaagccttctgaaaccctgagcctgacctgtaccgtgtccggcggctctatcagcagcggcgattactactggggctggatcagacagcctccaggcaagggactcgaatggatcggcagcatcagctacagcggctccacctactacaacccaagcctgaagtccagagtgaccatcagcgtggacaccagcagaaaccagttctccctgaagctgagcagcgtgacagccgccgatacagccgtgtattattgcaccagagaggacagcagcaactggcggagtagaggacagggcacactggtcacagtgtcctcttctggaggcggtggaagcggtggaggaggatctgaagtgcagctggttgaatctggcggaggactggttcaggctggcggatctctgagactgtcttgtgccgccagcggcagaacctttagcatgggctggtttagacaggcccctggcaaagagagagagttcgtcgccgccatcacatactctggcggcagcccttactacgccgactctgtgaagggcagattcaccatcagccgggacaacgccaagaacaccgtgtacctccagatgaacagcctgaagcctgaggacaccgccgtgtactactgcgccgccaatccaacatacggcagcgactggaacgccgagaattggggccagggaacccaagtgacagtgtctagcggatccggcggcggaggatctggcggaggcggatctgggggcggaggctctttcgaagaagttcagctgcttgaatctggcggcggactggttcaacctggcggatctctgagactgagctgtgccgcctctggcttcgccttcagcacctacgatatgagctgggtccgacaggcccctggcaaaggacttgaatgggtcgccacaatcagcagcggcggcagctacacctactacctggatagcgtgaagggcagattcaccatcagccgggacagcagcaagaacaccctgtacctccagatgaactccctccaggccgaggactccgccatctactattgtgcccctaccaccgtggtgcctttcgcctattggggacagggaaccctggtcaccgttagctctacgcgtatccagaaccctgatcctgccgtgtaccagctgcgggatagcaagagcagcgacaagagcgtgtgtctgttcaccgacttcgacagccagaccaacgtgtcccagagcaaggactccgacgtgtacatcaccgataagtgcgtgctggacatgcggagcatggacttcaagagcaactccgccgtggcctggtccaacaagtccgatttcgcctgcgccaacgccttcaacaacagcattatccccgaggacacattcttcccaagccccgagagcagctgcgacgtgaagctggtggaaaagagcttcgagacagacaccaacctgaacttccagaacctgagcgtgatcggcttcagaatcctgctgctgaaagtggccggctttaacctgctgatgaccctgcggctgtggtccagc

SEQ ID NO: 10306 - DNA, 2673 bp, Artificial Sequence
  Synthetic Polynucloetide
atggccttaccagtgaccgccttgctcctgccgctggccttgctgctccacgccgccaggccggaagtgcaggttttggagtctggcggaggactggttcagcctggcggatctctgagactgtcttgtgccgccagcggcttcaccttcagcaactttgccatgagctgggtccgacaggcccctggcaaaggacttgaatgggtgtccacaatcagcggcagcgccggcacaacagattacgccgattctgtgaagggcagattcaccatcagccgggacaacagcaagaaaaccctgtacctccagatgaacagcctgcgcgtggaagataccgccgtgtactactgtgccgatggcagaggccccttcttcgattatcgcggccagggcacactggtcaccgtttcttctggtaccggcggaggcggatctggcggcggaggtagcggtggcggaggatctgaattcgacatccagatgacacagagccctagcagcctgtccgtgtccgtgggagacagagtgaccatcacatgcaaggccagccagaacgtgcggacagtggtggcttggtatcagcagaagcctggactggcccctaagacactgatctacctggcctccaacagacacaccggcgtgccaagcagattttctggcagcggctctggcaccgacttcaccttcacaatatccagcctccagcctgaggacattgccacctacttttgccagcagcactggtcttaccctctgacctttggacagggcaccaaggtggaagtgaagagactcgaggacctgaagaacgtgttcccacctgaggtggccgtgttcgagcctagcgaggccgagatcagccacacccagaaagccaccctcgtgtgcctggctaccggcttctaccccgaccatgtggaactgtcttggtgggtcaacggcaaagaggtgcacagcggcgtgtgtaccgacccccagccactgaaagaacagcccgccctgaacgacagccggtactgcctgagcagcagactgagagtgtccgccaccttctggcagaacccccggaaccacttcagatgccaggtgcagttctacggcctgagcgagaacgacgagtggacccaggacagagccaagcccgtgacccagatcgtgtctgccgaagcctggggcagagccgattgcggctttaccagcgagagctaccagcagggcgtgctgagcgccaccatcctgtacgagatcctgctgggcaaggccaccctgtacgccgtgctggtgtctgccctggtgctgatggctatggtcaagcggaaggacagccggggaagggccaagcgatctggatctggagcaacaaacttctcactactcaaacaagcaggtgacgtggaggagaatcccgggcctactagtatggactggatttggcgcatccttttccttgtcggcgctgctaccggcgcccattccgggcccgaagtgcagctggttgaatctggcggaggactggttcaggctggcggatctctgagactgtcttgtgccgccagcggcagaacctttagcatgggctggtttagacaggcccctggcaaagagagagagttcgtcgccgccatcacatacagcggcggcagcccttactacgcctcttctgtcagaggccggttcaccatcagccgggacaacgccaagaacaccgtgtacctccagatgaacagcctgaagccagaggacaccgccgtgtactactgtgccgccaatccaacctacggcagcgactggaatgccgagaattggggccagggcacccaagtgacagtgtctagtggatccggcggcggaggatctggcggaggcggatctgggggcggaggctctttcgaagaagttcagctgcttgaatctggcggcggactggttcaacctggcggatctctgagactgagctgtgccgcctctggcttcgccttcagcacctacgatatgagctgggtccgacaggcccctggcaaaggacttgaatgggtcgccacaatcagcagcggcggcagctacacctactacctggatagcgtgaagggcagattcaccatcagccgggacagcagcaagaacaccctgtacctccagatgaactccctccaggccgaggactccgccatctactattgtgcccctaccaccgtggtgcctttcgcctattggggacagggaaccctggtcaccgttagctctacgcgtatccagaaccctgatcctgccgtgtaccagctgcgggatagcaagagcagcgacaagagcgtgtgtctgttcaccgacttcgacagccagaccaacgtgtcccagagcaaggactccgacgtgtacatcaccgataagtgcgtgctggacatgcggagcatggacttcaagagcaactccgccgtggcctggtccaacaagtccgatttcgcctgcgccaacgccttcaacaacagcattatccccgaggacacattcttcccaagccccgagagcagctgcgacgtgaagctggtggaaaagagcttcgagacagacaccaacctgaacttccagaacctgagcgtgatcggcttcagaatcctgctgctgaaagtggccggctttaacctgctgatgaccctgcggctgtggtccagc

SEQ ID NO: 10307 - DNA, 2181 bp, Artificial Sequence
  Synthetic Polynucloetide
atggccttaccagtgaccgccttgctcctgccgctggccttgctgctccacgccgccaggccggacattcagatgacacagagccctagcagcctgagcgcctctgtgggagacagagtgaccatcacatgcaagagcagccagagcctgctgtactccagcaatcagaagaactacctggcctggttccagcagaagcctggcaaggctcctaagctgctgatctactgggccagcaccagagaaagcggcgtgccaagcagattttctggcagcggctctggcaccgacttcaccctgacaatatccagcctccagcctgaggacttcgccacctacttttgccaccagtacctgagcagctacacattcggacagggcaccaaggtggaaatcaagcggggcggaggcggaagtggaggcggaggatctggcggcggaggctctgaggtgcagctggttgaatctggcggaggactggttcagcctggcggatctctgagactgtcttgtgccgccagcggctacaccttcaccagctattggctgcactgggtccgacaggcccctggcaaaggacttgagtgggtcggatatatcaggcccagcaccggctacacagagtacaaccagaagttcaaggaccgcttcaccatcagcgccgacaccagcaagaataccgcctacctccagatgaacagcctgagagccgaggacaccgccgtgtactactgtgccagatccagatggctgctggactattggggccagggcacactggttacagttagctctacgcgtgagcagaaactgatctcggaagaggatctggcgaagcccaccacgacgccagcgccgcgaccaccaacaccggcgcccaccatcgcgtcgcagcccctgtccctgcgcccagaggcgtgccggccagcggcggggggcgcagtgcacacgagggggctggacttcgcctgtgacatctacatctgggcgcccttggccgggacttgtggggtccttctcctgtcactggttatcaccctttactgcaaacggggcagaaagaaactcctgtatatattcaaacaaccatttatgagaccagtacaaactactcaagaggaagatggctgtagctgccgatttccagaagaagaagaaggaggatgtgaactgagagtgaagttcagcaggagcgcagacgcccccgcgtaccagcagggccagaaccagctctataacgagctgaatctaggacgaagagaggagtacgatgttttggacaagagacgtggccgggaccctgagatggggggaaagccgagaaggaagaaccctcaggaaggcctgtacaatgaactgcagaaagataagatggcggaggcctacagtgagattgggatgaaaggcgagcgccggaggggcaaggggcacgatggcctttaccagggtctcagtacagccaccaaggacacctacgacgcccttcacatgcaggccctgccccctcgctctagtggctccggcgagggcagaggaagtctactaacctgcggagatgtggaagaaaatcctggcccacatatgaccgagtacaagcccacggtgcgcctcgccacccgcgacgacgtccccagggccgtacgcaccctcgccgccgcgttcgccgactaccccgccacgcgccacaccgtcgatccggaccgccacatcgagcgggtcaccgagctgcaagaactcttcctcacgcgcgtcgggctcgacatcggcaaggtgtgggtcgcggacgacggcgccgcggtggcggtctggaccacgccggagagcgtcgaagcgggggcggtgttcgccgagatcggcccgcgcatggccgagttgagcggttcccggctggccgcgcagcaacagatggaaggcctcctggcgccgcaccggcccaaggagcccgcgtggttcctggccaccgtcggcgtctcgcccgaccaccagggcaagggtctgggcagcgccgtcgtgctccccggagtggaggcggccgagcgcgccggggtgcccgccttcctggagacctccgcgccccgcaacctccccttctacgagcggctcggcttcaccgtcaccgccgacgtcgaggtgcccgaaggaccgcgcacctggtgcatgacccgcaagcccggtgcctga

SEQ ID NO: 10308 - DNA, 2163 bp, Artificial Sequence
  Synthetic Polynucloetide
atggccttaccagtgaccgccttgctcctgccgctggccttgctgctccacgccgccaggccggacattcagatgacacagagccctagcagcctgagcgcctctgtgggagacagagtgaccatcacatgcaagagcagccagagcctgctgtactccagcaatcagaagaactacctggcctggttccagcagaagcctggcaaggctcctaagctgctgatctactgggccagcaccagagaaagcggcgtgccaagcagattttctggcagcggctctggcaccgacttcaccctgacaatatccagcctccagcctgaggacttcgccacctacttttgccaccagtacctgagcagctacacattcggacagggcaccaaggtggaaatcaagcggggcggaggcggaagtggaggcggaggatctggcggcggaggctctgaggtgcagctggttgaatctggcggaggactggttcagcctggcggatctctgagactgtcttgtgccgccagcggctacaccttcaccagctattggctgcactgggtccgacaggcccctggcaaaggacttgagtgggtcggatatatcaggcccagcaccggctacacagagtacaaccagaagttcaaggaccgcttcaccatcagcgccgacaccagcaagaataccgcctacctccagatgaacagcctgagagccgaggacaccgccgtgtactactgtgccagatccagatggctgctggactattggggccagggcacactggttacagttagctctacgcgtgagcagaaactgatctcggaagaggatctgaaaattgaagttatgtatcctcctccttacctagacaatgagaagagcaatggaaccattatccatgtgaaagggaaacacctttgtccaagtcccctatttcccggaccttctaagcccttttgggtgctggtggtggttgggggagtcctggcttgctatagcttgctagtaacagtggcctttattattttctgggtgaggagtaagaggagcaggctcctgcacagtgactacatgaacatgactccacgccgccccggacccacccgcaagcattaccagccctatgccccaccacgcgacttcgcagcctatcgctccagagtgaagttcagcaggagcgcagacgcccccgcgtaccagcagggccagaaccagctctataacgagctcaatctaggacgaagagaggagtacgatgttttggacaagagacgtggccgggaccctgagatggggggaaagccgagaaggaagaaccctcaggaaggcctgtacaatgaactgcagaaagataagatggcggaggcctacagtgagattgggatgaaaggcgagcgccggaggggcaaggggcacgatggcctttaccagggtctcagtacagccaccaaggacacctacgacgcccttcacatgcaggccctgccccctcgctctagtggctccggcgagggcagaggaagtctactaacctgcggagatgtggaagaaaatcctggcccacatatgaccgagtacaagcccacggtgcgcctcgccacccgcgacgacgtccccagggccgtacgcaccctcgccgccgcgttcgccgactaccccgccacgcgccacaccgtcgatccggaccgccacatcgagcgggtcaccgagctgcaagaactcttcctcacgcgcgtcgggctcgacatcggcaaggtgtgggtcgcggacgacggcgccgcggtggcggtctggaccacgccggagagcgtcgaagcgggggcggtgttcgccgagatcggcccgcgcatggccgagttgagcggttcccggctggccgcgcagcaacagatggaaggcctcctggcgccgcaccggcccaaggagcccgcgtggttcctggccaccgtcggcgtctcgcccgaccaccagggcaagggtctgggcagcgccgtcgtgctccccggagtggaggcggccgagcgcgccggggtgcccgccttcctggagacctccgcgccccgcaacctccccttctacgagcggctcggcttcaccgtcaccgccgacgtcgaggtgcccgaaggaccgcgcacctggtgcatgacccgcaagcccggtgcctga

SEQ ID NO: 10309 - DNA, 1491 bp, Artificial Sequence
  Synthetic Polynucloetide
atggccttaccagtgaccgccttgctcctgccgctggccttgctgctccacgccgccaggccggacattcagatgacacagagccctagcagcctgagcgcctctgtgggagacagagtgaccatcacatgcaagagcagccagagcctgctgtactccagcaatcagaagaactacctggcctggttccagcagaagcctggcaaggctcctaagctgctgatctactgggccagcaccagagaaagcggcgtgccaagcagattttctggcagcggctctggcaccgacttcaccctgacaatatccagcctccagcctgaggacttcgccacctacttttgccaccagtacctgagcagctacacattcggacagggcaccaaggtggaaatcaagcggggcggaggcggaagtggaggcggaggatctggcggcggaggctctgaggtgcagctggttgaatctggcggaggactggttcagcctggcggatctctgagactgtcttgtgccgccagcggctacaccttcaccagctattggctgcactgggtccgacaggcccctggcaaaggacttgagtgggtcggatatatcaggcccagcaccggctacacagagtacaaccagaagttcaaggaccgcttcaccatcagcgccgacaccagcaagaataccgcctacctccagatgaacagcctgagagccgaggacaccgccgtgtactactgtgccagatccagatggctgctggactattggggccagggcacactggttacagttagctctacgcgtgagcagaaactgatctcggaagaggatctgaaaattgaagttatgtatcctcctccttacctagacaatgagaagagcaatggaaccattatccatgtgaaagggaaacacctttgtccaagtcccctatttcccggaccttctaagcccttttgggtgctggtggtggttgggggagtcctggcttgctatagcttgctagtaacagtggcctttattattttctgggtgaggagtaagaggagcaggctcctgcacagtgactacatgaacatgactccacgccgccccggacccacccgcaagcattaccagccctatgccccaccacgcgacttcgcagcctatcgctccagagtgaagttcagcaggagcgcagacgcccccgcgtaccagcagggccagaaccagctctataacgagctcaatctaggacgaagagaggagtacgatgttttggacaagagacgtggccgggaccctgagatggggggaaagccgagaaggaagaaccctcaggaaggcctgtacaatgaactgcagaaagataagatggcggaggcctacagtgagattgggatgaaaggcgagcgccggaggggcaaggggcacgatggcctttaccagggtctcagtacagccaccaaggacacctacgacgcccttcacatgcaggccctgccccctcgc

SEQ ID NO: 10310 - DNA, 1512 bp, Artificial Sequence
  Synthetic Polynucloetide
atggccttaccagtgaccgccttgctcctgccgctggccttgctgctccacgccgccaggccggacattcagatgacacagagccctagcagcctgagcgcctctgtgggagacagagtgaccatcacatgcaagagcagccagagcctgctgtactccagcaatcagaagaactacctggcctggttccagcagaagcctggcaaggctcctaagctgctgatctactgggccagcaccagagaaagcggcgtgccaagcagattttctggcagcggctctggcaccgacttcaccctgacaatatccagcctccagcctgaggacttcgccacctacttttgccaccagtacctgagcagctacacattcggacagggcaccaaggtggaaatcaagcggggcggaggcggaagtggaggcggaggatctggcggcggaggctctgaggtgcagctggttgaatctggcggaggactggttcagcctggcggatctctgagactgtcttgtgccgccagcggctacaccttcaccagctattggctgcactgggtccgacaggcccctggcaaaggacttgagtgggtcggatatatcaggcccagcaccggctacacagagtacaaccagaagttcaaggaccgcttcaccatcagcgccgacaccagcaagaataccgcctacctccagatgaacagcctgagagccgaggacaccgccgtgtactactgtgccagatccagatggctgctggactattggggccagggcacactggttacagttagctctacgcgtgagcagaaactgatctcggaagaggatctggcgaagcccaccacgacgccagcgccgcgaccaccaacaccggcgcccaccatcgcgtcgcagcccctgtccctgcgcccagaggcgtgccggccagcggcggggggcgcagtgcacacgagggggctggacttcgcctgtgacatctacatctgggcgcccttggccgggacttgtggggtccttctcctgtcactggttatcaccctttactgcaaacggggcagaaagaaactcctgtatatattcaaacaaccatttatgagaccagtacaaactactcaagaggaagatggctgtagctgccgatttccagaagaagaagaaggaggatgtgaactgagagtgaagttcagcaggagcgcagacgcccccgcgtaccagcagggccagaaccagctctataacgagctgaatctaggacgaagagaggagtacgatgttttggacaagagacgtggccgggaccctgagatggggggaaagccgagaaggaagaaccctcaggaaggcctgtacaatgaactgcagaaagataagatggcggaggcctacagtgagattgggatgaaaggcgagcgccggaggggcaaggggcacgatggcctttaccagggtctcagtacagccaccaaggacacctacgacgcccttcacatgcaggccctgccccctcgctga

SEQ ID NO: 10311 - DNA, 1512 bp, Artificial Sequence
  Synthetic Polynucloetide
atggccttaccagtgaccgccttgctcctgccgctggccttgctgctccacgccgccaggccggaggtgcagctggttgaatctggcggaggactggttcagcctggcggatctctgagactgtcttgtgccgccagcggctacaccttcaccagctattggctgcactgggtccgacaggcccctggcaaaggacttgagtgggtcggatatatcaggcccagcaccggctacacagagtacaaccagaagttcaaggaccgcttcaccatcagcgccgacaccagcaagaataccgcctacctccagatgaacagcctgagagccgaggacaccgccgtgtactactgtgccagatccagatggctgctggactattggggccagggcacactggttacagttagctctggcggaggcggaagtggaggcggaggatctggcggcggaggctctgacattcagatgacacagagccctagcagcctgagcgcctctgtgggagacagagtgaccatcacatgcaagagcagccagagcctgctgtactccagcaatcagaagaactacctggcctggttccagcagaagcctggcaaggctcctaagctgctgatctactgggccagcaccagagaaagcggcgtgccaagcagattttctggcagcggctctggcaccgacttcaccctgacaatatccagcctccagcctgaggacttcgccacctacttttgccaccagtacctgagcagctacacattcggacagggcaccaaggtggaaatcaagcggacgcgtgagcagaaactgatctcggaagaggatctggcgaagcccaccacgacgccagcgccgcgaccaccaacaccggcgcccaccatcgcgtcgcagcccctgtccctgcgcccagaggcgtgccggccagcggcggggggcgcagtgcacacgagggggctggacttcgcctgtgacatctacatctgggcgcccttggccgggacttgtggggtccttctcctgtcactggttatcaccctttactgcaaacggggcagaaagaaactcctgtatatattcaaacaaccatttatgagaccagtacaaactactcaagaggaagatggctgtagctgccgatttccagaagaagaagaaggaggatgtgaactgagagtgaagttcagcaggagcgcagacgcccccgcgtaccagcagggccagaaccagctctataacgagctgaatctaggacgaagagaggagtacgatgttttggacaagagacgtggccgggaccctgagatggggggaaagccgagaaggaagaaccctcaggaaggcctgtacaatgaactgcagaaagataagatggcggaggcctacagtgagattgggatgaaaggcgagcgccggaggggcaaggggcacgatggcctttaccagggtctcagtacagccaccaaggacacctacgacgcccttcacatgcaggccctgccccctcgctga

SEQ ID NO: 10312 - DNA, 2751 bp, Artificial Sequence
  Synthetic Polynucloetide
atggccttaccagtgaccgccttgctcctgccgctggccttgctgctccacgccgccaggccggacattcagatgacacagagccctagcagcctgagcgcctctgtgggagacagagtgaccatcacatgcaagagcagccagagcctgctgtactccagcaatcagaagaactacctggcctggttccagcagaagcctggcaaggctcctaagctgctgatctactgggccagcaccagagaaagcggcgtgccaagcagattttctggcagcggctctggcaccgacttcaccctgacaatatccagcctccagcctgaggacttcgccacctacttttgccaccagtacctgagcagctacacattcggacagggcaccaaggtggaaatcaagcggggcggaggcggaagtggaggcggaggatctggcggcggaggctctgaggtgcagctggttgaatctggcggaggactggttcagcctggcggatctctgagactgtcttgtgccgccagcggctacaccttcaccagctattggctgcactgggtccgacaggcccctggcaaaggacttgagtgggtcggatatatcaggcccagcaccggctacacagagtacaaccagaagttcaaggaccgcttcaccatcagcgccgacaccagcaagaataccgcctacctccagatgaacagcctgagagccgaggacaccgccgtgtactactgtgccagatccagatggctgctggactattggggccagggcacactggttacagttagctctacgcgtgagcagaaactgatctcggaagaggatctggcgaagcccaccacgacgccagcgccgcgaccaccaacaccggcgcccaccatcgcgtcgcagcccctgtccctgcgcccagaggcgtgccggccagcggcggggggcgcagtgcacacgagggggctggacttcgcctgtgacatctacatctgggcgcccttggccgggacttgtggggtccttctcctgtcactggttatcaccctttactgcgggcgcgccagagtgaagttcagcaggagcgcagacgcccccgcgtaccagcagggccagaaccagctctataacgagctgaatctaggacgaagagaggagtacgatgttttggacaagagacgtggccgggaccctgagatggggggaaagccgagaaggaagaaccctcaggaaggcctgtacaatgaactgcagaaagataagatggcggaggcctacagtgagattgggatgaaaggcgagcgccggaggggcaaggggcacgatggcctttaccagggtctcagtacagccaccaaggacacctacgacgcccttcacatgcaggccctgccccctcgctctagaggatctggagcaacaaacttctcactactcaaacaagcaggtgacgtggaggagaatcccgggcctgggatccacatggccacttacgaggttctctgtgaggtggcgcggaaactgggcacggatgacagggaagtggtattgttcctcctaaacgtgttcatacctcaacccacactggcccaattaattggagctcttagagctttaaaggaggagggcaggttaacgtttcccctgttagcggaatgtctgtttcgtgcaggtcgcagagacctcttgcgcgacctgcttcacttagacccgcgttttttagagcgccacctagcgggcacaatgagttatttcagcccttatcagctcactgttctccacgtagacggggagctgtgtgcgagggatattaggtctttgatatttttaagcaaggacactatagggtctcgcagcacaccacagacattcttacactgggtgtactgtatggaaaacttagacctactgggtcccactgacgtggatgccctaatgtcaatgcttagatctttgtcaagagtagacctacagcgccaagtgcaaaccctaatgggccttcacctttccggcccatcacactcccaacactatcgccatacaccactcgagaccgatttctacgactacaaggacgacgatgacaagactagtggctccggcgagggcagaggaagtctactaacctgcggagatgtggaagaaaatcctggcccacatatgaccgagtacaagcccacggtgcgcctcgccacccgcgacgacgtccccagggccgtacgcaccctcgccgccgcgttcgccgactaccccgccacgcgccacaccgtcgatccggaccgccacatcgagcgggtcaccgagctgcaagaactcttcctcacgcgcgtcgggctcgacatcggcaaggtgtgggtcgcggacgacggcgccgcggtggcggtctggaccacgccggagagcgtcgaagcgggggcggtgttcgccgagatcggcccgcgcatggccgagttgagcggttcccggctggccgcgcagcaacagatggaaggcctcctggcgccgcaccggcccaaggagcccgcgtggttcctggccaccgtcggcgtctcgcccgaccaccagggcaagggtctgggcagcgccgtcgtgctccccggagtggaggcggccgagcgcgccggggtgcccgccttcctggagacctccgcgccccgcaacctccccttctacgagcggctcggcttcaccgtcaccgccgacgtcgaggtgcccgaaggaccgcgcacctggtgcatgacccgcaagcccggtgcctga

SEQ ID NO: 10313 - DNA, 2571 bp, Artificial Sequence
  Synthetic Polynucloetide
atggccttaccagtgaccgccttgctcctgccgctggccttgctgctccacgccgccaggccggacattcagatgacacagagccctagcagcctgagcgcctctgtgggagacagagtgaccatcacatgcaagagcagccagagcctgctgtactccagcaatcagaagaactacctggcctggttccagcagaagcctggcaaggctcctaagctgctgatctactgggccagcaccagagaaagcggcgtgccaagcagattttctggcagcggctctggcaccgacttcaccctgacaatatccagcctccagcctgaggacttcgccacctacttttgccaccagtacctgagcagctacacattcggacagggcaccaaggtggaaatcaagcggctcgagatccagaaccctgatcctgccgtgtaccagctgcgggatagcaagagcagcgacaagagcgtgtgtctgttcaccgacttcgacagccagaccaacgtgtcccagagcaaggactccgacgtgtacatcaccgataagtgcgtgctggacatgcggagcatggacttcaagagcaactccgccgtggcctggtccaacaagtccgatttcgcctgcgccaacgccttcaacaacagcattatccccgaggacacattcttcccaagcagcgacgtgccctgcgacgtgaagctggtggaaaagagcttcgagacagacaccaacctgaacttccagaacctgagcgtgatcggcttcagaatcctgctgctgaaagtggccggctttaacctgctgatgaccctgcggctgtggtccagccgcgccaagagaagcggatctggcgtgaagcagaccctgaatttcgacctgctgaagctggctggcgacgtggaatccaacccaggccctactagtatggactggatttggcgcatccttttccttgtcggcgctgctaccggcgcgcattccttcgaagaggtgcagctggttgaatctggcggaggactggttcagcctggcggatctctgagactgtcttgtgccgccagcggctacaccttcaccagctattggctgcactgggtccgacaggcccctggcaaaggacttgagtgggtcggatatatcaggcccagcaccggctacacagagtacaaccagaagttcaaggaccgcttcaccatcagcgccgacaccagcaagaataccgcctacctccagatgaacagcctgagagccgaggacaccgccgtgtactactgtgccagatccagatggctgctggactattggggccagggcacactggttacagttagctctacgcgtgaggacctgaagaacgtgttcccacctgaggtggccgtgttcgagcctagcaaggccgagatcgcccacacccagaaagccaccctcgtgtgcctggctaccggcttctaccccgaccatgtggaactgtcttggtgggtcaacggcaaagaggtgcacagcggcgtgtgtaccgacccccagccactgaaagaacagcccgccctgaacgacagccggtactgcctgagcagcagactgagagtgtccgccaccttctggcagaacccccggaaccacttcagatgccaggtgcagttctacggcctgagcgagaacgacgagtggacccaggacagagccaagcccgtgacccagatcgtgtctgccgaagcctggggcagagccgattgcggcatcaccagcgccagctaccaccagggcgtgctgagcgccaccatcctgtacgagatcctgctgggcaaggccaccctgtacgccgtgctggtgtctgccctggtgctgatggctatggtcaagcggaaggacagccggggaagggccaagcgatctggatctggagcaacaaacttctcactactcaaacaagcaggtgacgtggaggagaatcccgggccttctagaggccatatgaccgagtacaagcccacggtgcgcctcgccacccgcgacgacgtccccagggccgtacgcaccctcgccgccgcgttcgccgactaccccgccacgcgccacaccgtcgatccggaccgccacatcgagcgggtcaccgagctgcaagaactcttcctcacgcgcgtcgggctcgacatcggcaaggtgtgggtcgcggacgacggcgccgcggtggcggtctggaccacgccggagagcgtcgaagcgggggcggtgttcgccgagatcggcccgcgcatggccgagttgagcggttcccggctggccgcgcagcaacagatggaaggcctcctggcgccgcaccggcccaaggagcccgcgtggttcctggccaccgtcggcgtctcgcccgaccaccagggcaagggtctgggcagcgccgtcgtgctccccggagtggaggcggccgagcgcgccggggtgcccgccttcctggagacctccgcgccccgcaacctccccttctacgagcggctcggcttcaccgtcaccgccgacgtcgaggtgcccgaaggaccgcgcacctggtgcatgacccgcaagcccggtgcctga

SEQ ID NO: 10314 - DNA, 2568 bp, Artificial Sequence
  Synthetic Polynucloetide
atggccttaccagtgaccgccttgctcctgccgctggccttgctgctccacgccgccaggccggacattcagatgacacagagccctagcagcctgagcgcctctgtgggagacagagtgaccatcacatgcaagagcagccagagcctgctgtactccagcaatcagaagaactacctggcctggttccagcagaagcctggcaaggctcctaagctgctgatctactgggccagcaccagagaaagcggcgtgccaagcagattttctggcagcggctctggcaccgacttcaccctgacaatatccagcctccagcctgaggacttcgccacctacttttgccaccagtacctgagcagctacacattcggacagggcaccaaggtggaaatcaagcggctcgaggacctgaagaacgtgttcccacctgaggtggccgtgttcgagcctagcaaggccgagatcgcccacacccagaaagccaccctcgtgtgcctggctaccggcttctaccccgaccatgtggaactgtcttggtgggtcaacggcaaagaggtgcacagcggcgtgtgtaccgacccccagccactgaaagaacagcccgccctgaacgacagccggtactgcctgagcagcagactgagagtgtccgccaccttctggcagaacccccggaaccacttcagatgccaggtgcagttctacggcctgagcgagaacgacgagtggacccaggacagagccaagcccgtgacccagatcgtgtctgccgaagcctggggcagagccgattgcggcatcaccagcgccagctaccaccagggcgtgctgagcgccaccatcctgtacgagatcctgctgggcaaggccaccctgtacgccgtgctggtgtctgccctggtgctgatggctatggtcaagcggaaggacagccggggaagggccaagcgatctggatctggagcaacaaacttctcactactcaaacaagcaggtgacgtggaggagaatcccgggcctactagtatggactggatttggcgcatccttttccttgtcggcgctgctaccggcgcgcattccttcgaagaggtgcagctggttgaatctggcggaggactggttcagcctggcggatctctgagactgtcttgtgccgccagcggctacaccttcaccagctattggctgcactgggtccgacaggcccctggcaaaggacttgagtgggtcggatatatcaggcccagcaccggctacacagagtacaaccagaagttcaaggaccgcttcaccatcagcgccgacaccagcaagaataccgcctacctccagatgaacagcctgagagccgaggacaccgccgtgtactactgtgccagatccagatggctgctggactattggggccagggcacactggttacagttagctctacgcgtatccagaaccctgatcctgccgtgtaccagctgcgggatagcaagagcagcgacaagagcgtgtgtctgttcaccgacttcgacagccagaccaacgtgtcccagagcaaggactccgacgtgtacatcaccgataagtgcgtgctggacatgcggagcatggacttcaagagcaactccgccgtggcctggtccaacaagtccgatttcgcctgcgccaacgccttcaacaacagcattatccccgaggacacattcttcccaagcagcgacgtgccctgcgacgtgaagctggtggaaaagagcttcgagacagacaccaacctgaacttccagaacctgagcgtgatcggcttcagaatcctgctgctgaaagtggccggctttaacctgctgatgaccctgcggctgtggtccagccgcgccaagagaagcggatctggcgtgaagcagaccctgaatttcgacctgctgaagctggctggcgacgtggaatccaacccaggcccttctagaggccatatgaccgagtacaagcccacggtgcgcctcgccacccgcgacgacgtccccagggccgtacgcaccctcgccgccgcgttcgccgactaccccgccacgcgccacaccgtcgatccggaccgccacatcgagcgggtcaccgagctgcaagaactcttcctcacgcgcgtcgggctcgacatcggcaaggtgtgggtcgcggacgacggcgccgcggtggcggtctggaccacgccggagagcgtcgaagcgggggcggtgttcgccgagatcggcccgcgcatggccgagttgagcggttcccggctggccgcgcagcaacagatggaaggcctcctggcgccgcaccggcccaaggagcccgcgtggttcctggccaccgtcggcgtctcgcccgaccaccagggcaagggtctgggcagcgccgtcgtgctccccggagtggaggcggccgagcgcgccggggtgcccgccttcctggagacctccgcgccccgcaacctccccttctacgagcggctcggcttcaccgtcaccgccgacgtcgaggtgcccgaaggaccgcgcacctggtgcatgacccgcaagcccggtgcctga

SEQ ID NO: 10315 - DNA, 1866 bp, Artificial Sequence
  Synthetic Polynucloetide
atggccttaccagtgaccgccttgctcctgccgctggccttgctgctccacgccgccaggccggacattcagatgacacagagccctagcagcctgagcgcctctgtgggagacagagtgaccatcacatgcaagagcagccagagcctgctgtactccagcaatcagaagaactacctggcctggttccagcagaagcctggcaaggctcctaagctgctgatctactgggccagcaccagagaaagcggcgtgccaagcagattttctggcagcggctctggcaccgacttcaccctgacaatatccagcctccagcctgaggacttcgccacctacttttgccaccagtacctgagcagctacacattcggacagggcaccaaggtggaaatcaagcggctcgaggacctgaagaacgtgttcccacctgaggtggccgtgttcgagcctagcgaggccgagatcagccacacccagaaagccaccctcgtgtgcctggctaccggcttctaccccgaccatgtggaactgtcttggtgggtcaacggcaaagaggtgcacagcggcgtgtgtaccgacccccagccactgaaagaacagcccgccctgaacgacagccggtactgcctgagcagcagactgagagtgtccgccaccttctggcagaacccccggaaccacttcagatgccaggtgcagttctacggcctgagcgagaacgacgagtggacccaggacagagccaagcccgtgacccagatcgtgtctgccgaagcctggggcagagccgattgcggctttaccagcgagagctaccagcagggcgtgctgagcgccaccatcctgtacgagatcctgctgggcaaggccaccctgtacgccgtgctggtgtctgccctggtgctgatggctatggtcaagcggaaggacagccggggaagggccaagcgatctggatctggagcaacaaacttctcactactcaaacaagcaggtgacgtggaggagaatcccgggcctactagtatggactggatttggcgcatccttttccttgtcggcgctgctaccggcgcgcattccttcgaagaggtgcagctggttgaatctggcggaggactggttcagcctggcggatctctgagactgtcttgtgccgccagcggctacaccttcaccagctattggctgcactgggtccgacaggcccctggcaaaggacttgagtgggtcggatatatcaggcccagcaccggctacacagagtacaaccagaagttcaaggaccgcttcaccatcagcgccgacaccagcaagaataccgcctacctccagatgaacagcctgagagccgaggacaccgccgtgtactactgtgccagatccagatggctgctggactattggggccagggcacactggttacagttagctctacgcgtatccagaaccctgatcctgccgtgtaccagctgcgggatagcaagagcagcgacaagagcgtgtgtctgttcaccgacttcgacagccagaccaacgtgtcccagagcaaggactccgacgtgtacatcaccgataagtgcgtgctggacatgcggagcatggacttcaagagcaactccgccgtggcctggtccaacaagtccgatttcgcctgcgccaacgccttcaacaacagcattatccccgaggacacattcttcccaagccccgagagcagctgcgacgtgaagctggtggaaaagagcttcgagacagacaccaacctgaacttccagaacctgagcgtgatcggcttcagaatcctgctgctgaaagtggccggctttaacctgctgatgaccctgcggctgtggtccagc

SEQ ID NO: 10316 - DNA, 2541 bp, Artificial Sequence
  Synthetic Polynucloetide
atggccttaccagtgaccgccttgctcctgccgctggccttgctgctccacgccgccaggccggacattcagatgacacagagccctagcagcctgagcgcctctgtgggagacagagtgaccatcacatgcaagagcagccagagcctgctgtactccagcaatcagaagaactacctggcctggttccagcagaagcctggcaaggctcctaagctgctgatctactgggccagcaccagagaaagcggcgtgccaagcagattttctggcagcggctctggcaccgacttcaccctgacaatatccagcctccagcctgaggacttcgccacctacttttgccaccagtacctgagcagctacacattcggacagggcaccaaggtggaaatcaagcggctcgaggacctgaagaacgtgttcccacctgaggtggccgtgttcgagcctagcgaggccgagatcagccacacccagaaagccaccctcgtgtgcctggctaccggcttctaccccgaccatgtggaactgtcttggtgggtcaacggcaaagaggtgcacagcggcgtgtgtaccgacccccagccactgaaagaacagcccgccctgaacgacagccggtactgcctgagcagcagactgagagtgtccgccaccttctggcagaacccccggaaccacttcagatgccaggtgcagttctacggcctgagcgagaacgacgagtggacccaggacagagccaagcccgtgacccagatcgtgtctgccgaagcctggggcagagccgattgcggctttaccagcgagagctaccagcagggcgtgctgagcgccaccatcctgtacgagatcctgctgggcaaggccaccctgtacgccgtgctggtgtctgccctggtgctgatggctatggtcaagcggaaggacagccggggaagggccaagcgatctggatctggagcaacaaacttctcactactcaaacaagcaggtgacgtggaggagaatcccgggcctactagtatggactggatttggcgcatccttttccttgtcggcgctgctaccggcgcgcattccttcgaagaggtgcagctggttgaatctggcggaggactggttcagcctggcggatctctgagactgtcttgtgccgccagcggctacaccttcaccagctattggctgcactgggtccgacaggcccctggcaaaggacttgagtgggtcggatatatcaggcccagcaccggctacacagagtacaaccagaagttcaaggaccgcttcaccatcagcgccgacaccagcaagaataccgcctacctccagatgaacagcctgagagccgaggacaccgccgtgtactactgtgccagatccagatggctgctggactattggggccagggcacactggttacagttagctctacgcgtatccagaaccctgatcctgccgtgtaccagctgcgggatagcaagagcagcgacaagagcgtgtgtctgttcaccgacttcgacagccagaccaacgtgtcccagagcaaggactccgacgtgtacatcaccgataagtgcgtgctggacatgcggagcatggacttcaagagcaactccgccgtggcctggtccaacaagtccgatttcgcctgcgccaacgccttcaacaacagcattatccccgaggacacattcttcccaagccccgagagcagctgcgacgtgaagctggtggaaaagagcttcgagacagacaccaacctgaacttccagaacctgagcgtgatcggcttcagaatcctgctgctgaaagtggccggctttaacctgctgatgaccctgcggctgtggtccagccgcgccaagagaagcggatctggcgtgaagcagaccctgaatttcgacctgctgaagctggctggcgacgtggaatccaacccaggcccttctagaggcgggatccacaccatggctacctacgaggtgctgtgcgaggtggcaagaaagctgggcaccgacgacagagaagtggtgctgttcctgctgaacgtgttcatccctcagcctacactggcccagctgatcggtgcactgagagccctgaaagaggaaggccggctgacctttcctctgctggccgaatgcctgttcagagccggaagaagggatctgctgcgggacctgctgcatctggaccccagatttctggaaagacacctggccggcaccatgagctacttcagcccttaccagctgaccgtgctgcacgttgacggcgaactgtgcgccagagatattcggagcctgatcttcctgagcaaggacaccatcggcagccggtctacccctcagacatttctgcactgggtgtactgcatggaaaacctggacctgctcggccccacagatgtggatgccctgatgtccatgctgagaagcctgagcagagtggacctccagagacaggtgcagacactgatgggactgcacctgagcggacctagccacagccagcactacagacacacccct

SEQ ID NO: 10317 - DNA, 1878 bp, Artificial Sequence
  Synthetic Polynucloetide
atggccttaccagtgaccgccttgctcctgccgctggccttgctgctccacgccgccaggccggacattcagatgacacagagccctagcagcctgagcgcctctgtgggagacagagtgaccatcacatgcaagagcagccagagcctgctgtactccagcaatcagaagaactacctggcctggttccagcagaagcctggcaaggctcctaagctgctgatctactgggccagcaccagagaaagcggcgtgccaagcagattttctggcagcggctctggcaccgacttcaccctgacaatatccagcctccagcctgaggacttcgccacctacttttgccaccagtacctgagcagctacacattcggacagggcaccaaggtggaaatcaagcggctcgagatccagaaccctgatcctgccgtgtaccagctgcgggatagcaagagcagcgacaagagcgtgtgtctgttcaccgacttcgacagccagaccaacgtgtcccagagcaaggactccgacgtgtacatcaccgataagtgcgtgctggacatgcggagcatggacttcaagagcaactccgccgtggcctggtccaacaagtccgatttcgcctgcgccaacgccttcaacaacagcattatccccgaggacacattcttcccaagccccgagagcagctgcgacgtgaagctggtggaaaagagcttcgagacagacaccaacctgaacttccagaacctgagcgtgatcggcttcagaatcctgctgctgaaagtggccggctttaacctgctgatgaccctgcggctgtggtccagccgcgccaagagaagcggatctggcgtgaagcagaccctgaatttcgacctgctgaagctggctggcgacgtggaatccaacccaggccctactagtatggactggatttggcgcatccttttccttgtcggcgctgctaccggcgcgcattccttcgaagaggtgcagctggttgaatctggcggaggactggttcagcctggcggatctctgagactgtcttgtgccgccagcggctacaccttcaccagctattggctgcactgggtccgacaggcccctggcaaaggacttgagtgggtcggatatatcaggcccagcaccggctacacagagtacaaccagaagttcaaggaccgcttcaccatcagcgccgacaccagcaagaataccgcctacctccagatgaacagcctgagagccgaggacaccgccgtgtactactgtgccagatccagatggctgctggactattggggccagggcacactggttacagttagctctacgcgtgaggacctgaagaacgtgttcccacctgaggtggccgtgttcgagcctagcgaggccgagatcagccacacccagaaagccaccctcgtgtgcctggctaccggcttctaccccgaccatgtggaactgtcttggtgggtcaacggcaaagaggtgcacagcggcgtgtgtaccgacccccagccactgaaagaacagcccgccctgaacgacagccggtactgcctgagcagcagactgagagtgtccgccaccttctggcagaacccccggaaccacttcagatgccaggtgcagttctacggcctgagcgagaacgacgagtggacccaggacagagccaagcccgtgacccagatcgtgtctgccgaagcctggggcagagccgattgcggctttaccagcgagagctaccagcagggcgtgctgagcgccaccatcctgtacgagatcctgctgggcaaggccaccctgtacgccgtgctggtgtctgccctggtgctgatggctatggtcaagcggaaggacagccgggga

SEQ ID NO: 10318 - DNA, 2544 bp, Artificial Sequence
  Synthetic Polynucloetide
atggccttaccagtgaccgccttgctcctgccgctggccttgctgctccacgccgccaggccggacattcagatgacacagagccctagcagcctgagcgcctctgtgggagacagagtgaccatcacatgcaagagcagccagagcctgctgtactccagcaatcagaagaactacctggcctggttccagcagaagcctggcaaggctcctaagctgctgatctactgggccagcaccagagaaagcggcgtgccaagcagattttctggcagcggctctggcaccgacttcaccctgacaatatccagcctccagcctgaggacttcgccacctacttttgccaccagtacctgagcagctacacattcggacagggcaccaaggtggaaatcaagcggctcgagatccagaaccctgatcctgccgtgtaccagctgcgggatagcaagagcagcgacaagagcgtgtgtctgttcaccgacttcgacagccagaccaacgtgtcccagagcaaggactccgacgtgtacatcaccgataagtgcgtgctggacatgcggagcatggacttcaagagcaactccgccgtggcctggtccaacaagtccgatttcgcctgcgccaacgccttcaacaacagcattatccccgaggacacattcttcccaagccccgagagcagctgcgacgtgaagctggtggaaaagagcttcgagacagacaccaacctgaacttccagaacctgagcgtgatcggcttcagaatcctgctgctgaaagtggccggctttaacctgctgatgaccctgcggctgtggtccagccgcgccaagagaagcggatctggcgtgaagcagaccctgaatttcgacctgctgaagctggctggcgacgtggaatccaacccaggccctactagtatggactggatttggcgcatccttttccttgtcggcgctgctaccggcgcgcattccttcgaagaggtgcagctggttgaatctggcggaggactggttcagcctggcggatctctgagactgtcttgtgccgccagcggctacaccttcaccagctattggctgcactgggtccgacaggcccctggcaaaggacttgagtgggtcggatatatcaggcccagcaccggctacacagagtacaaccagaagttcaaggaccgcttcaccatcagcgccgacaccagcaagaataccgcctacctccagatgaacagcctgagagccgaggacaccgccgtgtactactgtgccagatccagatggctgctggactattggggccagggcacactggttacagttagctctacgcgtgaggacctgaagaacgtgttcccacctgaggtggccgtgttcgagcctagcgaggccgagatcagccacacccagaaagccaccctcgtgtgcctggctaccggcttctaccccgaccatgtggaactgtcttggtgggtcaacggcaaagaggtgcacagcggcgtgtgtaccgacccccagccactgaaagaacagcccgccctgaacgacagccggtactgcctgagcagcagactgagagtgtccgccaccttctggcagaacccccggaaccacttcagatgccaggtgcagttctacggcctgagcgagaacgacgagtggacccaggacagagccaagcccgtgacccagatcgtgtctgccgaagcctggggcagagccgattgcggctttaccagcgagagctaccagcagggcgtgctgagcgccaccatcctgtacgagatcctgctgggcaaggccaccctgtacgccgtgctggtgtctgccctggtgctgatggctatggtcaagcggaaggacagccggggaagggccaagcgatctggatctggagcaacaaacttctcactactcaaacaagcaggtgacgtggaggagaatcccgggccttctagaggcgggatccacaccatggctacctacgaggtgctgtgcgaggtggcaagaaagctgggcaccgacgacagagaagtggtgctgttcctgctgaacgtgttcatccctcagcctacactggcccagctgatcggtgcactgagagccctgaaagaggaaggccggctgacctttcctctgctggccgaatgcctgttcagagccggaagaagggatctgctgcgggacctgctgcatctggaccccagatttctggaaagacacctggccggcaccatgagctacttcagcccttaccagctgaccgtgctgcacgttgacggcgaactgtgcgccagagatattcggagcctgatcttcctgagcaaggacaccatcggcagccggtctacccctcagacatttctgcactgggtgtactgcatggaaaacctggacctgctcggccccacagatgtggatgccctgatgtccatgctgagaagcctgagcagagtggacctccagagacaggtgcagacactgatgggactgcacctgagcggacctagccacagccagcactacagacacacccct

SEQ ID NO: 10319 - DNA, 2703 bp, Artificial Sequence
  Synthetic Polynucloetide
atggccttaccagtgaccgccttgctcctgccgctggccttgctgctccacgccgccaggccgctcgaggggaaaccaattcccaaccctcttctgggactggattcaaccggcagcggcgaggacctgaagaacgtgttcccacctgaggtggccgtgttcgagcctagcaaggccgagatcgcccacacccagaaagccaccctcgtgtgcctggctaccggcttctaccccgaccatgtggaactgtcttggtgggtcaacggcaaagaggtgcacagcggcgtgtgtaccgacccccagccactgaaagaacagcccgccctgaacgacagccggtactgcctgagcagcagactgagagtgtccgccaccttctggcagaacccccggaaccacttcagatgccaggtgcagttctacggcctgagcgagaacgacgagtggacccaggacagagccaagcccgtgacccagatcgtgtctgccgaagcctggggcagagccgattgcggcatcaccagcgccagctaccaccagggcgtgctgagcgccaccatcctgtacgagatcctgctgggcaaggccaccctgtacgccgtgctggtgtctgccctggtgctgatggctatggtcaagcggaaggacagccggggaagggccaagcgatctggatctggagcaacaaacttctcactactcaaacaagcaggtgacgtggaggagaatcccgggcctactagcatggccttaccagtgaccgccttgctcctgccgctggccttgctgctccacgccgccaggccggacattcagatgacacagagccctagcagcctgagcgcctctgtgggagacagagtgaccatcacatgcaagagcagccagagcctgctgtactccagcaatcagaagaactacctggcctggttccagcagaagcctggcaaggctcctaagctgctgatctactgggccagcaccagagaaagcggcgtgccaagcagattttctggcagcggctctggcaccgacttcaccctgacaatatccagcctccagcctgaggacttcgccacctacttttgccaccagtacctgagcagctacacattcggacagggcaccaaggtggaaatcaagcggggcggaggcggaagtggaggcggaggatctggcggcggaggctctgaggtgcagctggttgaatctggcggaggactggttcagcctggcggatctctgagactgtcttgtgccgccagcggctacaccttcaccagctattggctgcactgggtccgacaggcccctggcaaaggacttgagtgggtcggatatatcaggcccagcaccggctacacagagtacaaccagaagttcaaggaccgcttcaccatcagcgccgacaccagcaagaataccgcctacctccagatgaacagcctgagagccgaggacaccgccgtgtactactgtgccagatccagatggctgctggactattggggccagggcacactggttacagttagctctacgcgtgagcagaaactgatctcggaagaggatgggagcggcatccagaaccctgatcctgccgtgtaccagctgcgggatagcaagagcagcgacaagagcgtgtgtctgttcaccgacttcgacagccagaccaacgtgtcccagagcaaggactccgacgtgtacatcaccgataagtgcgtgctggacatgcggagcatggacttcaagagcaactccgccgtggcctggtccaacaagtccgatttcgcctgcgccaacgccttcaacaacagcattatccccgaggacacattcttcccaagcagcgacgtgccctgcgacgtgaagctggtggaaaagagcttcgagacagacaccaacctgaacttccagaacctgagcgtgatcggcttcagaatcctgctgctgaaagtggccggctttaacctgctgatgaccctgcggctgtggtccagccgcgccaagagaagcggatctggcgtgaagcagaccctgaatttcgacctgctgaagctggctggcgacgtggaatccaacccaggcccttctagaggccatatgaccgagtacaagcccacggtgcgcctcgccacccgcgacgacgtccccagggccgtacgcaccctcgccgccgcgttcgccgactaccccgccacgcgccacaccgtcgatccggaccgccacatcgagcgggtcaccgagctgcaagaactcttcctcacgcgcgtcgggctcgacatcggcaaggtgtgggtcgcggacgacggcgccgcggtggcggtctggaccacgccggagagcgtcgaagcgggggcggtgttcgccgagatcggcccgcgcatggccgagttgagcggttcccggctggccgcgcagcaacagatggaaggcctcctggcgccgcaccggcccaaggagcccgcgtggttcctggccaccgtcggcgtctcgcccgaccaccagggcaagggtctgggcagcgccgtcgtgctccccggagtggaggcggccgagcgcgccggggtgcccgccttcctggagacctccgcgccccgcaacctccccttctacgagcggctcggcttcaccgtcaccgccgacgtcgaggtgcccgaaggaccgcgcacctggtgcatgacccgcaagcccggtgcctga

SEQ ID NO: 10320 - DNA, 2706 bp, Artificial Sequence
  Synthetic Polynucloetide
atggccttaccagtgaccgccttgctcctgccgctggccttgctgctccacgccgccaggccgctcgagcagaaactgatctcggaagaggatctgggctccggcgatcgccctgatcctgccgtgtaccagctgcgggatagcaagagcagcgacaagagcgtgtgtctgttcaccgacttcgacagccagaccaacgtgtcccagagcaaggactccgacgtgtacatcaccgataagtgcgtgctggacatgcggagcatggacttcaagagcaactccgccgtggcctggtccaacaagtccgatttcgcctgcgccaacgccttcaacaacagcattatccccgaggacacattcttcccaagccccgagagcagctgcgacgtgaagctggtggaaaagagcttcgagacagacaccaacctgaacttccagaacctgagcgtgatcggcttcagaatcctgctgctgaaagtggccggctttaacctgctgatgaccctgcggctgtggtccagctctagtcgcgccaagagaagcggatctggcgtgaagcagaccctgaatttcgacctgctgaagctggctggcgacgtggaatccaacccaggccccactagcatggccttaccagtgaccgccttgctcctgccgctggccttgctgctccacgccgccaggccggacattcagatgacacagagccctagcagcctgagcgcctctgtgggagacagagtgaccatcacatgcaagagcagccagagcctgctgtactccagcaatcagaagaactacctggcctggttccagcagaagcctggcaaggctcctaagctgctgatctactgggccagcaccagagaaagcggcgtgccaagcagattttctggcagcggctctggcaccgacttcaccctgacaatatccagcctccagcctgaggacttcgccacctacttttgccaccagtacctgagcagctacacattcggacagggcaccaaggtggaaatcaagcggggcggaggcggaagtggaggcggaggatctggcggcggaggctctgaggtgcagctggttgaatctggcggaggactggttcagcctggcggatctctgagactgtcttgtgccgccagcggctacaccttcaccagctattggctgcactgggtccgacaggcccctggcaaaggacttgagtgggtcggatatatcaggcccagcaccggctacacagagtacaaccagaagttcaaggaccgcttcaccatcagcgccgacaccagcaagaataccgcctacctccagatgaacagcctgagagccgaggacaccgccgtgtactactgtgccagatccagatggctgctggactattggggccagggcacactggttacagttagctctacgcgtgggaaaccaattcccaaccctcttctgggactggattcaaccggcagcggcgaggacctgaagaacgtgttcccacctgaggtggccgtgttcgagcctagcgaggccgagatcagccacacccagaaagccaccctcgtgtgcctggctaccggcttctaccccgaccatgtggaactgtcttggtgggtcaacggcaaagaggtgcacagcggcgtgtgtaccgacccccagccactgaaagaacagcccgccctgaacgacagccggtactgcctgagcagcagactgagagtgtccgccaccttctggcagaacccccggaaccacttcagatgccaggtgcagttctacggcctgagcgagaacgacgagtggacccaggacagagccaagcccgtgacccagatcgtgtctgccgaagcctggggcagagccgattgcggctttaccagcgagagctaccagcagggcgtgctgagcgccaccatcctgtacgagatcctgctgggcaaggccaccctgtacgccgtgctggtgtctgccctggtgctgatggctatggtcaagcggaaggacagccggggaagggccaagcgatctggatctggagcaacaaacttctcactactcaaacaagcaggtgacgtggaggagaatcccgggccttctagaggccatatgaccgagtacaagcccacggtgcgcctcgccacccgcgacgacgtccccagggccgtacgcaccctcgccgccgcgttcgccgactaccccgccacgcgccacaccgtcgatccggaccgccacatcgagcgggtcaccgagctgcaagaactcttcctcacgcgcgtcgggctcgacatcggcaaggtgtgggtcgcggacgacggcgccgcggtggcggtctggaccacgccggagagcgtcgaagcgggggcggtgttcgccgagatcggcccgcgcatggccgagttgagcggttcccggctggccgcgcagcaacagatggaaggcctcctggcgccgcaccggcccaaggagcccgcgtggttcctggccaccgtcggcgtctcgcccgaccaccagggcaagggtctgggcagcgccgtcgtgctccccggagtggaggcggccgagcgcgccggggtgcccgccttcctggagacctccgcgccccgcaacctccccttctacgagcggctcggcttcaccgtcaccgccgacgtcgaggtgcccgaaggaccgcgcacctggtgcatgacccgcaagcccggtgcctga

SEQ ID NO: 10321 - DNA, 2568 bp, Artificial Sequence
  Synthetic Polynucloetide
atggccttaccagtgaccgccttgctcctgccgctggccttgctgctccacgccgccaggccggacattcagatgacacagagccctagcagcctgagcgcctctgtgggagacagagtgaccatcacatgcaagagcagccagagcctgctgtactccagcaatcagaagaactacctggcctggttccagcagaagcctggcaaggctcctaagctgctgatctactgggccagcaccagagaaagcggcgtgccaagcagattttctggcagcggctctggcaccgacttcaccctgacaatatccagcctccagcctgaggacttcgccacctacttttgccaccagtacctgagcagctacacattcggacagggcaccaaggtggaaatcaagcggctcgaggacctgaagaacgtgttcccacctgaggtggccgtgttcgagcctagcgaggccgagatcagccacacccagaaagccaccctcgtgtgcctggctaccggcttctaccccgaccatgtggaactgtcttggtgggtcaacggcaaagaggtgcacagcggcgtgtctaccgacccccagccactgaaagaacagcccgccctgaacgacagccggtactgcctgagcagcagactgagagtgtccgccaccttctggcagaacccccggaaccacttcagatgccaggtgcagttctacggcctgagcgagaacgacgagtggacccaggacagagccaagcccgtgacccagatcgtgtctgccgaagcctggggcagagccgattgcggctttaccagcgagagctaccagcagggcgtgctgagcgccaccatcctgtacgagatcctgctgggcaaggccaccctgtacgccgtgctggtgtctgccctggtgctgatggctatggtcaagcggaaggacagccggggaagggccaagcgatctggatctggagcaacaaacttctcactactcaaacaagcaggtgacgtggaggagaatcccgggcctactagtatggactggatttggcgcatccttttccttgtcggcgctgctaccggcgcgcattccttcgaagaggtgcagctggttgaatctggcggaggactggttcagcctggcggatctctgagactgtcttgtgccgccagcggctacaccttcaccagctattggctgcactgggtccgacaggcccctggcaaaggacttgagtgggtcggatatatcaggcccagcaccggctacacagagtacaaccagaagttcaaggaccgcttcaccatcagcgccgacaccagcaagaataccgcctacctccagatgaacagcctgagagccgaggacaccgccgtgtactactgtgccagatccagatggctgctggactattggggccagggcacactggttacagttagctctacgcgtatccagaaccctgatcctgccgtgtaccagctgcgggatagcaagagcagcgacaagagcgtgtgtctgttcaccgacttcgacagccagaccaacgtgtcccagagcaaggactccgacgtgtacatcaccgataagaccgtgctggacatgcggagcatggacttcaagagcaactccgccgtggcctggtccaacaagtccgatttcgcctgcgccaacgccttcaacaacagcattatccccgaggacacattcttcccaagccccgagagcagctgcgacgtgaagctggtggaaaagagcttcgagacagacaccaacctgaacttccagaacctgagcgtgatcggcttcagaatcctgctgctgaaagtggccggctttaacctgctgatgaccctgcggctgtggtccagccgcgccaagagaagcggatctggcgtgaagcagaccctgaatttcgacctgctgaagctggctggcgacgtggaatccaacccaggcccttctagaggccatatgaccgagtacaagcccacggtgcgcctcgccacccgcgacgacgtccccagggccgtacgcaccctcgccgccgcgttcgccgactaccccgccacgcgccacaccgtcgatccggaccgccacatcgagcgggtcaccgagctgcaagaactcttcctcacgcgcgtcgggctcgacatcggcaaggtgtgggtcgcggacgacggcgccgcggtggcggtctggaccacgccggagagcgtcgaagcgggggcggtgttcgccgagatcggcccgcgcatggccgagttgagcggttcccggctggccgcgcagcaacagatggaaggcctcctggcgccgcaccggcccaaggagcccgcgtggttcctggccaccgtcggcgtctcgcccgaccaccagggcaagggtctgggcagcgccgtcgtgctccccggagtggaggcggccgagcgcgccggggtgcccgccttcctggagacctccgcgccccgcaacctccccttctacgagcggctcggcttcaccgtcaccgccgacgtcgaggtgcccgaaggaccgcgcacctggtgcatgacccgcaagcccggtgcctga

SEQ ID NO: 10322 - DNA, 2814 bp, Artificial Sequence
  Synthetic Polynucloetide
atggccttaccagtgaccgccttgctcctgccgctggccttgctgctccacgccgccaggccggacattcagatgacacagagccctagcagcctgagcgcctctgtgggagacagagtgaccatcacatgcaagagcagccagagcctgctgtactccagcaatcagaagaactacctggcctggttccagcagaagcctggcaaggctcctaagctgctgatctactgggccagcaccagagaaagcggcgtgccaagcagattttctggcagcggctctggcaccgacttcaccctgacaatatccagcctccagcctgaggacttcgccacctacttttgccaccagtacctgagcagctacacattcggacagggcaccaaggtggaaatcaagcggctcgaggacctgaagaacgtgttcccacctgaggtggccgtgttcgagcctagcgaggccgagatcagccacacccagaaagccaccctcgtgtgcctggctaccggcttctaccccgaccatgtggaactgtcttggtgggtcaacggcaaagaggtgcacagcggcgtgtctaccgacccccagccactgaaagaacagcccgccctgaacgacagccggtactgcctgagcagcagactgagagtgtccgccaccttctggcagaacccccggaaccacttcagatgccaggtgcagttctacggcctgagcgagaacgacgagtggacccaggacagagccaagcccgtgacccagatcgtgtctgccgaagcctggggcagagccgattgcggctttaccagcgagagctaccagcagggcgtgctgagcgccaccatcctgtacgagatcctgctgggcaaggccaccctgtacgccgtgctggtgtctgccctggtgctgatggctatggtcaagcggaaggacagccggggaagggccaagcgatctggatctggagcaacaaacttctcactactcaaacaagcaggtgacgtggaggagaatcccgggcctactagtatggactggatttggcgcatccttttccttgtcggcgctgctaccggcgcgcattccttcgaagaggtgcagctggttgaatctggcggaggactggttcagcctggcggatctctgagactgtcttgtgccgccagcggctacaccttcaccagctattggctgcactgggtccgacaggcccctggcaaaggacttgagtgggtcggatatatcaggcccagcaccggctacacagagtacaaccagaagttcaaggaccgcttcaccatcagcgccgacaccagcaagaataccgcctacctccagatgaacagcctgagagccgaggacaccgccgtgtactactgtgccagatccagatggctgctggactattggggccagggcacactggttacagttagctctacgcgtgagcagaaactgatctcggaagaggatgggagcggcaccccattcccttctctggcccctcccatcatgctgctggtggacggcaagcagcagatggtggtcgtgtgcctggtgctggatgtggccccacctggactggacagccccatctggtttagcgccggcaatggctctgccctggacgcctttacctacggcccaagccctgccaccgatggcacctggacaaatctggcccacctgagcctgcccagcgaggaactggcttcttgggagcctctcgtgtgccacacaggacctggcgctgagggacacagcagatccacccagcctatgcacctgtctggcgaggccagcaccgccagaacctgtcctcaggaacctctgagaggcacccctggcggagcactgtggctgggagtgctgagactgctgctgttcaagctgctgctgtttgacctgctgctgacctgctcctgtctgtgcgatcctgccggccctctgccttctcctgccaccaccacaagactgagagccctgggcagccacagactgcaccctgccacagagacaggcggcagagaggccacaagcagccctagaccccagcccagagacagaagatggggcgataccccccctggcagaaagcctggatctccagtccgcgccaagagaagcggatctggcgtgaagcagaccctgaatttcgacctgctgaagctggctggcgacgtggaatccaacccaggcccttctagaggccatatgaccgagtacaagcccacggtgcgcctcgccacccgcgacgacgtccccagggccgtacgcaccctcgccgccgcgttcgccgactaccccgccacgcgccacaccgtcgatccggaccgccacatcgagcgggtcaccgagctgcaagaactcttcctcacgcgcgtcgggctcgacatcggcaaggtgtgggtcgcggacgacggcgccgcggtggcggtctggaccacgccggagagcgtcgaagcgggggcggtgttcgccgagatcggcccgcgcatggccgagttgagcggttcccggctggccgcgcagcaacagatggaaggcctcctggcgccgcaccggcccaaggagcccgcgtggttcctggccaccgtcggcgtctcgcccgaccaccagggcaagggtctgggcagcgccgtcgtgctccccggagtggaggcggccgagcgcgccggggtgcccgccttcctggagacctccgcgccccgcaacctccccttctacgagcggctcggcttcaccgtcaccgccgacgtcgaggtgcccgaaggaccgcgcacctggtgcatgacccgcaagcccggtgcctga

SEQ ID NO: 10323 - DNA, 2868 bp, Artificial Sequence
  Synthetic Polynucloetide
atggccttaccagtgaccgccttgctcctgccgctggccttgctgctccacgccgccaggccgctcgaggacctgaagaacgtgttcccacctgaggtggccgtgttcgagcctagcgaggccgagatcagccacacccagaaagccaccctcgtgtgcctggctaccggcttctaccccgaccatgtggaactgtcttggtgggtcaacggcaaagaggtgcacagcggcgtgtctaccgacccccagccactgaaagaacagcccgccctgaacgacagccggtactgcctgagcagcagactgagagtgtccgccaccttctggcagaacccccggaaccacttcagatgccaggtgcagttctacggcctgagcgagaacgacgagtggacccaggacagagccaagcccgtgacccagatcgtgtctgccgaagcctggggcagagccgattgcggctttaccagcgagagctaccagcagggcgtgctgagcgccaccatcctgtacgagatcctgctgggcaaggccaccctgtacgccgtgctggtgtctgccctggtgctgatggctatggtcaagcggaaggacagccggggaagggccaagcgatctggatctggagcaacaaacttctcactactcaaacaagcaggtgacgtggaggagaatcccgggcctactagcatggccttaccagtgaccgccttgctcctgccgctggccttgctgctccacgccgccaggccggacattcagatgacacagagccctagcagcctgagcgcctctgtgggagacagagtgaccatcacatgcaagagcagccagagcctgctgtactccagcaatcagaagaactacctggcctggttccagcagaagcctggcaaggctcctaagctgctgatctactgggccagcaccagagaaagcggcgtgccaagcagattttctggcagcggctctggcaccgacttcaccctgacaatatccagcctccagcctgaggacttcgccacctacttttgccaccagtacctgagcagctacacattcggacagggcaccaaggtggaaatcaagcggggcggaggcggaagtggaggcggaggatctggcggcggaggctctgaggtgcagctggttgaatctggcggaggactggttcagcctggcggatctctgagactgtcttgtgccgccagcggctacaccttcaccagctattggctgcactgggtccgacaggcccctggcaaaggacttgagtgggtcggatatatcaggcccagcaccggctacacagagtacaaccagaagttcaaggaccgcttcaccatcagcgccgacaccagcaagaataccgcctacctccagatgaacagcctgagagccgaggacaccgccgtgtactactgtgccagatccagatggctgctggactattggggccagggcacactggttacagttagctctacgcgtgagcagaaactgatctcggaagaggatctggggagcggcaccccattcccttctctggcccctcccatcatgctgctggtggacggcaagcagcagatggtggtcgtgtgcctggtgctggatgtggccccacctggactggacagccccatctggtttagcgccggcaatggctctgccctggacgcctttacctacggcccaagccctgccaccgatggcacctggacaaatctggcccacctgagcctgcccagcgaggaactggcttcttgggagcctctcgtgtgccacacaggacctggcgctgagggacacagcagatccacccagcctatgcacctgtctggcgaggccagcaccgccagaacctgtcctcaggaacctctgagaggcacccctggcggagcactgtggctgggagtgctgagactgctgctgttcaagctgctgctgtttgacctgctgctgacctgctcctgtctgtgcgatcctgccggccctctgccttctcctgccaccaccacaagactgagagccctgggcagccacagactgcaccctgccacagagacaggcggcagagaggccacaagcagccctagaccccagcccagagacagaagatggggcgataccccccctggcagaaagcctggatctccagtccgcgccaagagaagcggatctggcgtgaagcagaccctgaatttcgacctgctgaagctggctggcgacgtggaatccaacccaggcccttctagatctagaggccatatgaccgagtacaagcccacggtgcgcctcgccacccgcgacgacgtccccagggccgtacgcaccctcgccgccgcgttcgccgactaccccgccacgcgccacaccgtcgatccggaccgccacatcgagcgggtcaccgagctgcaagaactcttcctcacgcgcgtcgggctcgacatcggcaaggtgtgggtcgcggacgacggcgccgcggtggcggtctggaccacgccggagagcgtcgaagcgggggcggtgttcgccgagatcggcccgcgcatggccgagttgagcggttcccggctggccgcgcagcaacagatggaaggcctcctggcgccgcaccggcccaaggagcccgcgtggttcctggccaccgtcggcgtctcgcccgaccaccagggcaagggtctgggcagcgccgtcgtgctccccggagtggaggcggccgagcgcgccggggtgcccgccttcctggagacctccgcgccccgcaacctccccttctacgagcggctcggcttcaccgtcaccgccgacgtcgaggtgcccgaaggaccgcgcacctggtgcatgacccgcaagcccggtgcctga

SEQ ID NO: 10324 - DNA, 2679 bp, Artificial Sequence
  Synthetic Polynucloetide
atggccttaccagtgaccgccttgctcctgccgctggccttgctgctccacgccgccaggccggacattcagatgacacagagccctagcagcctgagcgcctctgtgggagacagagtgaccatcacatgcaagagcagccagagcctgctgtactccagcaatcagaagaactacctggcctggttccagcagaagcctggcaaggctcctaagctgctgatctactgggccagcaccagagaaagcggcgtgccaagcagattttctggcagcggctctggcaccgacttcaccctgacaatatccagcctccagcctgaggacttcgccacctacttttgccaccagtacctgagcagctacacattcggacagggcaccaaggtggaaatcaagcggctcgaggggaaaccaattcccaaccctcttctgggactggattcaaccggcagcggcgacaagcagctggacgccgacgtgtcccccaagcctaccatcttcctgccctctatcgccgagacaaagctccagaaggccggcacctacctgtgcctgctggaaaagttcttcccagatgtgattaagatccactggcaggaaaagaagtccaacaccatcctgggcagccaggaaggcaacaccatgaagaccaacgacacctacatgaagttcagctggctgaccgtgcccgagaagtccctggacaaagaacacagatgcatcgtgcggcacgaaaacaacaagaacggcgtggaccaggaaatcatcttcccacccatcaagaccgatgtgattacaatggaccccaaggacaactgctccaaggacgccaacgataccctgctgctccagctgaccaacaccagcgcctactacatgtacttgttgctgctgctgaagtccgtggtgtacttcgccatcatcacatgctgcctgctgcggagaaccgccttctgctgcaacggcgagaagtctagggccaagcgatctggatctggagcaacaaacttctcactactcaaacaagcaggtgacgtggaggagaatcccgggcctactagtatggactggatttggcgcatccttttccttgtcggcgctgctaccggcgcgcattccttcgaagaggtgcagctggttgaatctggcggaggactggttcagcctggcggatctctgagactgtcttgtgccgccagcggctacaccttcaccagctattggctgcactgggtccgacaggcccctggcaaaggacttgagtgggtcggatatatcaggcccagcaccggctacacagagtacaaccagaagttcaaggaccgcttcaccatcagcgccgacaccagcaagaataccgcctacctccagatgaacagcctgagagccgaggacaccgccgtgtactactgtgccagatccagatggctgctggactattggggccagggcacactggttacagttagctctacgcgtgagcagaaactgatctcggaagaggatgggagcggcagccagcctcacaccaagcccagcgtgttcgtgatgaagaacggcaccaacgtggcctgcctcgtgaaagagttctaccccaaggacatcaggatcaacctggtgtccagcaagaagatcaccgagttcgaccccgccatcgtgatctcccccagcggcaagtacaacgccgtgaagctggggaagtacgaggacagcaacagcgtgacctgctccgtgcagcacgacaacaagaccgtgcacagcaccgactttgaagtgaaaaccgactccaccgaccacgtgaagcccaaagagacagagaacaccaagcagcccagcaagagctgccacaagcccaaggccatcgtgcacaccgagaaagtgaacatgatgagcctgaccgtgctgggcctgcggatgctgttcgccaaaaccgtggccgtgaacttcctgctgaccgccaagctgttcttcctccgcgccaagagaagcggatctggcgtgaagcagaccctgaatttcgacctgctgaagctggctggcgacgtggaatccaacccaggcccttctagaggccatatgaccgagtacaagcccacggtgcgcctcgccacccgcgacgacgtccccagggccgtacgcaccctcgccgccgcgttcgccgactaccccgccacgcgccacaccgtcgatccggaccgccacatcgagcgggtcaccgagctgcaagaactcttcctcacgcgcgtcgggctcgacatcggcaaggtgtgggtcgcggacgacggcgccgcggtggcggtctggaccacgccggagagcgtcgaagcgggggcggtgttcgccgagatcggcccgcgcatggccgagttgagcggttcccggctggccgcgcagcaacagatggaaggcctcctggcgccgcaccggcccaaggagcccgcgtggttcctggccaccgtcggcgtctcgcccgaccaccagggcaagggtctgggcagcgccgtcgtgctccccggagtggaggcggccgagcgcgccggggtgcccgccttcctggagacctccgcgccccgcaacctccccttctacgagcggctcggcttcaccgtcaccgccgacgtcgaggtgcccgaaggaccgcgcacctggtgcatgacccgcaagcccggtgcctga

SEQ ID NO: 10325 - DNA, 1890 bp, Artificial Sequence
  Synthetic Polynucloetide
atggccttaccagtgaccgccttgctcctgccgctggccttgctgctccacgccgccaggccggacattcagatgacacagagccctagcagcctgagcgcctctgtgggagacagagtgaccatcacatgcaagagcagccagagcctgctgtactccagcaatcagaagaactacctggcctggttccagcagaagcctggcaaggctcctaagctgctgatctactgggccagcaccagagaaagcggcgtgccaagcagattttctggcagcggctctggcaccgacttcaccctgacaatatccagcctccagcctgaggacttcgccacctacttttgccaccagtacctgagcagctacacattcggacagggcaccaaggtggaaatcaagcggctcgagagccagcctcacaccaagcccagcgtgttcgtgatgaagaacggcaccaacgtggcctgcctcgtgaaagagttctaccccaaggacatcaggatcaacctggtgtccagcaagaagatcaccgagttcgaccccgccatcgtgatctcccccagcggcaagtacaacgccgtgaagctggggaagtacgaggacagcaacagcgtgacctgctccgtgcagcacgacaacaagaccgtgcacagcaccgactttgaagtgaaaaccgactccaccgaccacgtgaagcccaaagagacagagaacaccaagcagcccagcaagagctgccacaagcccaaggccatcgtgcacaccgagaaagtgaacatgatgagcctgaccgtgctgggcctgcggatgctgttcgccaaaaccgtggccgtgaacttcctgctgaccgccaagctgttcttcctcagggccaagcgatctggatctggagcaacaaacttctcactactcaaacaagcaggtgacgtggaggagaatcccgggcctactagtatggactggatttggcgcatccttttccttgtcggcgctgctaccggcgcgcattccttcgaagaggtgcagctggttgaatctggcggaggactggttcagcctggcggatctctgagactgtcttgtgccgccagcggctacaccttcaccagctattggctgcactgggtccgacaggcccctggcaaaggacttgagtgggtcggatatatcaggcccagcaccggctacacagagtacaaccagaagttcaaggaccgcttcaccatcagcgccgacaccagcaagaataccgcctacctccagatgaacagcctgagagccgaggacaccgccgtgtactactgtgccagatccagatggctgctggactattggggccagggcacactggttacagttagctctacgcgtgacaagcagctggacgccgacgtgtcccccaagcctaccatcttcctgccctctatcgccgagacaaagctccagaaggccggcacctacctgtgcctgctggaaaagttcttcccagatgtgattaagatccactggcaggaaaagaagtccaacaccatcctgggcagccaggaaggcaacaccatgaagaccaacgacacctacatgaagttcagctggctgaccgtgcccgagaagtccctggacaaagaacacagatgcatcgtgcggcacgaaaacaacaagaacggcgtggaccaggaaatcatcttcccacccatcaagaccgatgtgattacaatggaccccaaggacaactgctccaaggacgccaacgataccctgctgctccagctgaccaacaccagcgcctactacatgtacttgttgctgctgctgaagtccgtggtgtacttcgccatcatcacatgctgcctgctgcggagaaccgccttctgctgcaacggcgagaagtct

SEQ ID NO: 10326 - DNA, 2724 bp, Artificial Sequence
  Synthetic Polynucloetide
atggccttaccagtgaccgccttgctcctgccgctggccttgctgctccacgccgccaggccgctcgaggggaaaccaattcccaaccctcttctgggactggattcaaccggcagcggcgacaagcagctggacgccgacgtgtcccccaagcctaccatcttcctgccctctatcgccgagacaaagctccagaaggccggcacctacctgtgcctgctggaaaagttcttcccagatgtgattaagatccactggcaggaaaagaagtccaacaccatcctgggcagccaggaaggcaacaccatgaagaccaacgacacctacatgaagttcagctggctgaccgtgcccgagaagtccctggacaaagaacacagatgcatcgtgcggcacgaaaacaacaagaacggcgtggaccaggaaatcatcttcccacccatcaagaccgatgtgattacaatggaccccaaggacaactgctccaaggacgccaacgataccctgctgctccagctgaccaacaccagcgcctactacatgtacttgttgctgctgctgaagtccgtggtgtacttcgccatcatcacatgctgcctgctgcggagaaccgccttctgctgcaacggcgagaagtctagggccaagcgatctggatctggagcaacaaacttctcactactcaaacaagcaggtgacgtggaggagaatcccgggcctactagcatggccttaccagtgaccgccttgctcctgccgctggccttgctgctccacgccgccaggccggacattcagatgacacagagccctagcagcctgagcgcctctgtgggagacagagtgaccatcacatgcaagagcagccagagcctgctgtactccagcaatcagaagaactacctggcctggttccagcagaagcctggcaaggctcctaagctgctgatctactgggccagcaccagagaaagcggcgtgccaagcagattttctggcagcggctctggcaccgacttcaccctgacaatatccagcctccagcctgaggacttcgccacctacttttgccaccagtacctgagcagctacacattcggacagggcaccaaggtggaaatcaagcggggcggaggcggaagtggaggcggaggatctggcggcggaggctctgaggtgcagctggttgaatctggcggaggactggttcagcctggcggatctctgagactgtcttgtgccgccagcggctacaccttcaccagctattggctgcactgggtccgacaggcccctggcaaaggacttgagtgggtcggatatatcaggcccagcaccggctacacagagtacaaccagaagttcaaggaccgcttcaccatcagcgccgacaccagcaagaataccgcctacctccagatgaacagcctgagagccgaggacaccgccgtgtactactgtgccagatccagatggctgctggactattggggccagggcacactggttacagttagctctacgcgtgagcagaaactgatctcggaagaggatgggagcggcagccagcctcacaccaagcccagcgtgttcgtgatgaagaacggcaccaacgtggcctgcctcgtgaaagagttctaccccaaggacatcaggatcaacctggtgtccagcaagaagatcaccgagttcgaccccgccatcgtgatctcccccagcggcaagtacaacgccgtgaagctggggaagtacgaggacagcaacagcgtgacctgctccgtgcagcacgacaacaagaccgtgcacagcaccgactttgaagtgaaaaccgactccaccgaccacgtgaagcccaaagagacagagaacaccaagcagcccagcaagagctgccacaagcccaaggccatcgtgcacaccgagaaagtgaacatgatgagcctgaccgtgctgggcctgcggatgctgttcgccaaaaccgtggccgtgaacttcctgctgaccgccaagctgttcttcctccgcgccaagagaagcggatctggcgtgaagcagaccctgaatttcgacctgctgaagctggctggcgacgtggaatccaacccaggcccttctagaggccatatgaccgagtacaagcccacggtgcgcctcgccacccgcgacgacgtccccagggccgtacgcaccctcgccgccgcgttcgccgactaccccgccacgcgccacaccgtcgatccggaccgccacatcgagcgggtcaccgagctgcaagaactcttcctcacgcgcgtcgggctcgacatcggcaaggtgtgggtcgcggacgacggcgccgcggtggcggtctggaccacgccggagagcgtcgaagcgggggcggtgttcgccgagatcggcccgcgcatggccgagttgagcggttcccggctggccgcgcagcaacagatggaaggcctcctggcgccgcaccggcccaaggagcccgcgtggttcctggccaccgtcggcgtctcgcccgaccaccagggcaagggtctgggcagcgccgtcgtgctccccggagtggaggcggccgagcgcgccggggtgcccgccttcctggagacctccgcgccccgcaacctccccttctacgagcggctcggcttcaccgtcaccgccgacgtcgaggtgcccgaaggaccgcgcacctggtgcatgacccgcaagcccggtgcctga

SEQ ID NO: 10327 - DNA, 3099 bp, Artificial Sequence
  Synthetic Polynucloetide
atggccttaccagtgaccgccttgctcctgccgctggccttgctgctccacgccgccaggccggacattcagatgacacagagccctagcagcctgagcgcctctgtgggagacagagtgaccatcacatgcaagagcagccagagcctgctgtactccagcaatcagaagaactacctggcctggttccagcagaagcctggcaaggctcctaagctgctgatctactgggccagcaccagagaaagcggcgtgccaagcagattttctggcagcggctctggcaccgacttcaccctgacaatatccagcctccagcctgaggacttcgccacctacttttgccaccagtacctgagcagctacacattcggacagggcaccaaggtggaaatcaagcggggacagcctaaggccaatcctaccgtgacactgttccctccaagcagcgaagaactccaggccaacaaggccacacttgtgtgcctgatctccgacttctaccctggggctgtgacagtggcttggaaggccgatggatctcctgtgaaagccggcgtggaaaccaccaagccatccaagcagagcaacaacaaatacgccgccagctcctacctgagcctgacacctgagcagtggaagtcccacagatcctacagctgccaagtgacccacgaaggcagcaccgtggaaaagacagtggcccctacagagtgcagcggatcccagagcttcggcctgctggaccccaagctgtgctacctgctggatggcatcctgttcatctacggcgtgatcctgaccgccctgttcctgagagtgaagttcagcagaagcgccgacgcccctgcctaccagcagggacagaaccaactgtacaacgagctgaacctgggcagacgggaagagtacgacgtgctggacaagcggagaggcagggaccctgagatgggcggaaagccccagcggagaaagaacccccaggaaggactgtataacgaactccagaaagacaagatggccgaagcctacagcgagatcggcatgaagggcgagcggagaagaggcaagggccacgatggcctgtaccagggcctgagcaccgccaccaaggacacctatgacgccctgcacatgcaggccctgcctccaagaagggccaagcgatctggatctggagcaacaaacttctcactactcaaacaagcaggtgacgtggaggagaatcccgggcctactagtatggactggatttggcgcatccttttccttgtcggcgctgctaccggcgcgcattccttcgaagaggtgcagctggttgaatctggcggaggactggttcagcctggcggatctctgagactgtcttgtgccgccagcggctacaccttcaccagctattggctgcactgggtccgacaggcccctggcaaaggacttgagtgggtcggatatatcaggcccagcaccggctacacagagtacaaccagaagttcaaggaccgcttcaccatcagcgccgacaccagcaagaataccgcctacctccagatgaacagcctgagagccgaggacaccgccgtgtactactgtgccagatccagatggctgctggactattggggccagggcacactggttacagttagctctgcctctacaaagggaccctccgtgtttcctctggctcccagcagcaagtctacaagcggaggaacagccgctctgggctgcctggtcaaggattactttcccgagcctgtgaccgtgtcctggaatagcggagcactgacaagcggcgtgcacacctttccagccgtgctgcaaagcagcggcctgtactctctgagcagcgtggtcacagtgcctagctctagcctgggcacccagacctacatctgcaatgtgaaccacaagcctagcaacaccaaggtggacaagagagtggaacccaagagctgtggtacccagagttttgggttgttggaccctaaattgtgctatctgttggacggaatcctgttcatttacggagtgatcctgaccgcattgttcctgcgggttaagttttccagatccgcagacgcacccgcttaccaacaagggcagaaccaactctacaatgaacttaatttggggcggagggaagagtacgacgttctggacaaaaggaggggacgagatcccgagatgggcggaaagcctcagcgaaggaagaatccgcaagaggggctttataacgaactccagaaagataaaatggcagaagcctatagtgagattgggatgaagggagaaaggaggaggggtaaaggtcacgatgggttgtaccaaggattgagcacagccactaaagatacctatgatgcgctccacatgcaggccctgccgccaagacgcgccaagagaagcggatctggcgtgaagcagaccctgaatttcgacctgctgaagctggctggcgacgtggaatccaacccaggcccttctagaggccatatgaccgagtacaagcccacggtgcgcctcgccacccgcgacgacgtccccagggccgtacgcaccctcgccgccgcgttcgccgactaccccgccacgcgccacaccgtcgatccggaccgccacatcgagcgggtcaccgagctgcaagaactcttcctcacgcgcgtcgggctcgacatcggcaaggtgtgggtcgcggacgacggcgccgcggtggcggtctggaccacgccggagagcgtcgaagcgggggcggtgttcgccgagatcggcccgcgcatggccgagttgagcggttcccggctggccgcgcagcaacagatggaaggcctcctggcgccgcaccggcccaaggagcccgcgtggttcctggccaccgtcggcgtctcgcccgaccaccagggcaagggtctgggcagcgccgtcgtgctccccggagtggaggcggccgagcgcgccggggtgcccgccttcctggagacctccgcgccccgcaacctccccttctacgagcggctcggcttcaccgtcaccgccgacgtcgaggtgcccgaaggaccgcgcacctggtgcatgacccgcaagcccggtgcctga

SEQ ID NO: 10328 - DNA, 2454 bp, Artificial Sequence
  Synthetic Polynucloetide
atggccttaccagtgaccgccttgctcctgccgctggccttgctgctccacgccgccaggccggacattcagatgacacagagccctagcagcctgagcgcctctgtgggagacagagtgaccatcacatgcaagagcagccagagcctgctgtactccagcaatcagaagaactacctggcctggttccagcagaagcctggcaaggctcctaagctgctgatctactgggccagcaccagagaaagcggcgtgccaagcagattttctggcagcggctctggcaccgacttcaccctgacaatatccagcctccagcctgaggacttcgccacctacttttgccaccagtacctgagcagctacacattcggacagggcaccaaggtggaaatcaagcggctcgaggacctgaagaacgtgttcccacctgaggtggccgtgttcgagcctagcgaggccgagatcagccacacccagaaagccaccctcgtgtgcctggctaccggcttctaccccgaccatgtggaactgtcttggtgggtcaacggcaaagaggtgcacagcggcgtgtctaccgacccccagccactgaaagaacagcccgccctgaacgacagccggtactgcctgagcagcagactgagagtgtccgccaccttctggcagaacccccggaaccacttcagatgccaggtgcagttctacggcctgagcgagaacgacgagtggacccaggacagagccaagcccgtgacccagatcgtgtctgccgaagcctggggcagagccgattgcggatcccagagcttcggcctgctggaccccaagctgtgctacctgctggatggcatcctgttcatctacggcgtgatcctgaccgccctgttcctgagagtgaagttcagcagaagcgccgacgcccctgcctaccagcagggacagaaccaactgtacaacgagctgaacctgggcagacgggaagagtacgacgtgctggacaagcggagaggcagggaccctgagatgggcggaaagccccagcggagaaagaacccccaggaaggactgtataacgaactccagaaagacaagatggccgaagcctacagcgagatcggcatgaagggcgagcggagaagaggcaagggccacgatggcctgtaccagggcctgagcaccgccaccaaggacacctatgacgccctgcacatgcaggccctgcctccaagaagggccaagcgatctggatctggagcaacaaacttctcactactcaaacaagcaggtgacgtggaggagaatcccgggcctactagtatggactggatttggcgcatccttttccttgtcggcgctgctaccggcgcgcattccttcgaagaggtgcagctggttgaatctggcggaggactggttcagcctggcggatctctgagactgtcttgtgccgccagcggctacaccttcaccagctattggctgcactgggtccgacaggcccctggcaaaggacttgagtgggtcggatatatcaggcccagcaccggctacacagagtacaaccagaagttcaaggaccgcttcaccatcagcgccgacaccagcaagaataccgcctacctccagatgaacagcctgagagccgaggacaccgccgtgtactactgtgccagatccagatggctgctggactattggggccagggcacactggttacagttagctctacgcgtatccagaaccctgatcctgccgtgtaccagctgcgggatagcaagagcagcgacaagagcgtgtgtctgttcaccgacttcgacagccagaccaacgtgtcccagagcaaggactccgacgtgtacatcaccgataagaccgtgctggacatgcggagcatggacttcaagagcaactccgccgtggcctggtccaacaagtccgatttcgcctgcgccaacgccttcaacaacagcattatccccgaggacacattcttcccaagccccgagagcagctgcggtacccagagttttgggttgttggaccctaaattgtgctatctgttggacggaatcctgttcatttacggagtgatcctgaccgcattgttcctgcgggttaagttttccagatccgcagacgcacccgcttaccaacaagggcagaaccaactctacaatgaacttaatttggggcggagggaagagtacgacgttctggacaaaaggaggggacgagatcccgagatgggcggaaagcctcagcgaaggaagaatccgcaagaggggctttataacgaactccagaaagataaaatggcagaagcctatagtgagattgggatgaagggagaaaggaggaggggtaaaggtcacgatgggttgtaccaaggattgagcacagccactaaagatacctatgatgcgctccacatgcaggccctgccgccaaga

SEQ ID NO: 10329 - DNA, 2454 bp, Artificial Sequence
  Synthetic Polynucloetide
atggccttaccagtgaccgccttgctcctgccgctggccttgctgctccacgccgccaggccggacattcagatgacacagagccctagcagcctgagcgcctctgtgggagacagagtgaccatcacatgcaagagcagccagagcctgctgtactccagcaatcagaagaactacctggcctggttccagcagaagcctggcaaggctcctaagctgctgatctactgggccagcaccagagaaagcggcgtgccaagcagattttctggcagcggctctggcaccgacttcaccctgacaatatccagcctccagcctgaggacttcgccacctacttttgccaccagtacctgagcagctacacattcggacagggcaccaaggtggaaatcaagcggctcgaggacctgaagaacgtgttcccacctgaggtggccgtgttcgagcctagcaaggccgagatcgcccacacccagaaagccaccctcgtgtgcctggctaccggcttctaccccgaccatgtggaactgtcttggtgggtcaacggcaaagaggtgcacagcggcgtgtgtaccgacccccagccactgaaagaacagcccgccctgaacgacagccggtactgcctgagcagcagactgagagtgtccgccaccttctggcagaacccccggaaccacttcagatgccaggtgcagttctacggcctgagcgagaacgacgagtggacccaggacagagccaagcccgtgacccagatcgtgtctgccgaagcctggggcagagccgattgcggatcccagagcttcggcctgctggaccccaagctgtgctacctgctggatggcatcctgttcatctacggcgtgatcctgaccgccctgttcctgagagtgaagttcagcagaagcgccgacgcccctgcctaccagcagggacagaaccaactgtacaacgagctgaacctgggcagacgggaagagtacgacgtgctggacaagcggagaggcagggaccctgagatgggcggaaagccccagcggagaaagaacccccaggaaggactgtataacgaactccagaaagacaagatggccgaagcctacagcgagatcggcatgaagggcgagcggagaagaggcaagggccacgatggcctgtaccagggcctgagcaccgccaccaaggacacctatgacgccctgcacatgcaggccctgcctccaagaagggccaagcgatctggatctggagcaacaaacttctcactactcaaacaagcaggtgacgtggaggagaatcccgggcctactagtatggactggatttggcgcatccttttccttgtcggcgctgctaccggcgcgcattccttcgaagaggtgcagctggttgaatctggcggaggactggttcagcctggcggatctctgagactgtcttgtgccgccagcggctacaccttcaccagctattggctgcactgggtccgacaggcccctggcaaaggacttgagtgggtcggatatatcaggcccagcaccggctacacagagtacaaccagaagttcaaggaccgcttcaccatcagcgccgacaccagcaagaataccgcctacctccagatgaacagcctgagagccgaggacaccgccgtgtactactgtgccagatccagatggctgctggactattggggccagggcacactggttacagttagctctacgcgtatccagaaccctgatcctgccgtgtaccagctgcgggatagcaagagcagcgacaagagcgtgtgtctgttcaccgacttcgacagccagaccaacgtgtcccagagcaaggactccgacgtgtacatcaccgataagtgcgtgctggacatgcggagcatggacttcaagagcaactccgccgtggcctggtccaacaagtccgatttcgcctgcgccaacgccttcaacaacagcattatccccgaggacacattcttcccaagcagcgacgtgccctgcggtacccagagttttgggttgttggaccctaaattgtgctatctgttggacggaatcctgttcatttacggagtgatcctgaccgcattgttcctgcgggttaagttttccagatccgcagacgcacccgcttaccaacaagggcagaaccaactctacaatgaacttaatttggggcggagggaagagtacgacgttctggacaaaaggaggggacgagatcccgagatgggcggaaagcctcagcgaaggaagaatccgcaagaggggctttataacgaactccagaaagataaaatggcagaagcctatagtgagattgggatgaagggagaaaggaggaggggtaaaggtcacgatgggttgtaccaaggattgagcacagccactaaagatacctatgatgcgctccacatgcaggccctgccgccaaga

SEQ ID NO: 10330 - DNA, 2667 bp, Artificial Sequence
  Synthetic Polynucloetide
atggccttaccagtgaccgccttgctcctgccgctggccttgctgctccacgccgccaggccggacattcagatgacacagagccctagcagcctgagcgcctctgtgggagacagagtgaccatcacatgcaagagcagccagagcctgctgtactccagcaatcagaagaactacctggcctggttccagcagaagcctggcaaggctcctaagctgctgatctactgggccagcaccagagaaagcggcgtgccaagcagattttctggcagcggctctggcaccgacttcaccctgacaatatccagcctccagcctgaggacttcgccacctacttttgccaccagtacctgagcagctacacattcggacagggcaccaaggtggaaatcaagcggctcgaggggaaaccaattcccaaccctcttctgggactggattcaaccggcagcggcgaggacctgaagaacgtgttcccacctgaggtggccgtgttcgagcctagcgaggccgagatcagccacacccagaaagccaccctcgtgtgcctggctaccggcttctaccccgaccatgtggaactgtcttggtgggtcaacggcaaagaggtgcacagcggcgtgtctaccgacccccagccactgaaagaacagcccgccctgaacgacagccggtactgcctgagcagcagactgagagtgtccgccaccttctggcagaacccccggaaccacttcagatgccaggtgcagttctacggcctgagcgagaacgacgagtggacccaggacagagccaagcccgtgacccagatcgtgtctgccgaagcctggggcagagccgattgcggatcccagagcttcggcctgctggaccccaagctgtgctacctgctggatggcatcctgttcatctacggcgtgatcctgaccgccctgttcctgagagtgaagttcagcagaagcgccgacgcccctgcctaccagcagggacagaaccaactgtacaacgagctgaacctgggcagacgggaagagtacgacgtgctggacaagcggagaggcagggaccctgagatgggcggaaagccccagcggagaaagaacccccaggaaggactgtataacgaactccagaaagacaagatggccgaagcctacagcgagatcggcatgaagggcgagcggagaagaggcaagggccacgatggcctgtaccagggcctgagcaccgccaccaaggacacctatgacgccctgcacatgcaggccctgcctccaagaagggccaagcgatctggatctggagcaacaaacttctcactactcaaacaagcaggtgacgtggaggagaatcccgggcctactagtatggactggatttggcgcatccttttccttgtcggcgctgctaccggcgcgcattccttcgaagaggtgcagctggttgaatctggcggaggactggttcagcctggcggatctctgagactgtcttgtgccgccagcggctacaccttcaccagctattggctgcactgggtccgacaggcccctggcaaaggacttgagtgggtcggatatatcaggcccagcaccggctacacagagtacaaccagaagttcaaggaccgcttcaccatcagcgccgacaccagcaagaataccgcctacctccagatgaacagcctgagagccgaggacaccgccgtgtactactgtgccagatccagatggctgctggactattggggccagggcacactggttacagttagctctacgcgtgagcagaaactgatctcggaagaggatgggagcggcatccagaaccctgatcctgccgtgtaccagctgcgggatagcaagagcagcgacaagagcgtgtgtctgttcaccgacttcgacagccagaccaacgtgtcccagagcaaggactccgacgtgtacatcaccgataagaccgtgctggacatgcggagcatggacttcaagagcaactccgccgtggcctggtccaacaagtccgatttcgcctgcgccaacgccttcaacaacagcattatccccgaggacacattcttcccaagccccgagagcagctgcggtacccagagttttgggttgttggaccctaaattgtgctatctgttggacggaatcctgttcatttacggagtgatcctgaccgcattgttcctgaggagcaagcggtcacggctgctccacagcgattacatgaatatgacaccacgaagaccgggtcctactcgcaaacactaccaaccctacgcacctccccgcgactttgcagcgtaccgatctcgggttaagttttccagatccgcagacgcacccgcttaccaacaagggcagaaccaactctacaatgaacttaatttggggcggagggaagagtacgacgttctggacaaaaggaggggacgagatcccgagatgggcggaaagcctcagcgaaggaagaatccgcaagaggggctttataacgaactccagaaagataaaatggcagaagcctatagtgagattgggatgaagggagaaaggaggaggggtaaaggtcacgatgggttgtaccaaggattgagcacagccactaaagatacctatgatgcgctccacatgcaggccctgccgccaaga

SEQ ID NO: 10331 - DNA, 2790 bp, Artificial Sequence
  Synthetic Polynucloetide
atggccttaccagtgaccgccttgctcctgccgctggccttgctgctccacgccgccaggccggacattcagatgacacagagccctagcagcctgagcgcctctgtgggagacagagtgaccatcacatgcaagagcagccagagcctgctgtactccagcaatcagaagaactacctggcctggttccagcagaagcctggcaaggctcctaagctgctgatctactgggccagcaccagagaaagcggcgtgccaagcagattttctggcagcggctctggcaccgacttcaccctgacaatatccagcctccagcctgaggacttcgccacctacttttgccaccagtacctgagcagctacacattcggacagggcaccaaggtggaaatcaagcggctcgaggggaaaccaattcccaaccctcttctgggactggattcaaccggcagcggcgaggacctgaagaacgtgttcccacctgaggtggccgtgttcgagcctagcgaggccgagatcagccacacccagaaagccaccctcgtgtgcctggctaccggcttctaccccgaccatgtggaactgtcttggtgggtcaacggcaaagaggtgcacagcggcgtgtctaccgacccccagccactgaaagaacagcccgccctgaacgacagccggtactgcctgagcagcagactgagagtgtccgccaccttctggcagaacccccggaaccacttcagatgccaggtgcagttctacggcctgagcgagaacgacgagtggacccaggacagagccaagcccgtgacccagatcgtgtctgccgaagcctggggcagagccgattgcggatcccagagcttcggcctgctggaccccaagctgtgctacctgctggatggcatcctgttcatctacggcgtgatcctgaccgccctgttcctgaggagtaagaggagcaggctcctgcacagtgactacatgaacatgactccacgccgccccggacccacccgcaagcattaccagccctatgccccaccacgcgacttcgcagcctatcgctccagagtgaagttcagcagaagcgccgacgcccctgcctaccagcagggacagaaccaactgtacaacgagctgaacctgggcagacgggaagagtacgacgtgctggacaagcggagaggcagggaccctgagatgggcggaaagccccagcggagaaagaacccccaggaaggactgtataacgaactccagaaagacaagatggccgaagcctacagcgagatcggcatgaagggcgagcggagaagaggcaagggccacgatggcctgtaccagggcctgagcaccgccaccaaggacacctatgacgccctgcacatgcaggccctgcctccaagaagggccaagcgatctggatctggagcaacaaacttctcactactcaaacaagcaggtgacgtggaggagaatcccgggcctactagtatggactggatttggcgcatccttttccttgtcggcgctgctaccggcgcgcattccttcgaagaggtgcagctggttgaatctggcggaggactggttcagcctggcggatctctgagactgtcttgtgccgccagcggctacaccttcaccagctattggctgcactgggtccgacaggcccctggcaaaggacttgagtgggtcggatatatcaggcccagcaccggctacacagagtacaaccagaagttcaaggaccgcttcaccatcagcgccgacaccagcaagaataccgcctacctccagatgaacagcctgagagccgaggacaccgccgtgtactactgtgccagatccagatggctgctggactattggggccagggcacactggttacagttagctctacgcgtgagcagaaactgatctcggaagaggatgggagcggcatccagaaccctgatcctgccgtgtaccagctgcgggatagcaagagcagcgacaagagcgtgtgtctgttcaccgacttcgacagccagaccaacgtgtcccagagcaaggactccgacgtgtacatcaccgataagaccgtgctggacatgcggagcatggacttcaagagcaactccgccgtggcctggtccaacaagtccgatttcgcctgcgccaacgccttcaacaacagcattatccccgaggacacattcttcccaagccccgagagcagctgcggtacccagagttttgggttgttggaccctaaattgtgctatctgttggacggaatcctgttcatttacggagtgatcctgaccgcattgttcctgaggagcaagcggtcacggctgctccacagcgattacatgaatatgacaccacgaagaccgggtcctactcgcaaacactaccaaccctacgcacctccccgcgactttgcagcgtaccgatctcgggttaagttttccagatccgcagacgcacccgcttaccaacaagggcagaaccaactctacaatgaacttaatttggggcggagggaagagtacgacgttctggacaaaaggaggggacgagatcccgagatgggcggaaagcctcagcgaaggaagaatccgcaagaggggctttataacgaactccagaaagataaaatggcagaagcctatagtgagattgggatgaagggagaaaggaggaggggtaaaggtcacgatgggttgtaccaaggattgagcacagccactaaagatacctatgatgcgctccacatgcaggccctgccgccaaga

SEQ ID NO: 10332 - DNA, 2673 bp, Artificial Sequence
  Synthetic Polynucloetide
atggccttaccagtgaccgccttgctcctgccgctggccttgctgctccacgccgccaggccggacattcagatgacacagagccctagcagcctgagcgcctctgtgggagacagagtgaccatcacatgcaagagcagccagagcctgctgtactccagcaatcagaagaactacctggcctggttccagcagaagcctggcaaggctcctaagctgctgatctactgggccagcaccagagaaagcggcgtgccaagcagattttctggcagcggctctggcaccgacttcaccctgacaatatccagcctccagcctgaggacttcgccacctacttttgccaccagtacctgagcagctacacattcggacagggcaccaaggtggaaatcaagcggctcgaggggaaaccaattcccaaccctcttctgggactggattcaaccggcagcggcgaggacctgaagaacgtgttcccacctgaggtggccgtgttcgagcctagcgaggccgagatcagccacacccagaaagccaccctcgtgtgcctggctaccggcttctaccccgaccatgtggaactgtcttggtgggtcaacggcaaagaggtgcacagcggcgtgtctaccgacccccagccactgaaagaacagcccgccctgaacgacagccggtactgcctgagcagcagactgagagtgtccgccaccttctggcagaacccccggaaccacttcagatgccaggtgcagttctacggcctgagcgagaacgacgagtggacccaggacagagccaagcccgtgacccagatcgtgtctgccgaagcctggggcagagccgattgcggatcccagagcttcggcctgctggaccccaagctgtgctacctgctggatggcatcctgttcatctacggcgtgatcctgaccgccctgttcctgagagtgaagttcagcagaagcgccgacgcccctgcctaccagcagggacagaaccaactgtacaacgagctgaacctgggcagacgggaagagtacgacgtgctggacaagcggagaggcagggaccctgagatgggcggaaagccccagcggagaaagaacccccaggaaggactgtataacgaactccagaaagacaagatggccgaagcctacagcgagatcggcatgaagggcgagcggagaagaggcaagggccacgatggcctgtaccagggcctgagcaccgccaccaaggacacctatgacgccctgcacatgcaggccctgcctccaagaagggccaagcgatctggatctggagcaacaaacttctcactactcaaacaagcaggtgacgtggaggagaatcccgggcctactagtatggactggatttggcgcatccttttccttgtcggcgctgctaccggcgcgcattccttcgaagaggtgcagctggttgaatctggcggaggactggttcagcctggcggatctctgagactgtcttgtgccgccagcggctacaccttcaccagctattggctgcactgggtccgacaggcccctggcaaaggacttgagtgggtcggatatatcaggcccagcaccggctacacagagtacaaccagaagttcaaggaccgcttcaccatcagcgccgacaccagcaagaataccgcctacctccagatgaacagcctgagagccgaggacaccgccgtgtactactgtgccagatccagatggctgctggactattggggccagggcacactggttacagttagctctacgcgtgagcagaaactgatctcggaagaggatctggggagcggcatccagaaccctgatcctgccgtgtaccagctgcgggatagcaagagcagcgacaagagcgtgtgtctgttcaccgacttcgacagccagaccaacgtgtcccagagcaaggactccgacgtgtacatcaccgataagaccgtgctggacatgcggagcatggacttcaagagcaactccgccgtggcctggtccaacaagtccgatttcgcctgcgccaacgccttcaacaacagcattatccccgaggacacattcttcccaagccccgagagcagctgcggtacccagagttttgggttgttggaccctaaattgtgctatctgttggacggaatcctgttcatttacggagtgatcctgaccgcattgttcctgaagagaggccggaagaagctgctgtacatcttcaagcagcctttcatgcggcccgtgcagaccacccaggaagaggacggctgctcctgccggttccccgaggaagaagaaggcggctgcgagctgcgggttaagttttccagatccgcagacgcacccgcttaccaacaagggcagaaccaactctacaatgaacttaatttggggcggagggaagagtacgacgttctggacaaaaggaggggacgagatcccgagatgggcggaaagcctcagcgaaggaagaatccgcaagaggggctttataacgaactccagaaagataaaatggcagaagcctatagtgagattgggatgaagggagaaaggaggaggggtaaaggtcacgatgggttgtaccaaggattgagcacagccactaaagatacctatgatgcgctccacatgcaggccctgccgccaaga

SEQ ID NO: 10333 - DNA, 2799 bp, Artificial Sequence
  Synthetic Polynucloetide
atggccttaccagtgaccgccttgctcctgccgctggccttgctgctccacgccgccaggccggacattcagatgacacagagccctagcagcctgagcgcctctgtgggagacagagtgaccatcacatgcaagagcagccagagcctgctgtactccagcaatcagaagaactacctggcctggttccagcagaagcctggcaaggctcctaagctgctgatctactgggccagcaccagagaaagcggcgtgccaagcagattttctggcagcggctctggcaccgacttcaccctgacaatatccagcctccagcctgaggacttcgccacctacttttgccaccagtacctgagcagctacacattcggacagggcaccaaggtggaaatcaagcggctcgaggggaaaccaattcccaaccctcttctgggactggattcaaccggcagcggcgaggacctgaagaacgtgttcccacctgaggtggccgtgttcgagcctagcgaggccgagatcagccacacccagaaagccaccctcgtgtgcctggctaccggcttctaccccgaccatgtggaactgtcttggtgggtcaacggcaaagaggtgcacagcggcgtgtctaccgacccccagccactgaaagaacagcccgccctgaacgacagccggtactgcctgagcagcagactgagagtgtccgccaccttctggcagaacccccggaaccacttcagatgccaggtgcagttctacggcctgagcgagaacgacgagtggacccaggacagagccaagcccgtgacccagatcgtgtctgccgaagcctggggcagagccgattgcggatcccagagcttcggcctgctggaccccaagctgtgctacctgctggatggcatcctgttcatctacggcgtgatcctgaccgccctgttcctgaaacggggcagaaagaaactcctgtatatattcaaacaaccatttatgagaccagtacaaactactcaagaggaagatggctgtagctgccgatttccagaagaagaagaaggaggatgtgaactgagagtgaagttcagcagaagcgccgacgcccctgcctaccagcagggacagaaccaactgtacaacgagctgaacctgggcagacgggaagagtacgacgtgctggacaagcggagaggcagggaccctgagatgggcggaaagccccagcggagaaagaacccccaggaaggactgtataacgaactccagaaagacaagatggccgaagcctacagcgagatcggcatgaagggcgagcggagaagaggcaagggccacgatggcctgtaccagggcctgagcaccgccaccaaggacacctatgacgccctgcacatgcaggccctgcctccaagaagggccaagcgatctggatctggagcaacaaacttctcactactcaaacaagcaggtgacgtggaggagaatcccgggcctactagtatggactggatttggcgcatccttttccttgtcggcgctgctaccggcgcgcattccttcgaagaggtgcagctggttgaatctggcggaggactggttcagcctggcggatctctgagactgtcttgtgccgccagcggctacaccttcaccagctattggctgcactgggtccgacaggcccctggcaaaggacttgagtgggtcggatatatcaggcccagcaccggctacacagagtacaaccagaagttcaaggaccgcttcaccatcagcgccgacaccagcaagaataccgcctacctccagatgaacagcctgagagccgaggacaccgccgtgtactactgtgccagatccagatggctgctggactattggggccagggcacactggttacagttagctctacgcgtgagcagaaactgatctcggaagaggatctggggagcggcatccagaaccctgatcctgccgtgtaccagctgcgggatagcaagagcagcgacaagagcgtgtgtctgttcaccgacttcgacagccagaccaacgtgtcccagagcaaggactccgacgtgtacatcaccgataagaccgtgctggacatgcggagcatggacttcaagagcaactccgccgtggcctggtccaacaagtccgatttcgcctgcgccaacgccttcaacaacagcattatccccgaggacacattcttcccaagccccgagagcagctgcggtacccagagttttgggttgttggaccctaaattgtgctatctgttggacggaatcctgttcatttacggagtgatcctgaccgcattgttcctgaagagaggccggaagaagctgctgtacatcttcaagcagcctttcatgcggcccgtgcagaccacccaggaagaggacggctgctcctgccggttccccgaggaagaagaaggcggctgcgagctgcgggttaagttttccagatccgcagacgcacccgcttaccaacaagggcagaaccaactctacaatgaacttaatttggggcggagggaagagtacgacgttctggacaaaaggaggggacgagatcccgagatgggcggaaagcctcagcgaaggaagaatccgcaagaggggctttataacgaactccagaaagataaaatggcagaagcctatagtgagattgggatgaagggagaaaggaggaggggtaaaggtcacgatgggttgtaccaaggattgagcacagccactaaagatacctatgatgcgctccacatgcaggccctgccgccaaga

SEQ ID NO: 10334 - DNA, 2472 bp, Artificial Sequence
  Synthetic Polynucloetide
atggccttaccagtgaccgccttgctcctgccgctggccttgctgctccacgccgccaggccggacattcagatgacacagagccctagcagcctgagcgcctctgtgggagacagagtgaccatcacatgcaagagcagccagagcctgctgtactccagcaatcagaagaactacctggcctggttccagcagaagcctggcaaggctcctaagctgctgatctactgggccagcaccagagaaagcggcgtgccaagcagattttctggcagcggctctggcaccgacttcaccctgacaatatccagcctccagcctgaggacttcgccacctacttttgccaccagtacctgagcagctacacattcggacagggcaccaaggtggaaatcaagcggctcgagcagagcttcggcctgctggaccccaagctgtgctacctgctggatggcatcctgttcatctacggcgtgatcctgaccgccctgttcctgagagtgaagttcagcagaagcgccgacgcccctgcctaccagcagggacagaaccaactgtacaacgagctgaacctgggcagacgggaagagtacgacgtgctggacaagcggagaggcagggaccctgagatgggcggaaagccccagcggagaaagaacccccaggaaggactgtataacgaactccagaaagacaagatggccgaagcctacagcgagatcggcatgaagggcgagcggagaagaggcaagggccacgatggcctgtaccagggcctgagcaccgccaccaaggacacctatgacgccctgcacatgcaggccctgcctccaagaagggccaagcgatctggatctggagcaacaaacttctcactactcaaacaagcaggtgacgtggaggagaatcccgggcctactagtatggactggatttggcgcatccttttccttgtcggcgctgctaccggcgcgcattccttcgaagaggtgcagctggttgaatctggcggaggactggttcagcctggcggatctctgagactgtcttgtgccgccagcggctacaccttcaccagctattggctgcactgggtccgacaggcccctggcaaaggacttgagtgggtcggatatatcaggcccagcaccggctacacagagtacaaccagaagttcaaggaccgcttcaccatcagcgccgacaccagcaagaataccgcctacctccagatgaacagcctgagagccgaggacaccgccgtgtactactgtgccagatccagatggctgctggactattggggccagggcacactggttacagttagctctacgcgtcagagttttgggttgttggaccctaaattgtgctatctgttggacggaatcctgttcatttacggagtgatcctgaccgcattgttcctgcgggttaagttttccagatccgcagacgcacccgcttaccaacaagggcagaaccaactctacaatgaacttaatttggggcggagggaagagtacgacgttctggacaaaaggaggggacgagatcccgagatgggcggaaagcctcagcgaaggaagaatccgcaagaggggctttataacgaactccagaaagataaaatggcagaagcctatagtgagattgggatgaagggagaaaggaggaggggtaaaggtcacgatgggttgtaccaaggattgagcacagccactaaagatacctatgatgcgctccacatgcaggccctgccgccaagacgcgccaagagaagcggatctggcgtgaagcagaccctgaatttcgacctgctgaagctggctggcgacgtggaatccaacccaggcccttctagaggccatatgaccgagtacaagcccacggtgcgcctcgccacccgcgacgacgtccccagggccgtacgcaccctcgccgccgcgttcgccgactaccccgccacgcgccacaccgtcgatccggaccgccacatcgagcgggtcaccgagctgcaagaactcttcctcacgcgcgtcgggctcgacatcggcaaggtgtgggtcgcggacgacggcgccgcggtggcggtctggaccacgccggagagcgtcgaagcgggggcggtgttcgccgagatcggcccgcgcatggccgagttgagcggttcccggctggccgcgcagcaacagatggaaggcctcctggcgccgcaccggcccaaggagcccgcgtggttcctggccaccgtcggcgtctcgcccgaccaccagggcaagggtctgggcagcgccgtcgtgctccccggagtggaggcggccgagcgcgccggggtgcccgccttcctggagacctccgcgccccgcaacctccccttctacgagcggctcggcttcaccgtcaccgccgacgtcgaggtgcccgaaggaccgcgcacctggtgcatgacccgcaagcccggtgcctga

SEQ ID NO: 10335 - DNA, 1944 bp, Artificial Sequence
  Synthetic Polynucloetide
atggccttaccagtgaccgccttgctcctgccgctggccttgctgctccacgccgccaggccggacattcagatgacacagagccctagcagcctgagcgcctctgtgggagacagagtgaccatcacatgcaagagcagccagagcctgctgtactccagcaatcagaagaactacctggcctggttccagcagaagcctggcaaggctcctaagctgctgatctactgggccagcaccagagaaagcggcgtgccaagcagattttctggcagcggctctggcaccgacttcaccctgacaatatccagcctccagcctgaggacttcgccacctacttttgccaccagtacctgagcagctacacattcggacagggcaccaaggtggaaatcaagcggctcgagggacagcctaaggccaatcctaccgtgacactgttccctccaagcagcgaagaactccaggccaacaaggccacacttgtgtgcctgatctccgacttctaccctggggctgtgacagtggcttggaaggccgatggatctcctgtgaaagccggcgtggaaaccaccaagccatccaagcagagcaacaacaaatacgccgccagctcctacctgagcctgacacctgagcagtggaagtcccacagatcctacagctgccaagtgacccacgaaggcagcaccgtggaaaagacagtggcccctacagagtgcagccccatcaagaccgatgtgattacaatggaccccaaggacaactgctccaaggacgccaacgataccctgctgctccagctgaccaacaccagcgcctactacatgtacttgttgctgctgctgaagtccgtggtgtacttcgccatcatcacatgctgcctgctgcggagaaccgccttctgctgcaacggcgagaagtctagggccaagcgatctggatctggagcaacaaacttctcactactcaaacaagcaggtgacgtggaggagaatcccgggcctactagtatggactggatttggcgcatccttttccttgtcggcgctgctaccggcgcgcattccttcgaagaggtgcagctggttgaatctggcggaggactggttcagcctggcggatctctgagactgtcttgtgccgccagcggctacaccttcaccagctattggctgcactgggtccgacaggcccctggcaaaggacttgagtgggtcggatatatcaggcccagcaccggctacacagagtacaaccagaagttcaaggaccgcttcaccatcagcgccgacaccagcaagaataccgcctacctccagatgaacagcctgagagccgaggacaccgccgtgtactactgtgccagatccagatggctgctggactattggggccagggcacactggttacagttagctctacgcgtgcctctacaaagggaccctccgtgtttcctctggctcccagcagcaagtctacaagcggaggaacagccgctctgggctgcctggtcaaggattactttcccgagcctgtgaccgtgtcctggaatagcggagcactgacaagcggcgtgcacacctttccagccgtgctgcaaagcagcggcctgtactctctgagcagcgtggtcacagtgcctagctctagcctgggcacccagacctacatctgcaatgtgaaccacaagcctagcaacaccaaggtggacaagagagtggaacccaagagctgtgaagtgaaaaccgactccaccgaccacgtgaagcccaaagagacagagaacaccaagcagcccagcaagagctgccacaagcccaaggccatcgtgcacaccgagaaagtgaacatgatgagcctgaccgtgctgggcctgcggatgctgttcgccaaaaccgtggccgtgaacttcctgctgaccgccaagctgttcttcctc

SEQ ID NO: 10336 - DNA, 1878 bp, Artificial Sequence
  Synthetic Polynucloetide
atggccttaccagtgaccgccttgctcctgccgctggccttgctgctccacgccgccaggccggacattcagatgacacagagccctagcagcctgagcgcctctgtgggagacagagtgaccatcacatgcaagagcagccagagcctgctgtactccagcaatcagaagaactacctggcctggttccagcagaagcctggcaaggctcctaagctgctgatctactgggccagcaccagagaaagcggcgtgccaagcagattttctggcagcggctctggcaccgacttcaccctgacaatatccagcctccagcctgaggacttcgccacctacttttgccaccagtacctgagcagctacacattcggacagggcaccaaggtggaaatcaagcggctcgagggacagcctaaggccaatcctaccgtgacactgttccctccaagcagcgaagaactccaggccaacaaggccacacttgtgtgcctgatctccgacttctaccctggggctgtgacagtggcttggaaggccgatggatctcctgtgaaagccggcgtggaaaccaccaagccatccaagcagagcaacaacaaatacgccgccagctcctacctgagcctgacacctgagcagtggaagtcccacagatcctacagctgccaagtgacccacgaaggcagcaccgtggaaaagacagtggcccctacagagtgcagcggcagagccgattgcggcatcaccagcgccagctaccaccagggcgtgctgagcgccaccatcctgtacgagatcctgctgggcaaggccaccctgtacgccgtgctggtgtctgccctggtgctgatggctatggtcaagcggaaggacagccggggaagggccaagcgatctggatctggagcaacaaacttctcactactcaaacaagcaggtgacgtggaggagaatcccgggcctactagtatggactggatttggcgcatccttttccttgtcggcgctgctaccggcgcgcattccttcgaagaggtgcagctggttgaatctggcggaggactggttcagcctggcggatctctgagactgtcttgtgccgccagcggctacaccttcaccagctattggctgcactgggtccgacaggcccctggcaaaggacttgagtgggtcggatatatcaggcccagcaccggctacacagagtacaaccagaagttcaaggaccgcttcaccatcagcgccgacaccagcaagaataccgcctacctccagatgaacagcctgagagccgaggacaccgccgtgtactactgtgccagatccagatggctgctggactattggggccagggcacactggttacagttagctctacgcgtgcctctacaaagggaccctccgtgtttcctctggctcccagcagcaagtctacaagcggaggaacagccgctctgggctgcctggtcaaggattactttcccgagcctgtgaccgtgtcctggaatagcggagcactgacaagcggcgtgcacacctttccagccgtgctgcaaagcagcggcctgtactctctgagcagcgtggtcacagtgcctagctctagcctgggcacccagacctacatctgcaatgtgaaccacaagcctagcaacaccaaggtggacaagagagtggaacccaagagctgtatccccgaggacacattcttcccaagcagcgacgtgccctgcgacgtgaagctggtggaaaagagcttcgagacagacaccaacctgaacttccagaacctgagcgtgatcggcttcagaatcctgctgctgaaagtggccggctttaacctgctgatgaccctgcggctgtggtccagc

SEQ ID NO: 10337 - DNA, 1878 bp, Artificial Sequence
  Synthetic Polynucloetide
atggccttaccagtgaccgccttgctcctgccgctggccttgctgctccacgccgccaggccggacattcagatgacacagagccctagcagcctgagcgcctctgtgggagacagagtgaccatcacatgcaagagcagccagagcctgctgtactccagcaatcagaagaactacctggcctggttccagcagaagcctggcaaggctcctaagctgctgatctactgggccagcaccagagaaagcggcgtgccaagcagattttctggcagcggctctggcaccgacttcaccctgacaatatccagcctccagcctgaggacttcgccacctacttttgccaccagtacctgagcagctacacattcggacagggcaccaaggtggaaatcaagcggctcgagggacagcctaaggccaatcctaccgtgacactgttccctccaagcagcgaagaactccaggccaacaaggccacacttgtgtgcctgatctccgacttctaccctggggctgtgacagtggcttggaaggccgatggatctcctgtgaaagccggcgtggaaaccaccaagccatccaagcagagcaacaacaaatacgccgccagctcctacctgagcctgacacctgagcagtggaagtcccacagatcctacagctgccaagtgacccacgaaggcagcaccgtggaaaagacagtggcccctacagagtgcagcggcagagccgattgcggctttaccagcgagagctaccagcagggcgtgctgagcgccaccatcctgtacgagatcctgctgggcaaggccaccctgtacgccgtgctggtgtctgccctggtgctgatggctatggtcaagcggaaggacagccggggaagggccaagcgatctggatctggagcaacaaacttctcactactcaaacaagcaggtgacgtggaggagaatcccgggcctactagtatggactggatttggcgcatccttttccttgtcggcgctgctaccggcgcgcattccttcgaagaggtgcagctggttgaatctggcggaggactggttcagcctggcggatctctgagactgtcttgtgccgccagcggctacaccttcaccagctattggctgcactgggtccgacaggcccctggcaaaggacttgagtgggtcggatatatcaggcccagcaccggctacacagagtacaaccagaagttcaaggaccgcttcaccatcagcgccgacaccagcaagaataccgcctacctccagatgaacagcctgagagccgaggacaccgccgtgtactactgtgccagatccagatggctgctggactattggggccagggcacactggttacagttagctctacgcgtgcctctacaaagggaccctccgtgtttcctctggctcccagcagcaagtctacaagcggaggaacagccgctctgggctgcctggtcaaggattactttcccgagcctgtgaccgtgtcctggaatagcggagcactgacaagcggcgtgcacacctttccagccgtgctgcaaagcagcggcctgtactctctgagcagcgtggtcacagtgcctagctctagcctgggcacccagacctacatctgcaatgtgaaccacaagcctagcaacaccaaggtggacaagagagtggaacccaagagctgtatccccgaggacacattcttcccaagccccgagagcagctgcgacgtgaagctggtggaaaagagcttcgagacagacaccaacctgaacttccagaacctgagcgtgatcggcttcagaatcctgctgctgaaagtggccggctttaacctgctgatgaccctgcggctgtggtccagc

SEQ ID NO: 10338 - DNA, 1356 bp, Artificial Sequence
  Synthetic Polynucloetide
atggccttaccagtgaccgccttgctcctgccgctggccttgctgctccacgccgccaggccggacattcagatgacacagagccctagcagcctgagcgcctctgtgggagacagagtgaccatcacatgcaagagcagccagagcctgctgtactccagcaatcagaagaactacctggcctggttccagcagaagcctggcaaggctcctaagctgctgatctactgggccagcaccagagaaagcggcgtgccaagcagattttctggcagcggctctggcaccgacttcaccctgacaatatccagcctccagcctgaggacttcgccacctacttttgccaccagtacctgagcagctacacattcggacagggcaccaaggtggaaatcaagcggggcggaggcggaagtggaggcggaggatctggcggcggaggctctgaggtgcagctggttgaatctggcggaggactggttcagcctggcggatctctgagactgtcttgtgccgccagcggctacaccttcaccagctattggctgcactgggtccgacaggcccctggcaaaggacttgagtgggtcggatatatcaggcccagcaccggctacacagagtacaaccagaagttcaaggaccgcttcaccatcagcgccgacaccagcaagaataccgcctacctccagatgaacagcctgagagccgaggacaccgccgtgtactactgtgccagatccagatggctgctggactattggggccagggcacactggttacagttagctctacgcgtgacggtaacgaggagatgggaggaatcactcaaaccccttacaaagtctcaatttcaggaacaactgttatccttacatgtccccagtatcctggcagcgagatcctttggcagcataacgacaagaatatagggggagatgaagacgataagaatatcggatctgacgaggatcacttgagcctgaaagagttctccgagcttgaacaaagcggatattatgtgtgctatccgcgcgggtcaaagccggaagacgctaacttttacctttatctccgagccagagtgtgcgaaaattgcatggaaatggacgttatgtccgttgctacaatagttatcgtagatatatgcatcacgggtggactgcttctgctggtttattattggtccaagaatagaaaggccaaagctaaacccgtgaccagaggcgctggcgcaggcggaaggcaaaggggacaaaacaaagaacggccaccaccagtgccaaatccagattatgagcctattcggaaaggacagagggacctgtactctggcctgaatcagagaagaatc

SEQ ID NO: 10339 - DNA, 1251 bp, Artificial Sequence
  Synthetic Polynucloetide
atggccttaccagtgaccgccttgctcctgccgctggccttgctgctccacgccgccaggccggacattcagatgacacagagccctagcagcctgagcgcctctgtgggagacagagtgaccatcacatgcaagagcagccagagcctgctgtactccagcaatcagaagaactacctggcctggttccagcagaagcctggcaaggctcctaagctgctgatctactgggccagcaccagagaaagcggcgtgccaagcagattttctggcagcggctctggcaccgacttcaccctgacaatatccagcctccagcctgaggacttcgccacctacttttgccaccagtacctgagcagctacacattcggacagggcaccaaggtggaaatcaagcggggcggaggcggaagtggaggcggaggatctggcggcggaggctctgaggtgcagctggttgaatctggcggaggactggttcagcctggcggatctctgagactgtcttgtgccgccagcggctacaccttcaccagctattggctgcactgggtccgacaggcccctggcaaaggacttgagtgggtcggatatatcaggcccagcaccggctacacagagtacaaccagaagttcaaggaccgcttcaccatcagcgccgacaccagcaagaataccgcctacctccagatgaacagcctgagagccgaggacaccgccgtgtactactgtgccagatccagatggctgctggactattggggccagggcacactggttacagttagctctacgcgtttcaagatccccatcgaggaactggaagatcgggtgttcgtgaactgcaacacctctatcacctgggtggaaggcaccgtgggaacactgctgagcgacatcaccagactggacctcggcaagcggattctggaccctcggggcatctacagatgcaacggcaccgacatctacaaggacaaagaaagcaccgtgcaggtccactacagaatgtgccagtcctgcgtggaactggaccctgctacagtggccggcatcatcgtgaccgatgtgatcgctactctgctgctggctctgggagtgttctgcttcgccggacacgaaacaggcagactgtctggcgctgccgatacacaggccctgctgagaaacgaccaagtgtatcagcccctgcgcgacagagatgatgcccagtattctcacctcggcggcaactgggctagaaacaag

SEQ ID NO: 10340 - DNA, 1281 bp, Artificial Sequence
  Synthetic Polynucloetide
atggccttaccagtgaccgccttgctcctgccgctggccttgctgctccacgccgccaggccggacattcagatgacacagagccctagcagcctgagcgcctctgtgggagacagagtgaccatcacatgcaagagcagccagagcctgctgtactccagcaatcagaagaactacctggcctggttccagcagaagcctggcaaggctcctaagctgctgatctactgggccagcaccagagaaagcggcgtgccaagcagattttctggcagcggctctggcaccgacttcaccctgacaatatccagcctccagcctgaggacttcgccacctacttttgccaccagtacctgagcagctacacattcggacagggcaccaaggtggaaatcaagcggggcggaggcggaagtggaggcggaggatctggcggcggaggctctgaggtgcagctggttgaatctggcggaggactggttcagcctggcggatctctgagactgtcttgtgccgccagcggctacaccttcaccagctattggctgcactgggtccgacaggcccctggcaaaggacttgagtgggtcggatatatcaggcccagcaccggctacacagagtacaaccagaagttcaaggaccgcttcaccatcagcgccgacaccagcaagaataccgcctacctccagatgaacagcctgagagccgaggacaccgccgtgtactactgtgccagatccagatggctgctggactattggggccagggcacactggttacagttagctctacgcgtcagagcatcaagggcaaccacctggtcaaggtgtacgactaccaagaggacggcagcgtgctgctgacatgtgatgccgaggccaagaacatcacctggtttaaggacggcaagatgatcggcttcctgaccgaggacaagaagaagtggaacctgggcagcaacgctaaggaccccagaggcatgtatcagtgcaagggcagccagaacaagagcaagcccctccaggtgtactaccggatgtgccagaactgcatcgagctgaacgccgctaccatcagcggctttctgttcgccgagatcgtgtccatcttcgtgctggccgtgggcgtgtactttatcgctggacaggatggcgtgcggcagagcagagcttccgataagcaaaccctgctgcctaacgaccagctgtaccagcctctgaaggacagagaggacgaccagtacagccacctccagggcaatcagctgagaagaaac

SEQ ID NO: 10341 - DNA, 1230 bp, Artificial Sequence
  Synthetic Polynucloetide
atggccttaccagtgaccgccttgctcctgccgctggccttgctgctccacgccgccaggccggacattcagatgacacagagccctagcagcctgagcgcctctgtgggagacagagtgaccatcacatgcaagagcagccagagcctgctgtactccagcaatcagaagaactacctggcctggttccagcagaagcctggcaaggctcctaagctgctgatctactgggccagcaccagagaaagcggcgtgccaagcagattttctggcagcggctctggcaccgacttcaccctgacaatatccagcctccagcctgaggacttcgccacctacttttgccaccagtacctgagcagctacacattcggacagggcaccaaggtggaaatcaagcggggcggaggcggaagtggaggcggaggatctggcggcggaggctctgaggtgcagctggttgaatctggcggaggactggttcagcctggcggatctctgagactgtcttgtgccgccagcggctacaccttcaccagctattggctgcactgggtccgacaggcccctggcaaaggacttgagtgggtcggatatatcaggcccagcaccggctacacagagtacaaccagaagttcaaggaccgcttcaccatcagcgccgacaccagcaagaataccgcctacctccagatgaacagcctgagagccgaggacaccgccgtgtactactgtgccagatccagatggctgctggactattggggccagggcacactggttacagttagctctacgcgtcagagttttgggttgttggaccctaaattgtgctatctgttggacggaatcctgttcatttacggagtgatcctgaccgcattgttcctgcgggttaagttttccagatccgcagacgcacccgcttaccaacaagggcagaaccaactctacaatgaacttaatttggggcggagggaagagtacgacgttctggacaaaaggaggggacgagatcccgagatgggcggaaagcctcagcgaaggaagaatccgcaagaggggctttataacgaactccagaaagataaaatggcagaagcctatagtgagattgggatgaagggagaaaggaggaggggtaaaggtcacgatgggttgtaccaaggattgagcacagccactaaagatacctatgatgcgctccacatgcaggccctgccgccaaga

SEQ ID NO: 10342 - DNA, 1356 bp, Artificial Sequence
  Synthetic Polynucloetide
atggccttaccagtgaccgccttgctcctgccgctggccttgctgctccacgccgccaggccggaggtgcagctggttgaatctggcggaggactggttcagcctggcggatctctgagactgtcttgtgccgccagcggctacaccttcaccagctattggctgcactgggtccgacaggcccctggcaaaggacttgagtgggtcggatatatcaggcccagcaccggctacacagagtacaaccagaagttcaaggaccgcttcaccatcagcgccgacaccagcaagaataccgcctacctccagatgaacagcctgagagccgaggacaccgccgtgtactactgtgccagatccagatggctgctggactattggggccagggcacactggttacagttagctctggcggaggcggaagtggaggcggaggatctggcggcggaggctctgacattcagatgacacagagccctagcagcctgagcgcctctgtgggagacagagtgaccatcacatgcaagagcagccagagcctgctgtactccagcaatcagaagaactacctggcctggttccagcagaagcctggcaaggctcctaagctgctgatctactgggccagcaccagagaaagcggcgtgccaagcagattttctggcagcggctctggcaccgacttcaccctgacaatatccagcctccagcctgaggacttcgccacctacttttgccaccagtacctgagcagctacacattcggacagggcaccaaggtggaaatcaagcggacgcgtgacggtaacgaggagatgggaggaatcactcaaaccccttacaaagtctcaatttcaggaacaactgttatccttacatgtccccagtatcctggcagcgagatcctttggcagcataacgacaagaatatagggggagatgaagacgataagaatatcggatctgacgaggatcacttgagcctgaaagagttctccgagcttgaacaaagcggatattatgtgtgctatccgcgcgggtcaaagccggaagacgctaacttttacctttatctccgagccagagtgtgcgaaaattgcatggaaatggacgttatgtccgttgctacaatagttatcgtagatatatgcatcacgggtggactgcttctgctggtttattattggtccaagaatagaaaggccaaagctaaacccgtgaccagaggcgctggcgcaggcggaaggcaaaggggacaaaacaaagaacggccaccaccagtgccaaatccagattatgagcctattcggaaaggacagagggacctgtactctggcctgaatcagagaagaatc

SEQ ID NO: 10343 - DNA, 1251 bp, Artificial Sequence
  Synthetic Polynucloetide
atggccttaccagtgaccgccttgctcctgccgctggccttgctgctccacgccgccaggccggaggtgcagctggttgaatctggcggaggactggttcagcctggcggatctctgagactgtcttgtgccgccagcggctacaccttcaccagctattggctgcactgggtccgacaggcccctggcaaaggacttgagtgggtcggatatatcaggcccagcaccggctacacagagtacaaccagaagttcaaggaccgcttcaccatcagcgccgacaccagcaagaataccgcctacctccagatgaacagcctgagagccgaggacaccgccgtgtactactgtgccagatccagatggctgctggactattggggccagggcacactggttacagttagctctggcggaggcggaagtggaggcggaggatctggcggcggaggctctgacattcagatgacacagagccctagcagcctgagcgcctctgtgggagacagagtgaccatcacatgcaagagcagccagagcctgctgtactccagcaatcagaagaactacctggcctggttccagcagaagcctggcaaggctcctaagctgctgatctactgggccagcaccagagaaagcggcgtgccaagcagattttctggcagcggctctggcaccgacttcaccctgacaatatccagcctccagcctgaggacttcgccacctacttttgccaccagtacctgagcagctacacattcggacagggcaccaaggtggaaatcaagcggacgcgtttcaagatccccatcgaggaactggaagatcgggtgttcgtgaactgcaacacctctatcacctgggtggaaggcaccgtgggaacactgctgagcgacatcaccagactggacctcggcaagcggattctggaccctcggggcatctacagatgcaacggcaccgacatctacaaggacaaagaaagcaccgtgcaggtccactacagaatgtgccagtcctgcgtggaactggaccctgctacagtggccggcatcatcgtgaccgatgtgatcgctactctgctgctggctctgggagtgttctgcttcgccggacacgaaacaggcagactgtctggcgctgccgatacacaggccctgctgagaaacgaccaagtgtatcagcccctgcgcgacagagatgatgcccagtattctcacctcggcggcaactgggctagaaacaag

SEQ ID NO: 10344 - DNA, 1281 bp, Artificial Sequence
  Synthetic Polynucloetide
atggccttaccagtgaccgccttgctcctgccgctggccttgctgctccacgccgccaggccggaggtgcagctggttgaatctggcggaggactggttcagcctggcggatctctgagactgtcttgtgccgccagcggctacaccttcaccagctattggctgcactgggtccgacaggcccctggcaaaggacttgagtgggtcggatatatcaggcccagcaccggctacacagagtacaaccagaagttcaaggaccgcttcaccatcagcgccgacaccagcaagaataccgcctacctccagatgaacagcctgagagccgaggacaccgccgtgtactactgtgccagatccagatggctgctggactattggggccagggcacactggttacagttagctctggcggaggcggaagtggaggcggaggatctggcggcggaggctctgacattcagatgacacagagccctagcagcctgagcgcctctgtgggagacagagtgaccatcacatgcaagagcagccagagcctgctgtactccagcaatcagaagaactacctggcctggttccagcagaagcctggcaaggctcctaagctgctgatctactgggccagcaccagagaaagcggcgtgccaagcagattttctggcagcggctctggcaccgacttcaccctgacaatatccagcctccagcctgaggacttcgccacctacttttgccaccagtacctgagcagctacacattcggacagggcaccaaggtggaaatcaagcggacgcgtcagagcatcaagggcaaccacctggtcaaggtgtacgactaccaagaggacggcagcgtgctgctgacatgtgatgccgaggccaagaacatcacctggtttaaggacggcaagatgatcggcttcctgaccgaggacaagaagaagtggaacctgggcagcaacgctaaggaccccagaggcatgtatcagtgcaagggcagccagaacaagagcaagcccctccaggtgtactaccggatgtgccagaactgcatcgagctgaacgccgctaccatcagcggctttctgttcgccgagatcgtgtccatcttcgtgctggccgtgggcgtgtactttatcgctggacaggatggcgtgcggcagagcagagcttccgataagcaaaccctgctgcctaacgaccagctgtaccagcctctgaaggacagagaggacgaccagtacagccacctccagggcaatcagctgagaagaaac

SEQ ID NO: 10345 - DNA, 1230 bp, Artificial Sequence
  Synthetic Polynucloetide
atggccttaccagtgaccgccttgctcctgccgctggccttgctgctccacgccgccaggccggaggtgcagctggttgaatctggcggaggactggttcagcctggcggatctctgagactgtcttgtgccgccagcggctacaccttcaccagctattggctgcactgggtccgacaggcccctggcaaaggacttgagtgggtcggatatatcaggcccagcaccggctacacagagtacaaccagaagttcaaggaccgcttcaccatcagcgccgacaccagcaagaataccgcctacctccagatgaacagcctgagagccgaggacaccgccgtgtactactgtgccagatccagatggctgctggactattggggccagggcacactggttacagttagctctggcggaggcggaagtggaggcggaggatctggcggcggaggctctgacattcagatgacacagagccctagcagcctgagcgcctctgtgggagacagagtgaccatcacatgcaagagcagccagagcctgctgtactccagcaatcagaagaactacctggcctggttccagcagaagcctggcaaggctcctaagctgctgatctactgggccagcaccagagaaagcggcgtgccaagcagattttctggcagcggctctggcaccgacttcaccctgacaatatccagcctccagcctgaggacttcgccacctacttttgccaccagtacctgagcagctacacattcggacagggcaccaaggtggaaatcaagcggacgcgtcagagttttgggttgttggaccctaaattgtgctatctgttggacggaatcctgttcatttacggagtgatcctgaccgcattgttcctgcgggttaagttttccagatccgcagacgcacccgcttaccaacaagggcagaaccaactctacaatgaacttaatttggggcggagggaagagtacgacgttctggacaaaaggaggggacgagatcccgagatgggcggaaagcctcagcgaaggaagaatccgcaagaggggctttataacgaactccagaaagataaaatggcagaagcctatagtgagattgggatgaagggagaaaggaggaggggtaaaggtcacgatgggttgtaccaaggattgagcacagccactaaagatacctatgatgcgctccacatgcaggccctgccgccaaga

SEQ ID NO: 10346 - DNA, 1932 bp, Artificial Sequence
  Synthetic Polynucloetide
atggccttaccagtgaccgccttgctcctgccgctggccttgctgctccacgccgccaggccggacattcagatgacacagagccctagcagcctgagcgcctctgtgggagacagagtgaccatcacatgcaagagcagccagagcctgctgtactccagcaatcagaagaactacctggcctggttccagcagaagcctggcaaggctcctaagctgctgatctactgggccagcaccagagaaagcggcgtgccaagcagattttctggcagcggctctggcaccgacttcaccctgacaatatccagcctccagcctgaggacttcgccacctacttttgccaccagtacctgagcagctacacattcggacagggcaccaaggtggaaatcaagcggggcggaggcggaagtggaggcggaggatctggcggcggaggctctgaggtgcagctggttgaatctggcggaggactggttcagcctggcggatctctgagactgtcttgtgccgccagcggctacaccttcaccagctattggctgcactgggtccgacaggcccctggcaaaggacttgagtgggtcggatatatcaggcccagcaccggctacacagagtacaaccagaagttcaaggaccgcttcaccatcagcgccgacaccagcaagaataccgcctacctccagatgaacagcctgagagccgaggacaccgccgtgtactactgtgccagatccagatggctgctggactattggggccagggcacactggttacagttagctctacgcgtgggagcggcatccagaaccctgatcctgccgtgtaccagctgcgggatagcaagagcagcgacaagagcgtgtgtctgttcaccgacttcgacagccagaccaacgtgtcccagagcaaggactccgacgtgtacatcaccgataagaccgtgctggacatgcggagcatggacttcaagagcaactccgccgtggcctggtccaacaagtccgatttcgcctgcgccaacgccttcaacaacagcattatccccgaggacacattcttcccaagccccgagagcagctgcgacgtgaagctggtggaaaagagcttcgagacagacaccaacctgaacttccagaacctgagcgtgatcggcttcagaatcctgctgctgaaagtggccggctttaacctgctgatgaccctgcggctgtggtccagccgcgccaagagaagcggatctggcgtgaagcagaccctgaatttcgacctgctgaagctggctggcgacgtggaatccaacccaggcccttctagaggccatatgaccgagtacaagcccacggtgcgcctcgccacccgcgacgacgtccccagggccgtacgcaccctcgccgccgcgttcgccgactaccccgccacgcgccacaccgtcgatccggaccgccacatcgagcgggtcaccgagctgcaagaactcttcctcacgcgcgtcgggctcgacatcggcaaggtgtgggtcgcggacgacggcgccgcggtggcggtctggaccacgccggagagcgtcgaagcgggggcggtgttcgccgagatcggcccgcgcatggccgagttgagcggttcccggctggccgcgcagcaacagatggaaggcctcctggcgccgcaccggcccaaggagcccgcgtggttcctggccaccgtcggcgtctcgcccgaccaccagggcaagggtctgggcagcgccgtcgtgctccccggagtggaggcggccgagcgcgccggggtgcccgccttcctggagacctccgcgccccgcaacctccccttctacgagcggctcggcttcaccgtcaccgccgacgtcgaggtgcccgaaggaccgcgcacctggtgcatgacccgcaagcccggtgcctga

SEQ ID NO: 10347 - DNA, 2028 bp, Artificial Sequence
  Synthetic Polynucloetide
atggccttaccagtgaccgccttgctcctgccgctggccttgctgctccacgccgccaggccggacattcagatgacacagagccctagcagcctgagcgcctctgtgggagacagagtgaccatcacatgcaagagcagccagagcctgctgtactccagcaatcagaagaactacctggcctggttccagcagaagcctggcaaggctcctaagctgctgatctactgggccagcaccagagaaagcggcgtgccaagcagattttctggcagcggctctggcaccgacttcaccctgacaatatccagcctccagcctgaggacttcgccacctacttttgccaccagtacctgagcagctacacattcggacagggcaccaaggtggaaatcaagcggggcggaggcggaagtggaggcggaggatctggcggcggaggctctgaggtgcagctggttgaatctggcggaggactggttcagcctggcggatctctgagactgtcttgtgccgccagcggctacaccttcaccagctattggctgcactgggtccgacaggcccctggcaaaggacttgagtgggtcggatatatcaggcccagcaccggctacacagagtacaaccagaagttcaaggaccgcttcaccatcagcgccgacaccagcaagaataccgcctacctccagatgaacagcctgagagccgaggacaccgccgtgtactactgtgccagatccagatggctgctggactattggggccagggcacactggttacagttagctctctcgaggacctgaagaacgtgttcccacctgaggtggccgtgttcgagcctagcgaggccgagatcagccacacccagaaagccaccctcgtgtgcctggctaccggcttctaccccgaccatgtggaactgtcttggtgggtcaacggcaaagaggtgcacagcggcgtgtctaccgacccccagccactgaaagaacagcccgccctgaacgacagccggtactgcctgagcagcagactgagagtgtccgccaccttctggcagaacccccggaaccacttcagatgccaggtgcagttctacggcctgagcgagaacgacgagtggacccaggacagagccaagcccgtgacccagatcgtgtctgccgaagcctggggcagagccgattgcggctttaccagcgagagctaccagcagggcgtgctgagcgccaccatcctgtacgagatcctgctgggcaaggccaccctgtacgccgtgctggtgtctgccctggtgctgatggctatggtcaagcggaaggacagccggggaagggccaagcgatctggatctggagcaacaaacttctcactactcaaacaagcaggtgacgtggaggagaatcccgggcctactagaggccatatgaccgagtacaagcccacggtgcgcctcgccacccgcgacgacgtccccagggccgtacgcaccctcgccgccgcgttcgccgactaccccgccacgcgccacaccgtcgatccggaccgccacatcgagcgggtcaccgagctgcaagaactcttcctcacgcgcgtcgggctcgacatcggcaaggtgtgggtcgcggacgacggcgccgcggtggcggtctggaccacgccggagagcgtcgaagcgggggcggtgttcgccgagatcggcccgcgcatggccgagttgagcggttcccggctggccgcgcagcaacagatggaaggcctcctggcgccgcaccggcccaaggagcccgcgtggttcctggccaccgtcggcgtctcgcccgaccaccagggcaagggtctgggcagcgccgtcgtgctccccggagtggaggcggccgagcgcgccggggtgcccgccttcctggagacctccgcgccccgcaacctccccttctacgagcggctcggcttcaccgtcaccgccgacgtcgaggtgcccgaaggaccgcgcacctggtgcatgacccgcaagcccggtgcctga

SEQ ID NO: 10348 - DNA, 2178 bp, Artificial Sequence
  Synthetic Polynucloetide
atggccttaccagtgaccgccttgctcctgccgctggccttgctgctccacgccgccaggccggacattcagatgacacagagccctagcagcctgagcgcctctgtgggagacagagtgaccatcacatgcaagagcagccagagcctgctgtactccagcaatcagaagaactacctggcctggttccagcagaagcctggcaaggctcctaagctgctgatctactgggccagcaccagagaaagcggcgtgccaagcagattttctggcagcggctctggcaccgacttcaccctgacaatatccagcctccagcctgaggacttcgccacctacttttgccaccagtacctgagcagctacacattcggacagggcaccaaggtggaaatcaagcggggcggaggcggaagtggaggcggaggatctggcggcggaggctctgaggtgcagctggttgaatctggcggaggactggttcagcctggcggatctctgagactgtcttgtgccgccagcggctacaccttcaccagctattggctgcactgggtccgacaggcccctggcaaaggacttgagtgggtcggatatatcaggcccagcaccggctacacagagtacaaccagaagttcaaggaccgcttcaccatcagcgccgacaccagcaagaataccgcctacctccagatgaacagcctgagagccgaggacaccgccgtgtactactgtgccagatccagatggctgctggactattggggccagggcacactggttacagttagctctacgcgtgagcagaaactgatctcggaagaggatctggggagcggcaccccattcccttctctggcccctcccatcatgctgctggtggacggcaagcagcagatggtggtcgtgtgcctggtgctggatgtggccccacctggactggacagccccatctggtttagcgccggcaatggctctgccctggacgcctttacctacggcccaagccctgccaccgatggcacctggacaaatctggcccacctgagcctgcccagcgaggaactggcttcttgggagcctctcgtgtgccacacaggacctggcgctgagggacacagcagatccacccagcctatgcacctgtctggcgaggccagcaccgccagaacctgtcctcaggaacctctgagaggcacccctggcggagcactgtggctgggagtgctgagactgctgctgttcaagctgctgctgtttgacctgctgctgacctgctcctgtctgtgcgatcctgccggccctctgccttctcctgccaccaccacaagactgagagccctgggcagccacagactgcaccctgccacagagacaggcggcagagaggccacaagcagccctagaccccagcccagagacagaagatggggcgataccccccctggcagaaagcctggatctccagtccgcgccaagagaagcggatctggcgtgaagcagaccctgaatttcgacctgctgaagctggctggcgacgtggaatccaacccaggcccttctagatctagaggccatatgaccgagtacaagcccacggtgcgcctcgccacccgcgacgacgtccccagggccgtacgcaccctcgccgccgcgttcgccgactaccccgccacgcgccacaccgtcgatccggaccgccacatcgagcgggtcaccgagctgcaagaactcttcctcacgcgcgtcgggctcgacatcggcaaggtgtgggtcgcggacgacggcgccgcggtggcggtctggaccacgccggagagcgtcgaagcgggggcggtgttcgccgagatcggcccgcgcatggccgagttgagcggttcccggctggccgcgcagcaacagatggaaggcctcctggcgccgcaccggcccaaggagcccgcgtggttcctggccaccgtcggcgtctcgcccgaccaccagggcaagggtctgggcagcgccgtcgtgctccccggagtggaggcggccgagcgcgccggggtgcccgccttcctggagacctccgcgccccgcaacctccccttctacgagcggctcggcttcaccgtcaccgccgacgtcgaggtgcccgaaggaccgcgcacctggtgcatgacccgcaagcccggtgcctga

SEQ ID NO: 10349 - DNA, 1635 bp, Artificial Sequence
  Synthetic Polynucloetide
atggccttaccagtgaccgccttgctcctgccgctggccttgctgctccacgccgccaggccggacattcagatgacacagagccctagcagcctgagcgcctctgtgggagacagagtgaccatcacatgcaagagcagccagagcctgctgtactccagcaatcagaagaactacctggcctggttccagcagaagcctggcaaggctcctaagctgctgatctactgggccagcaccagagaaagcggcgtgccaagcagattttctggcagcggctctggcaccgacttcaccctgacaatatccagcctccagcctgaggacttcgccacctacttttgccaccagtacctgagcagctacacattcggacagggcaccaaggtggaaatcaagcggctcgaggacctgaagaacgtgttcccacctgaggtggccgtgttcgagcctagcgaggccgagatcagccacacccagaaagccaccctcgtgtgcctggctaccggcttctaccccgaccatgtggaactgtcttggtgggtcaacggcaaagaggtgcacagcggcgtgtctaccgacccccagccactgaaagaacagcccgccctgaacgacagccggtactgcctgagcagcagactgagagtgtccgccaccttctggcagaacccccggaaccacttcagatgccaggtgcagttctacggcctgagcgagaacgacgagtggacccaggacagagccaagcccgtgacccagatcgtgtctgccgaagcctggggcagagccgattgcggctttaccagcgagagctaccagcagggcgtgctgagcgccaccatcctgtacgagatcctgctgggcaaggccaccctgtacgccgtgctggtgtctgccctggtgctgatggctatggtcaagcggaaggacagccggggaagggccaagcgatctggatctggagcaacaaacttctcactactcaaacaagcaggtgacgtggaggagaatcccgggcctactagaggccatatgaccgagtacaagcccacggtgcgcctcgccacccgcgacgacgtccccagggccgtacgcaccctcgccgccgcgttcgccgactaccccgccacgcgccacaccgtcgatccggaccgccacatcgagcgggtcaccgagctgcaagaactcttcctcacgcgcgtcgggctcgacatcggcaaggtgtgggtcgcggacgacggcgccgcggtggcggtctggaccacgccggagagcgtcgaagcgggggcggtgttcgccgagatcggcccgcgcatggccgagttgagcggttcccggctggccgcgcagcaacagatggaaggcctcctggcgccgcaccggcccaaggagcccgcgtggttcctggccaccgtcggcgtctcgcccgaccaccagggcaagggtctgggcagcgccgtcgtgctccccggagtggaggcggccgagcgcgccggggtgcccgccttcctggagacctccgcgccccgcaacctccccttctacgagcggctcggcttcaccgtcaccgccgacgtcgaggtgcccgaaggaccgcgcacctggtgcatgacccgcaagcccggtgcctga

SEQ ID NO: 10350 - DNA, 942 bp, Artificial Sequence
  Synthetic Polynucloetide
atggccttaccagtgaccgccttgctcctgccgctggccttgctgctccacgccgccaggccggacattcagatgacacagagccctagcagcctgagcgcctctgtgggagacagagtgaccatcacatgcaagagcagccagagcctgctgtactccagcaatcagaagaactacctggcctggttccagcagaagcctggcaaggctcctaagctgctgatctactgggccagcaccagagaaagcggcgtgccaagcagattttctggcagcggctctggcaccgacttcaccctgacaatatccagcctccagcctgaggacttcgccacctacttttgccaccagtacctgagcagctacacattcggacagggcaccaaggtggaaatcaagcggctcgaggacctgaagaacgtgttcccacctgaggtggccgtgttcgagcctagcgaggccgagatcagccacacccagaaagccaccctcgtgtgcctggctaccggcttctaccccgaccatgtggaactgtcttggtgggtcaacggcaaagaggtgcacagcggcgtgtctaccgacccccagccactgaaagaacagcccgccctgaacgacagccggtactgcctgagcagcagactgagagtgtccgccaccttctggcagaacccccggaaccacttcagatgccaggtgcagttctacggcctgagcgagaacgacgagtggacccaggacagagccaagcccgtgacccagatcgtgtctgccgaagcctggggcagagccgattgcggctttaccagcgagagctaccagcagggcgtgctgagcgccaccatcctgtacgagatcctgctgggcaaggccaccctgtacgccgtgctggtgtctgccctggtgctgatggctatggtcaagcggaaggacagccgggga

SEQ ID NO: 10351 - DNA, 1338 bp, Artificial Sequence
  Synthetic Polynucloetide
atggactggatttggcgcatccttttccttgtcggcgctgctaccggcgcgcattccttcgaagaggtgcagctggttgaatctggcggaggactggttcagcctggcggatctctgagactgtcttgtgccgccagcggctacaccttcaccagctattggctgcactgggtccgacaggcccctggcaaaggacttgagtgggtcggatatatcaggcccagcaccggctacacagagtacaaccagaagttcaaggaccgcttcaccatcagcgccgacaccagcaagaataccgcctacctccagatgaacagcctgagagccgaggacaccgccgtgtactactgtgccagatccagatggctgctggactattggggccagggcacactggttacagttagctctacgcgtatccagaaccctgatcctgccgtgtaccagctgcgggatagcaagagcagcgacaagagcgtgtgtctgttcaccgacttcgacagccagaccaacgtgtcccagagcaaggactccgacgtgtacatcaccgataagaccgtgctggacatgcggagcatggacttcaagagcaactccgccgtggcctggtccaacaagtccgatttcgcctgcgccaacgccttcaacaacagcattatccccgaggacacattcttcccaagccccgagagcagctgcgacgtgaagctggtggaaaagagcttcgagacagacaccaacctgaacttccagaacctgagcgtgatcggcttcagaatcctgctgctgaaagtggccggctttaacctgctgatgaccctgcggctgtggtccagccgcgccaagagaagcggatctggcgtgaagcagaccctgaatttcgacctgctgaagctggctggcgacgtggaatccaacccaggcccttctagaggccatatggccaagcctttgtctcaagaagaatccaccctcattgaaagagcaacggctacaatcaacagcatccccatctctgaagactacagcgtcgccagcgcagctctctctagcgacggccgcatcttcactggtgtcaatgtatatcattttactgggggaccttgtgcagaactcgtggtgctgggcactgctgctgctgcggcagctggcaacctgacttgtatcgtcgcgatcggaaatgagaacaggggcatcttgagcccctgcggacggtgccgacaggtgcttctcgatctgcatcctgggatcaaagccatagtgaaggacagtgatggacagccgacggcagttgggattcgtgaattgctgccctctggttatgtgtgggagggctga

SEQ ID NO: 10352 - DNA, 837 bp, Artificial Sequence
  Synthetic Polynucloetide
atggactggatttggcgcatccttttccttgtcggcgctgctaccggcgcgcattccttcgaagaggtgcagctggttgaatctggcggaggactggttcagcctggcggatctctgagactgtcttgtgccgccagcggctacaccttcaccagctattggctgcactgggtccgacaggcccctggcaaaggacttgagtgggtcggatatatcaggcccagcaccggctacacagagtacaaccagaagttcaaggaccgcttcaccatcagcgccgacaccagcaagaataccgcctacctccagatgaacagcctgagagccgaggacaccgccgtgtactactgtgccagatccagatggctgctggactattggggccagggcacactggttacagttagctctacgcgtatccagaaccctgatcctgccgtgtaccagctgcgggatagcaagagcagcgacaagagcgtgtgtctgttcaccgacttcgacagccagaccaacgtgtcccagagcaaggactccgacgtgtacatcaccgataagaccgtgctggacatgcggagcatggacttcaagagcaactccgccgtggcctggtccaacaagtccgatttcgcctgcgccaacgccttcaacaacagcattatccccgaggacacattcttcccaagccccgagagcagctgcgacgtgaagctggtggaaaagagcttcgagacagacaccaacctgaacttccagaacctgagcgtgatcggcttcagaatcctgctgctgaaagtggccggctttaacctgctgatgaccctgcggctgtggtccagc

SEQ ID NO: 10353 - DNA, 1689 bp, Artificial Sequence
  Synthetic Polynucloetide
atggccttaccagtgaccgccttgctcctgccgctggccttgctgctccacgccgccaggccggacattcagatgacacagagccctagcagcctgagcgcctctgtgggagacagagtgaccatcacatgcaagagcagccagagcctgctgtactccagcaatcagaagaactacctggcctggttccagcagaagcctggcaaggctcctaagctgctgatctactgggccagcaccagagaaagcggcgtgccaagcagattttctggcagcggctctggcaccgacttcaccctgacaatatccagcctccagcctgaggacttcgccacctacttttgccaccagtacctgagcagctacacattcggacagggcaccaaggtggaaatcaagcggctcgaggggaaaccaattcccaaccctcttctgggactggattcaaccggcagcggcgaggacctgaagaacgtgttcccacctgaggtggccgtgttcgagcctagcgaggccgagatcagccacacccagaaagccaccctcgtgtgcctggctaccggcttctaccccgaccatgtggaactgtcttggtgggtcaacggcaaagaggtgcacagcggcgtgtgtaccgacccccagccactgaaagaacagcccgccctgaacgacagccggtactgcctgagcagcagactgagagtgtccgccaccttctggcagaacccccggaaccacttcagatgccaggtgcagttctacggcctgagcgagaacgacgagtggacccaggacagagccaagcccgtgacccagatcgtgtctgccgaagcctggggcagagccgattgcggctttaccagcgagagctaccagcagggcgtgctgagcgccaccatcctgtacgagatcctgctgggcaaggccaccctgtacgccgtgctggtgtctgccctggtgctgatggctatggtcaagcggaaggacagccggggaagggccaagcgatctggatctggagcaacaaacttctcactactcaaacaagcaggtgacgtggaggagaatcccgggcctactagaggccatatgaccgagtacaagcccacggtgcgcctcgccacccgcgacgacgtccccagggccgtacgcaccctcgccgccgcgttcgccgactaccccgccacgcgccacaccgtcgatccggaccgccacatcgagcgggtcaccgagctgcaagaactcttcctcacgcgcgtcgggctcgacatcggcaaggtgtgggtcgcggacgacggcgccgcggtggcggtctggaccacgccggagagcgtcgaagcgggggcggtgttcgccgagatcggcccgcgcatggccgagttgagcggttcccggctggccgcgcagcaacagatggaaggcctcctggcgccgcaccggcccaaggagcccgcgtggttcctggccaccgtcggcgtctcgcccgaccaccagggcaagggtctgggcagcgccgtcgtgctccccggagtggaggcggccgagcgcgccggggtgcccgccttcctggagacctccgcgccccgcaacctccccttctacgagcggctcggcttcaccgtcaccgccgacgtcgaggtgcccgaaggaccgcgcacctggtgcatgacccgcaagcccggtgcctga

SEQ ID NO: 10354 - DNA, 999 bp, Artificial Sequence
  Synthetic Polynucloetide
atggccttaccagtgaccgccttgctcctgccgctggccttgctgctccacgccgccaggccggacattcagatgacacagagccctagcagcctgagcgcctctgtgggagacagagtgaccatcacatgcaagagcagccagagcctgctgtactccagcaatcagaagaactacctggcctggttccagcagaagcctggcaaggctcctaagctgctgatctactgggccagcaccagagaaagcggcgtgccaagcagattttctggcagcggctctggcaccgacttcaccctgacaatatccagcctccagcctgaggacttcgccacctacttttgccaccagtacctgagcagctacacattcggacagggcaccaaggtggaaatcaagcggctcgaggggaaaccaattcccaaccctcttctgggactggattcaaccggcagcggcgaggacctgaagaacgtgttcccacctgaggtggccgtgttcgagcctagcgaggccgagatcagccacacccagaaagccaccctcgtgtgcctggctaccggcttctaccccgaccatgtggaactgtcttggtgggtcaacggcaaagaggtgcacagcggcgtgtgtaccgacccccagccactgaaagaacagcccgccctgaacgacagccggtactgcctgagcagcagactgagagtgtccgccaccttctggcagaacccccggaaccacttcagatgccaggtgcagttctacggcctgagcgagaacgacgagtggacccaggacagagccaagcccgtgacccagatcgtgtctgccgaagcctggggcagagccgattgcggctttaccagcgagagctaccagcagggcgtgctgagcgccaccatcctgtacgagatcctgctgggcaaggccaccctgtacgccgtgctggtgtctgccctggtgctgatggctatggtcaagcggaaggacagccggggatga

SEQ ID NO: 10355 - DNA, 1374 bp, Artificial Sequence
  Synthetic Polynucloetide
atggactggatttggcgcatccttttccttgtcggcgctgctaccggcgcgcattccttcgaagaggtgcagctggttgaatctggcggaggactggttcagcctggcggatctctgagactgtcttgtgccgccagcggctacaccttcaccagctattggctgcactgggtccgacaggcccctggcaaaggacttgagtgggtcggatatatcaggcccagcaccggctacacagagtacaaccagaagttcaaggaccgcttcaccatcagcgccgacaccagcaagaataccgcctacctccagatgaacagcctgagagccgaggacaccgccgtgtactactgtgccagatccagatggctgctggactattggggccagggcacactggttacagttagctctacgcgtgagcagaaactgatctcggaagaggatgggagcggcatccagaaccctgatcctgccgtgtaccagctgcgggatagcaagagcagcgacaagagcgtgtgtctgttcaccgacttcgacagccagaccaacgtgtcccagagcaaggactccgacgtgtacatcaccgataagtgcgtgctggacatgcggagcatggacttcaagagcaactccgccgtggcctggtccaacaagtccgatttcgcctgcgccaacgccttcaacaacagcattatccccgaggacacattcttcccaagccccgagagcagctgcgacgtgaagctggtggaaaagagcttcgagacagacaccaacctgaacttccagaacctgagcgtgatcggcttcagaatcctgctgctgaaagtggccggctttaacctgctgatgaccctgcggctgtggtccagccgcgccaagagaagcggatctggcgtgaagcagaccctgaatttcgacctgctgaagctggctggcgacgtggaatccaacccaggcccttctagaggccatatggccaagcctttgtctcaagaagaatccaccctcattgaaagagcaacggctacaatcaacagcatccccatctctgaagactacagcgtcgccagcgcagctctctctagcgacggccgcatcttcactggtgtcaatgtatatcattttactgggggaccttgtgcagaactcgtggtgctgggcactgctgctgctgcggcagctggcaacctgacttgtatcgtcgcgatcggaaatgagaacaggggcatcttgagcccctgcggacggtgccgacaggtgcttctcgatctgcatcctgggatcaaagccatagtgaaggacagtgatggacagccgacggcagttgggattcgtgaattgctgccctctggttatgtgtgggagggctga

SEQ ID NO: 10356 - DNA, 876 bp, Artificial Sequence
  Synthetic Polynucloetide
atggactggatttggcgcatccttttccttgtcggcgctgctaccggcgcgcattccttcgaagaggtgcagctggttgaatctggcggaggactggttcagcctggcggatctctgagactgtcttgtgccgccagcggctacaccttcaccagctattggctgcactgggtccgacaggcccctggcaaaggacttgagtgggtcggatatatcaggcccagcaccggctacacagagtacaaccagaagttcaaggaccgcttcaccatcagcgccgacaccagcaagaataccgcctacctccagatgaacagcctgagagccgaggacaccgccgtgtactactgtgccagatccagatggctgctggactattggggccagggcacactggttacagttagctctacgcgtgagcagaaactgatctcggaagaggatgggagcggcatccagaaccctgatcctgccgtgtaccagctgcgggatagcaagagcagcgacaagagcgtgtgtctgttcaccgacttcgacagccagaccaacgtgtcccagagcaaggactccgacgtgtacatcaccgataagtgcgtgctggacatgcggagcatggacttcaagagcaactccgccgtggcctggtccaacaagtccgatttcgcctgcgccaacgccttcaacaacagcattatccccgaggacacattcttcccaagccccgagagcagctgcgacgtgaagctggtggaaaagagcttcgagacagacaccaacctgaacttccagaacctgagcgtgatcggcttcagaatcctgctgctgaaagtggccggctttaacctgctgatgaccctgcggctgtggtccagctga

SEQ ID NO: 10357 - DNA, 1932 bp, Artificial Sequence
  Synthetic Polynucloetide
atggccttaccagtgaccgccttgctcctgccgctggccttgctgctccacgccgccaggccggacattcagatgacacagagccctagcagcctgagcgcctctgtgggagacagagtgaccatcacatgcaagagcagccagagcctgctgtactccagcaatcagaagaactacctggcctggttccagcagaagcctggcaaggctcctaagctgctgatctactgggccagcaccagagaaagcggcgtgccaagcagattttctggcagcggctctggcaccgacttcaccctgacaatatccagcctccagcctgaggacttcgccacctacttttgccaccagtacctgagcagctacacattcggacagggcaccaaggtggaaatcaagcggggcggaggcggaagtggaggcggaggatctggcggcggaggctctgaggtgcagctggttgaatctggcggaggactggttcagcctggcggatctctgagactgtcttgtgccgccagcggctacaccttcaccagctattggctgcactgggtccgacaggcccctggcaaaggacttgagtgggtcggatatatcaggcccagcaccggctacacagagtacaaccagaagttcaaggaccgcttcaccatcagcgccgacaccagcaagaataccgcctacctccagatgaacagcctgagagccgaggacaccgccgtgtactactgtgccagatccagatggctgctggactattggggccagggcacactggttacagttagctctacgcgtgggagcggcatccagaaccctgatcctgccgtgtaccagctgcgggatagcaagagcagcgacaagagcgtgtgtctgttcaccgacttcgacagccagaccaacgtgtcccagagcaaggactccgacgtgtacatcaccgataagaccgtgctggacatgcggagcatggacttcaagagcaactccgccgtggcctggtccaacaagtccgatttcgcctgcgccaacgccttcaacaacagcattatccccgaggacacattcttcccaagcagcgacgtgccctgcgacgtgaagctggtggaaaagagcttcgagacagacaccaacctgaacttccagaacctgagcgtgatcggcttcagaatcctgctgctgaaagtggccggctttaacctgctgatgaccctgcggctgtggtccagccgcgccaagagaagcggatctggcgtgaagcagaccctgaatttcgacctgctgaagctggctggcgacgtggaatccaacccaggcccttctagaggccatatgaccgagtacaagcccacggtgcgcctcgccacccgcgacgacgtccccagggccgtacgcaccctcgccgccgcgttcgccgactaccccgccacgcgccacaccgtcgatccggaccgccacatcgagcgggtcaccgagctgcaagaactcttcctcacgcgcgtcgggctcgacatcggcaaggtgtgggtcgcggacgacggcgccgcggtggcggtctggaccacgccggagagcgtcgaagcgggggcggtgttcgccgagatcggcccgcgcatggccgagttgagcggttcccggctggccgcgcagcaacagatggaaggcctcctggcgccgcaccggcccaaggagcccgcgtggttcctggccaccgtcggcgtctcgcccgaccaccagggcaagggtctgggcagcgccgtcgtgctccccggagtggaggcggccgagcgcgccggggtgcccgccttcctggagacctccgcgccccgcaacctccccttctacgagcggctcggcttcaccgtcaccgccgacgtcgaggtgcccgaaggaccgcgcacctggtgcatgacccgcaagcccggtgcctga

SEQ ID NO: 10358 - DNA, 2028 bp, Artificial Sequence
  Synthetic Polynucloetide
atggccttaccagtgaccgccttgctcctgccgctggccttgctgctccacgccgccaggccggacattcagatgacacagagccctagcagcctgagcgcctctgtgggagacagagtgaccatcacatgcaagagcagccagagcctgctgtactccagcaatcagaagaactacctggcctggttccagcagaagcctggcaaggctcctaagctgctgatctactgggccagcaccagagaaagcggcgtgccaagcagattttctggcagcggctctggcaccgacttcaccctgacaatatccagcctccagcctgaggacttcgccacctacttttgccaccagtacctgagcagctacacattcggacagggcaccaaggtggaaatcaagcggggcggaggcggaagtggaggcggaggatctggcggcggaggctctgaggtgcagctggttgaatctggcggaggactggttcagcctggcggatctctgagactgtcttgtgccgccagcggctacaccttcaccagctattggctgcactgggtccgacaggcccctggcaaaggacttgagtgggtcggatatatcaggcccagcaccggctacacagagtacaaccagaagttcaaggaccgcttcaccatcagcgccgacaccagcaagaataccgcctacctccagatgaacagcctgagagccgaggacaccgccgtgtactactgtgccagatccagatggctgctggactattggggccagggcacactggttacagttagctctctcgaggacctgaagaacgtgttcccacctgaggtggccgtgttcgagcctagcaaggccgagatcgcccacacccagaaagccaccctcgtgtgcctggctaccggcttctaccccgaccatgtggaactgtcttggtgggtcaacggcaaagaggtgcacagcggcgtgtctaccgacccccagccactgaaagaacagcccgccctgaacgacagccggtactgcctgagcagcagactgagagtgtccgccaccttctggcagaacccccggaaccacttcagatgccaggtgcagttctacggcctgagcgagaacgacgagtggacccaggacagagccaagcccgtgacccagatcgtgtctgccgaagcctggggcagagccgattgcggcatcaccagcgccagctaccaccagggcgtgctgagcgccaccatcctgtacgagatcctgctgggcaaggccaccctgtacgccgtgctggtgtctgccctggtgctgatggctatggtcaagcggaaggacagccggggaagggccaagcgatctggatctggagcaacaaacttctcactactcaaacaagcaggtgacgtggaggagaatcccgggcctactagaggccatatgaccgagtacaagcccacggtgcgcctcgccacccgcgacgacgtccccagggccgtacgcaccctcgccgccgcgttcgccgactaccccgccacgcgccacaccgtcgatccggaccgccacatcgagcgggtcaccgagctgcaagaactcttcctcacgcgcgtcgggctcgacatcggcaaggtgtgggtcgcggacgacggcgccgcggtggcggtctggaccacgccggagagcgtcgaagcgggggcggtgttcgccgagatcggcccgcgcatggccgagttgagcggttcccggctggccgcgcagcaacagatggaaggcctcctggcgccgcaccggcccaaggagcccgcgtggttcctggccaccgtcggcgtctcgcccgaccaccagggcaagggtctgggcagcgccgtcgtgctccccggagtggaggcggccgagcgcgccggggtgcccgccttcctggagacctccgcgccccgcaacctccccttctacgagcggctcggcttcaccgtcaccgccgacgtcgaggtgcccgaaggaccgcgcacctggtgcatgacccgcaagcccggtgcctga

SEQ ID NO: 10359 - DNA, 2097 bp, Artificial Sequence
  Synthetic Polynucloetide
atggccttaccagtgaccgccttgctcctgccgctggccttgctgctccacgccgccaggccggacattcagatgacacagagccctagcagcctgagcgcctctgtgggagacagagtgaccatcacatgcaagagcagccagagcctgctgtactccagcaatcagaagaactacctggcctggttccagcagaagcctggcaaggctcctaagctgctgatctactgggccagcaccagagaaagcggcgtgccaagcagattttctggcagcggctctggcaccgacttcaccctgacaatatccagcctccagcctgaggacttcgccacctacttttgccaccagtacctgagcagctacacattcggacagggcaccaaggtggaaatcaagcggggcggaggcggaagtggaggcggaggatctggcggcggaggctctgaggtgcagctggttgaatctggcggaggactggttcagcctggcggatctctgagactgtcttgtgccgccagcggctacaccttcaccagctattggctgcactgggtccgacaggcccctggcaaaggacttgagtgggtcggatatatcaggcccagcaccggctacacagagtacaaccagaagttcaaggaccgcttcaccatcagcgccgacaccagcaagaataccgcctacctccagatgaacagcctgagagccgaggacaccgccgtgtactactgtgccagatccagatggctgctggactattggggccagggcacactggttacagttagctctacgcgtgggtctggaggcggaggcagcggcggaggcgggagcggcgacggtaacgaggagatgggaggaatcactcaaaccccttacaaagtctcaatttcaggaacaactgttatccttacatgtccccagtatcctggcagcgagatcctttggcagcataacgacaagaatatagggggagatgaagacgataagaatatcggatctgacgaggatcacttgagcctgaaagagttctccgagcttgaacaaagcggatattatgtgtgctatccgcgcgggtcaaagccggaagacgctaacttttacctttatctccgagccagagtgtgcgaaaattgcatggaaatggacgttatgtccgttgctacaatagttatcgtagatatatgcatcacgggtggactgcttctgctggtttattattggtccaagaatagaaaggccaaagctaaacccgtgaccagaggcgctggcgcaggcggaaggcaaaggggacaaaacaaagaacggccaccaccagtgccaaatccagattatgagcctattcggaaaggacagagggacctgtactctggcctgaatcagagaagaatccgcgccaagagaagcggatctggcgtgaagcagaccctgaatttcgacctgctgaagctggctggcgacgtggaatccaacccaggcccttctagaggccatatgaccgagtacaagcccacggtgcgcctcgccacccgcgacgacgtccccagggccgtacgcaccctcgccgccgcgttcgccgactaccccgccacgcgccacaccgtcgatccggaccgccacatcgagcgggtcaccgagctgcaagaactcttcctcacgcgcgtcgggctcgacatcggcaaggtgtgggtcgcggacgacggcgccgcggtggcggtctggaccacgccggagagcgtcgaagcgggggcggtgttcgccgagatcggcccgcgcatggccgagttgagcggttcccggctggccgcgcagcaacagatggaaggcctcctggcgccgcaccggcccaaggagcccgcgtggttcctggccaccgtcggcgtctcgcccgaccaccagggcaagggtctgggcagcgccgtcgtgctccccggagtggaggcggccgagcgcgccggggtgcccgccttcctggagacctccgcgccccgcaacctccccttctacgagcggctcggcttcaccgtcaccgccgacgtcgaggtgcccgaaggaccgcgcacctggtgcatgacccgcaagcccggtgcctga

SEQ ID NO: 10360 - DNA, 1992 bp, Artificial Sequence
  Synthetic Polynucloetide
atggccttaccagtgaccgccttgctcctgccgctggccttgctgctccacgccgccaggccggacattcagatgacacagagccctagcagcctgagcgcctctgtgggagacagagtgaccatcacatgcaagagcagccagagcctgctgtactccagcaatcagaagaactacctggcctggttccagcagaagcctggcaaggctcctaagctgctgatctactgggccagcaccagagaaagcggcgtgccaagcagattttctggcagcggctctggcaccgacttcaccctgacaatatccagcctccagcctgaggacttcgccacctacttttgccaccagtacctgagcagctacacattcggacagggcaccaaggtggaaatcaagcggggcggaggcggaagtggaggcggaggatctggcggcggaggctctgaggtgcagctggttgaatctggcggaggactggttcagcctggcggatctctgagactgtcttgtgccgccagcggctacaccttcaccagctattggctgcactgggtccgacaggcccctggcaaaggacttgagtgggtcggatatatcaggcccagcaccggctacacagagtacaaccagaagttcaaggaccgcttcaccatcagcgccgacaccagcaagaataccgcctacctccagatgaacagcctgagagccgaggacaccgccgtgtactactgtgccagatccagatggctgctggactattggggccagggcacactggttacagttagctctacgcgtgggtctggaggcggaggcagcggcggaggcgggagcggcttcaagatccccatcgaggaactggaagatcgggtgttcgtgaactgcaacacctctatcacctgggtggaaggcaccgtgggaacactgctgagcgacatcaccagactggacctcggcaagcggattctggaccctcggggcatctacagatgcaacggcaccgacatctacaaggacaaagaaagcaccgtgcaggtccactacagaatgtgccagtcctgcgtggaactggaccctgctacagtggccggcatcatcgtgaccgatgtgatcgctactctgctgctggctctgggagtgttctgcttcgccggacacgaaacaggcagactgtctggcgctgccgatacacaggccctgctgagaaacgaccaagtgtatcagcccctgcgcgacagagatgatgcccagtattctcacctcggcggcaactgggctagaaacaagcgcgccaagagaagcggatctggcgtgaagcagaccctgaatttcgacctgctgaagctggctggcgacgtggaatccaacccaggcccttctagaggccatatgaccgagtacaagcccacggtgcgcctcgccacccgcgacgacgtccccagggccgtacgcaccctcgccgccgcgttcgccgactaccccgccacgcgccacaccgtcgatccggaccgccacatcgagcgggtcaccgagctgcaagaactcttcctcacgcgcgtcgggctcgacatcggcaaggtgtgggtcgcggacgacggcgccgcggtggcggtctggaccacgccggagagcgtcgaagcgggggcggtgttcgccgagatcggcccgcgcatggccgagttgagcggttcccggctggccgcgcagcaacagatggaaggcctcctggcgccgcaccggcccaaggagcccgcgtggttcctggccaccgtcggcgtctcgcccgaccaccagggcaagggtctgggcagcgccgtcgtgctccccggagtggaggcggccgagcgcgccggggtgcccgccttcctggagacctccgcgccccgcaacctccccttctacgagcggctcggcttcaccgtcaccgccgacgtcgaggtgcccgaaggaccgcgcacctggtgcatgacccgcaagcccggtgcctga

SEQ ID NO: 10361 - DNA, 2022 bp, Artificial Sequence
  Synthetic Polynucloetide
atggccttaccagtgaccgccttgctcctgccgctggccttgctgctccacgccgccaggccggacattcagatgacacagagccctagcagcctgagcgcctctgtgggagacagagtgaccatcacatgcaagagcagccagagcctgctgtactccagcaatcagaagaactacctggcctggttccagcagaagcctggcaaggctcctaagctgctgatctactgggccagcaccagagaaagcggcgtgccaagcagattttctggcagcggctctggcaccgacttcaccctgacaatatccagcctccagcctgaggacttcgccacctacttttgccaccagtacctgagcagctacacattcggacagggcaccaaggtggaaatcaagcggggcggaggcggaagtggaggcggaggatctggcggcggaggctctgaggtgcagctggttgaatctggcggaggactggttcagcctggcggatctctgagactgtcttgtgccgccagcggctacaccttcaccagctattggctgcactgggtccgacaggcccctggcaaaggacttgagtgggtcggatatatcaggcccagcaccggctacacagagtacaaccagaagttcaaggaccgcttcaccatcagcgccgacaccagcaagaataccgcctacctccagatgaacagcctgagagccgaggacaccgccgtgtactactgtgccagatccagatggctgctggactattggggccagggcacactggttacagttagctctacgcgtgggtctggaggcggaggcagcggcggaggcgggagcggccagagcatcaagggcaaccacctggtcaaggtgtacgactaccaagaggacggcagcgtgctgctgacatgtgatgccgaggccaagaacatcacctggtttaaggacggcaagatgatcggcttcctgaccgaggacaagaagaagtggaacctgggcagcaacgctaaggaccccagaggcatgtatcagtgcaagggcagccagaacaagagcaagcccctccaggtgtactaccggatgtgccagaactgcatcgagctgaacgccgctaccatcagcggctttctgttcgccgagatcgtgtccatcttcgtgctggccgtgggcgtgtactttatcgctggacaggatggcgtgcggcagagcagagcttccgataagcaaaccctgctgcctaacgaccagctgtaccagcctctgaaggacagagaggacgaccagtacagccacctccagggcaatcagctgagaagaaaccgcgccaagagaagcggatctggcgtgaagcagaccctgaatttcgacctgctgaagctggctggcgacgtggaatccaacccaggcccttctagaggccatatgaccgagtacaagcccacggtgcgcctcgccacccgcgacgacgtccccagggccgtacgcaccctcgccgccgcgttcgccgactaccccgccacgcgccacaccgtcgatccggaccgccacatcgagcgggtcaccgagctgcaagaactcttcctcacgcgcgtcgggctcgacatcggcaaggtgtgggtcgcggacgacggcgccgcggtggcggtctggaccacgccggagagcgtcgaagcgggggcggtgttcgccgagatcggcccgcgcatggccgagttgagcggttcccggctggccgcgcagcaacagatggaaggcctcctggcgccgcaccggcccaaggagcccgcgtggttcctggccaccgtcggcgtctcgcccgaccaccagggcaagggtctgggcagcgccgtcgtgctccccggagtggaggcggccgagcgcgccggggtgcccgccttcctggagacctccgcgccccgcaacctccccttctacgagcggctcggcttcaccgtcaccgccgacgtcgaggtgcccgaaggaccgcgcacctggtgcatgacccgcaagcccggtgcctga

SEQ ID NO: 10362 - DNA, 1971 bp, Artificial Sequence
  Synthetic Polynucloetide
atggccttaccagtgaccgccttgctcctgccgctggccttgctgctccacgccgccaggccggacattcagatgacacagagccctagcagcctgagcgcctctgtgggagacagagtgaccatcacatgcaagagcagccagagcctgctgtactccagcaatcagaagaactacctggcctggttccagcagaagcctggcaaggctcctaagctgctgatctactgggccagcaccagagaaagcggcgtgccaagcagattttctggcagcggctctggcaccgacttcaccctgacaatatccagcctccagcctgaggacttcgccacctacttttgccaccagtacctgagcagctacacattcggacagggcaccaaggtggaaatcaagcggggcggaggcggaagtggaggcggaggatctggcggcggaggctctgaggtgcagctggttgaatctggcggaggactggttcagcctggcggatctctgagactgtcttgtgccgccagcggctacaccttcaccagctattggctgcactgggtccgacaggcccctggcaaaggacttgagtgggtcggatatatcaggcccagcaccggctacacagagtacaaccagaagttcaaggaccgcttcaccatcagcgccgacaccagcaagaataccgcctacctccagatgaacagcctgagagccgaggacaccgccgtgtactactgtgccagatccagatggctgctggactattggggccagggcacactggttacagttagctctacgcgtgggtctggaggcggaggcagcggcggaggcgggagcggccagagttttgggttgttggaccctaaattgtgctatctgttggacggaatcctgttcatttacggagtgatcctgaccgcattgttcctgcgggttaagttttccagatccgcagacgcacccgcttaccaacaagggcagaaccaactctacaatgaacttaatttggggcggagggaagagtacgacgttctggacaaaaggaggggacgagatcccgagatgggcggaaagcctcagcgaaggaagaatccgcaagaggggctttataacgaactccagaaagataaaatggcagaagcctatagtgagattgggatgaagggagaaaggaggaggggtaaaggtcacgatgggttgtaccaaggattgagcacagccactaaagatacctatgatgcgctccacatgcaggccctgccgccaagacgcgccaagagaagcggatctggcgtgaagcagaccctgaatttcgacctgctgaagctggctggcgacgtggaatccaacccaggcccttctagaggccatatgaccgagtacaagcccacggtgcgcctcgccacccgcgacgacgtccccagggccgtacgcaccctcgccgccgcgttcgccgactaccccgccacgcgccacaccgtcgatccggaccgccacatcgagcgggtcaccgagctgcaagaactcttcctcacgcgcgtcgggctcgacatcggcaaggtgtgggtcgcggacgacggcgccgcggtggcggtctggaccacgccggagagcgtcgaagcgggggcggtgttcgccgagatcggcccgcgcatggccgagttgagcggttcccggctggccgcgcagcaacagatggaaggcctcctggcgccgcaccggcccaaggagcccgcgtggttcctggccaccgtcggcgtctcgcccgaccaccagggcaagggtctgggcagcgccgtcgtgctccccggagtggaggcggccgagcgcgccggggtgcccgccttcctggagacctccgcgccccgcaacctccccttctacgagcggctcggcttcaccgtcaccgccgacgtcgaggtgcccgaaggaccgcgcacctggtgcatgacccgcaagcccggtgcctga

SEQ ID NO: 10363 - DNA, 2271 bp, Artificial Sequence
  Synthetic Polynucloetide
atggccttaccagtgaccgccttgctcctgccgctggccttgctgctccacgccgccaggccggaagtgcagctggttgaatctggcggaggactggttcagcctggcggatctctgagactgtcttgtgccgccagcggcttcagcttcagcgacttttggatgagctgggtccgacaggcccctggcaaaggacttgaatgggtcgccacaatcagccaggccggcagcgagaaggactacgtggactctgtgaagggcagattcaccatcagccgggacaacgccaagaagtccctgtacctccagatgaacagcctgagagccgaggacaccgccgtgtactattgtgcctctggcgtgtacagcttcgactacagaggccagggcaccctggtcacagtctcttctggtaccggcggaggcggatctggcggcggaggtagcggtggcggaggatctgaattcgacattcagatgacacagagccctagcagcctgagcgcctctgtgggagacagagtgaccatcacatgcaagagcagccagagcctgctgtactccagcaatcagaagaactacctggcctggttccagcagaagcctggcaaggctcctaagctgctgatctactgggccagcaccagagaaagcggcgtgccaagcagattttctggcagcggctctggcaccgacttcaccctgacaatatccagcctccagcctgaggacttcgccacctacttttgccaccagtacctgagcagctacacattcggacagggcaccaaggtggaaatcaagcggctcgaggacctgaagaacgtgttcccacctgaggtggccgtgttcgagcctagcgaggccgagatcagccacacccagaaagccaccctcgtgtgcctggctaccggcttctaccccgaccatgtggaactgtcttggtgggtcaacggcaaagaggtgcacagcggcgtgtgtaccgacccccagccactgaaagaacagcccgccctgaacgacagccggtactgcctgagcagcagactgagagtgtccgccaccttctggcagaacccccggaaccacttcagatgccaggtgcagttctacggcctgagcgagaacgacgagtggacccaggacagagccaagcccgtgacccagatcgtgtctgccgaagcctggggcagagccgattgcggctttaccagcgagagctaccagcagggcgtgctgagcgccaccatcctgtacgagatcctgctgggcaaggccaccctgtacgccgtgctggtgtctgccctggtgctgatggctatggtcaagcggaaggacagccggggaagggccaagcgatctggatctggagcaacaaacttctcactactcaaacaagcaggtgacgtggaggagaatcccgggcctactagtatggactggatttggcgcatccttttccttgtcggcgctgctaccggcgcgcattccttcgaagaggtgcagctggttgaatctggcggaggactggttcagcctggcggatctctgagactgtcttgtgccgccagcggctacaccttcaccagctattggctgcactgggtccgacaggcccctggcaaaggacttgagtgggtcggatatatcaggcccagcaccggctacacagagtacaaccagaagttcaaggaccgcttcaccatcagcgccgacaccagcaagaataccgcctacctccagatgaacagcctgagagccgaggacaccgccgtgtactactgtgccagatccagatggctgctggactattggggccagggcacactggttacagttagctctacgcgtatccagaaccctgatcctgccgtgtaccagctgcgggatagcaagagcagcgacaagagcgtgtgtctgttcaccgacttcgacagccagaccaacgtgtcccagagcaaggactccgacgtgtacatcaccgataagtgcgtgctggacatgcggagcatggacttcaagagcaactccgccgtggcctggtccaacaagtccgatttcgcctgcgccaacgccttcaacaacagcattatccccgaggacacattcttcccaagccccgagagcagctgcgacgtgaagctggtggaaaagagcttcgagacagacaccaacctgaacttccagaacctgagcgtgatcggcttcagaatcctgctgctgaaagtggccggctttaacctgctgatgaccctgcggctgtggtccagc

SEQ ID NO: 10364 - DNA, 2283 bp, Artificial Sequence
  Synthetic Polynucloetide
atggccttaccagtgaccgccttgctcctgccgctggccttgctgctccacgccgccaggccggaagtgcagctggttgaatctggcggaggactggttcagcctggcggatctctgagactgtcttgtgccgccagcggcttcagcttcagcgacttttggatgagctgggtccgacaggcccctggcaaaggacttgaatgggtcgccacaatcagccaggccggcagcgagaaggactacgtggactctgtgaagggcagattcaccatcagccgggacaacgccaagaagtccctgtacctccagatgaacagcctgagagccgaggacaccgccgtgtactattgtgcctctggcgtgtacagcttcgactacagaggccagggcaccctggtcacagtctcttctggtaccggcggaggcggatctggcggcggaggtagcggtggcggaggatctgaattcgacattcagatgacacagagccctagcagcctgagcgcctctgtgggagacagagtgaccatcacatgcaagagcagccagagcctgctgtactccagcaatcagaagaactacctggcctggttccagcagaagcctggcaaggctcctaagctgctgatctactgggccagcaccagagaaagcggcgtgccaagcagattttctggcagcggctctggcaccgacttcaccctgacaatatccagcctccagcctgaggacttcgccacctacttttgccaccagtacctgagcagctacacattcggacagggcaccaaggtggaaatcaagcggctcgagatccagaaccctgatcctgccgtgtaccagctgcgggatagcaagagcagcgacaagagcgtgtgtctgttcaccgacttcgacagccagaccaacgtgtcccagagcaaggactccgacgtgtacatcaccgataagtgcgtgctggacatgcggagcatggacttcaagagcaactccgccgtggcctggtccaacaagtccgatttcgcctgcgccaacgccttcaacaacagcattatccccgaggacacattcttcccaagccccgagagcagctgcgacgtgaagctggtggaaaagagcttcgagacagacaccaacctgaacttccagaacctgagcgtgatcggcttcagaatcctgctgctgaaagtggccggctttaacctgctgatgaccctgcggctgtggtccagccgcgccaagagaagcggatctggcgtgaagcagaccctgaatttcgacctgctgaagctggctggcgacgtggaatccaacccaggccctactagtatggactggatttggcgcatccttttccttgtcggcgctgctaccggcgcgcattccttcgaagaggtgcagctggttgaatctggcggaggactggttcagcctggcggatctctgagactgtcttgtgccgccagcggctacaccttcaccagctattggctgcactgggtccgacaggcccctggcaaaggacttgagtgggtcggatatatcaggcccagcaccggctacacagagtacaaccagaagttcaaggaccgcttcaccatcagcgccgacaccagcaagaataccgcctacctccagatgaacagcctgagagccgaggacaccgccgtgtactactgtgccagatccagatggctgctggactattggggccagggcacactggttacagttagctctacgcgtgaggacctgaagaacgtgttcccacctgaggtggccgtgttcgagcctagcgaggccgagatcagccacacccagaaagccaccctcgtgtgcctggctaccggcttctaccccgaccatgtggaactgtcttggtgggtcaacggcaaagaggtgcacagcggcgtgtgtaccgacccccagccactgaaagaacagcccgccctgaacgacagccggtactgcctgagcagcagactgagagtgtccgccaccttctggcagaacccccggaaccacttcagatgccaggtgcagttctacggcctgagcgagaacgacgagtggacccaggacagagccaagcccgtgacccagatcgtgtctgccgaagcctggggcagagccgattgcggctttaccagcgagagctaccagcagggcgtgctgagcgccaccatcctgtacgagatcctgctgggcaaggccaccctgtacgccgtgctggtgtctgccctggtgctgatggctatggtcaagcggaaggacagccgggga

SEQ ID NO: 10365 - DNA, 2859 bp, Artificial Sequence
  Synthetic Polynucloetide
atggccttaccagtgaccgccttgctcctgccgctggccttgctgctccacgccgccaggccggaagtgcagctggttgaatctggcggaggactggttcagcctggcggatctctgagactgtcttgtgccgccagcggcttcagcttcagcgacttttggatgagctgggtccgacaggcccctggcaaaggacttgaatgggtcgccacaatcagccaggccggcagcgagaaggactacgtggactctgtgaagggcagattcaccatcagccgggacaacgccaagaagtccctgtacctccagatgaacagcctgagagccgaggacaccgccgtgtactattgtgcctctggcgtgtacagcttcgactacagaggccagggcaccctggtcacagtctcttctggtaccggcggaggcggatctggcggcggaggtagcggtggcggaggatctgaattcgacattcagatgacacagagccctagcagcctgagcgcctctgtgggagacagagtgaccatcacatgcaagagcagccagagcctgctgtactccagcaatcagaagaactacctggcctggttccagcagaagcctggcaaggctcctaagctgctgatctactgggccagcaccagagaaagcggcgtgccaagcagattttctggcagcggctctggcaccgacttcaccctgacaatatccagcctccagcctgaggacttcgccacctacttttgccaccagtacctgagcagctacacattcggacagggcaccaaggtggaaatcaagcggctcgaggacctgaagaacgtgttcccacctgaggtggccgtgttcgagcctagcgaggccgagatcagccacacccagaaagccaccctcgtgtgcctggctaccggcttctaccccgaccatgtggaactgtcttggtgggtcaacggcaaagaggtgcacagcggcgtgtctaccgacccccagccactgaaagaacagcccgccctgaacgacagccggtactgcctgagcagcagactgagagtgtccgccaccttctggcagaacccccggaaccacttcagatgccaggtgcagttctacggcctgagcgagaacgacgagtggacccaggacagagccaagcccgtgacccagatcgtgtctgccgaagcctggggcagagccgattgcggatcccagagcttcggcctgctggaccccaagctgtgctacctgctggatggcatcctgttcatctacggcgtgatcctgaccgccctgttcctgagagtgaagttcagcagaagcgccgacgcccctgcctaccagcagggacagaaccaactgtacaacgagctgaacctgggcagacgggaagagtacgacgtgctggacaagcggagaggcagggaccctgagatgggcggaaagccccagcggagaaagaacccccaggaaggactgtataacgaactccagaaagacaagatggccgaagcctacagcgagatcggcatgaagggcgagcggagaagaggcaagggccacgatggcctgtaccagggcctgagcaccgccaccaaggacacctatgacgccctgcacatgcaggccctgcctccaagaagggccaagcgatctggatctggagcaacaaacttctcactactcaaacaagcaggtgacgtggaggagaatcccgggcctactagtatggactggatttggcgcatccttttccttgtcggcgctgctaccggcgcgcattccttcgaagaggtgcagctggttgaatctggcggaggactggttcagcctggcggatctctgagactgtcttgtgccgccagcggctacaccttcaccagctattggctgcactgggtccgacaggcccctggcaaaggacttgagtgggtcggatatatcaggcccagcaccggctacacagagtacaaccagaagttcaaggaccgcttcaccatcagcgccgacaccagcaagaataccgcctacctccagatgaacagcctgagagccgaggacaccgccgtgtactactgtgccagatccagatggctgctggactattggggccagggcacactggttacagttagctctacgcgtatccagaaccctgatcctgccgtgtaccagctgcgggatagcaagagcagcgacaagagcgtgtgtctgttcaccgacttcgacagccagaccaacgtgtcccagagcaaggactccgacgtgtacatcaccgataagaccgtgctggacatgcggagcatggacttcaagagcaactccgccgtggcctggtccaacaagtccgatttcgcctgcgccaacgccttcaacaacagcattatccccgaggacacattcttcccaagccccgagagcagctgcggtacccagagttttgggttgttggaccctaaattgtgctatctgttggacggaatcctgttcatttacggagtgatcctgaccgcattgttcctgcgggttaagttttccagatccgcagacgcacccgcttaccaacaagggcagaaccaactctacaatgaacttaatttggggcggagggaagagtacgacgttctggacaaaaggaggggacgagatcccgagatgggcggaaagcctcagcgaaggaagaatccgcaagaggggctttataacgaactccagaaagataaaatggcagaagcctatagtgagattgggatgaagggagaaaggaggaggggtaaaggtcacgatgggttgtaccaaggattgagcacagccactaaagatacctatgatgcgctccacatgcaggccctgccgccaaga

SEQ ID NO: 10366 - DNA, 2349 bp, Artificial Sequence
  Synthetic Polynucloetide
atggccttaccagtgaccgccttgctcctgccgctggccttgctgctccacgccgccaggccggaagtgcagctggttgaatctggcggaggactggttcagcctggcggatctctgagactgtcttgtgccgccagcggcttcagcttcagcgacttttggatgagctgggtccgacaggcccctggcaaaggacttgaatgggtcgccacaatcagccaggccggcagcgagaaggactacgtggactctgtgaagggcagattcaccatcagccgggacaacgccaagaagtccctgtacctccagatgaacagcctgagagccgaggacaccgccgtgtactattgtgcctctggcgtgtacagcttcgactacagaggccagggcaccctggtcacagtctcttctggtaccggcggaggcggatctggcggcggaggtagcggtggcggaggatctgaattcgacattcagatgacacagagccctagcagcctgagcgcctctgtgggagacagagtgaccatcacatgcaagagcagccagagcctgctgtactccagcaatcagaagaactacctggcctggttccagcagaagcctggcaaggctcctaagctgctgatctactgggccagcaccagagaaagcggcgtgccaagcagattttctggcagcggctctggcaccgacttcaccctgacaatatccagcctccagcctgaggacttcgccacctacttttgccaccagtacctgagcagctacacattcggacagggcaccaaggtggaaatcaagcggctcgagggacagcctaaggccaatcctaccgtgacactgttccctccaagcagcgaagaactccaggccaacaaggccacacttgtgtgcctgatctccgacttctaccctggggctgtgacagtggcttggaaggccgatggatctcctgtgaaagccggcgtggaaaccaccaagccatccaagcagagcaacaacaaatacgccgccagctcctacctgagcctgacacctgagcagtggaagtcccacagatcctacagctgccaagtgacccacgaaggcagcaccgtggaaaagacagtggcccctacagagtgcagccccatcaagaccgatgtgattacaatggaccccaaggacaactgctccaaggacgccaacgataccctgctgctccagctgaccaacaccagcgcctactacatgtacttgttgctgctgctgaagtccgtggtgtacttcgccatcatcacatgctgcctgctgcggagaaccgccttctgctgcaacggcgagaagtctagggccaagcgatctggatctggagcaacaaacttctcactactcaaacaagcaggtgacgtggaggagaatcccgggcctactagtatggactggatttggcgcatccttttccttgtcggcgctgctaccggcgcgcattccttcgaagaggtgcagctggttgaatctggcggaggactggttcagcctggcggatctctgagactgtcttgtgccgccagcggctacaccttcaccagctattggctgcactgggtccgacaggcccctggcaaaggacttgagtgggtcggatatatcaggcccagcaccggctacacagagtacaaccagaagttcaaggaccgcttcaccatcagcgccgacaccagcaagaataccgcctacctccagatgaacagcctgagagccgaggacaccgccgtgtactactgtgccagatccagatggctgctggactattggggccagggcacactggttacagttagctctacgcgtgcctctacaaagggaccctccgtgtttcctctggctcccagcagcaagtctacaagcggaggaacagccgctctgggctgcctggtcaaggattactttcccgagcctgtgaccgtgtcctggaatagcggagcactgacaagcggcgtgcacacctttccagccgtgctgcaaagcagcggcctgtactctctgagcagcgtggtcacagtgcctagctctagcctgggcacccagacctacatctgcaatgtgaaccacaagcctagcaacaccaaggtggacaagagagtggaacccaagagctgtgaagtgaaaaccgactccaccgaccacgtgaagcccaaagagacagagaacaccaagcagcccagcaagagctgccacaagcccaaggccatcgtgcacaccgagaaagtgaacatgatgagcctgaccgtgctgggcctgcggatgctgttcgccaaaaccgtggccgtgaacttcctgctgaccgccaagctgttcttcctc

SEQ ID NO: 10367 - DNA, 2292 bp, Artificial Sequence
  Synthetic Polynucloetide
atggccttaccagtgaccgccttgctcctgccgctggccttgctgctccacgccgccaggccggaagtgcagctggttgaatctggcggaggactggttcagcctggcggatctctgagactgtcttgtgccgccagcggcttcagcttcagcgacttttggatgagctgggtccgacaggcccctggcaaaggacttgaatgggtcgccacaatcagccaggccggcagcgagaaggactacgtggactctgtgaagggcagattcaccatcagccgggacaacgccaagaagtccctgtacctccagatgaacagcctgagagccgaggacaccgccgtgtactattgtgcctctggcgtgtacagcttcgactacagaggccagggcaccctggtcacagtctcttctggtaccggcggaggcggatctggcggcggaggtagcggtggcggaggatctgaattcgacattcagatgacacagagccctagcagcctgagcgcctctgtgggagacagagtgaccatcacatgcaagagcagccagagcctgctgtactccagcaatcagaagaactacctggcctggttccagcagaagcctggcaaggctcctaagctgctgatctactgggccagcaccagagaaagcggcgtgccaagcagattttctggcagcggctctggcaccgacttcaccctgacaatatccagcctccagcctgaggacttcgccacctacttttgccaccagtacctgagcagctacacattcggacagggcaccaaggtggaaatcaagcggctcgagggacagcctaaggccaatcctaccgtgacactgttccctccaagcagcgaagaactccaggccaacaaggccacacttgtgtgcctgatctccgacttctaccctggggctgtgacagtggcttggaaggccgatggatctcctgtgaaagccggcgtggaaaccaccaagccatccaagcagagcaacaacaaatacgccgccagctcctacctgagcctgacacctgagcagtggaagtcccacagatcctacagctgccaagtgacccacgaaggcagcaccgtggaaaagacagtggcccctacagagtgcagcggcagagccgattgcggctttaccagcgagagctaccagcagggcgtgctgagcgccaccatcctgtacgagatcctgctgggcaaggccaccctgtacgccgtgctggtgtctgccctggtgctgatggctatggtcaagcggaaggacagccggggacgcgccaagagaagcggatctggcgtgaagcagaccctgaatttcgacctgctgaagctggctggcgacgtggaatccaacccaggccctactagtatggactggatttggcgcatccttttccttgtcggcgctgctaccggcgcgcattccttcgaagaggtgcagctggttgaatctggcggaggactggttcagcctggcggatctctgagactgtcttgtgccgccagcggctacaccttcaccagctattggctgcactgggtccgacaggcccctggcaaaggacttgagtgggtcggatatatcaggcccagcaccggctacacagagtacaaccagaagttcaaggaccgcttcaccatcagcgccgacaccagcaagaataccgcctacctccagatgaacagcctgagagccgaggacaccgccgtgtactactgtgccagatccagatggctgctggactattggggccagggcacactggttacagttagctctacgcgtgcctctacaaagggaccctccgtgtttcctctggctcccagcagcaagtctacaagcggaggaacagccgctctgggctgcctggtcaaggattactttcccgagcctgtgaccgtgtcctggaatagcggagcactgacaagcggcgtgcacacctttccagccgtgctgcaaagcagcggcctgtactctctgagcagcgtggtcacagtgcctagctctagcctgggcacccagacctacatctgcaatgtgaaccacaagcctagcaacaccaaggtggacaagagagtggaacccaagagctgtatccccgaggacacattcttcccaagccccgagagcagctgcgacgtgaagctggtggaaaagagcttcgagacagacaccaacctgaacttccagaacctgagcgtgatcggcttcagaatcctgctgctgaaagtggccggctttaacctgctgatgaccctgcggctgtggtccagc

SEQ ID NO: 10368 - DNA, 2694 bp, Artificial Sequence
  Synthetic Polynucloetide
atggccttaccagtgaccgccttgctcctgccgctggccttgctgctccacgccgccaggccggaagtgcagctggttgaatctggcggaggactggttcagcctggcggatctctgagactgtcttgtgccgccagcggcttcagcttcagcgacttttggatgagctgggtccgacaggcccctggcaaaggacttgaatgggtcgccacaatcagccaggccggcagcgagaaggactacgtggactctgtgaagggcagattcaccatcagccgggacaacgccaagaagtccctgtacctccagatgaacagcctgagagccgaggacaccgccgtgtactattgtgcctctggcgtgtacagcttcgactacagaggccagggcaccctggtcacagtctcttctggtaccggcggaggcggatctggcggcggaggtagcggtggcggaggatctgaattcgacattcagatgacacagagccctagcagcctgagcgcctctgtgggagacagagtgaccatcacatgcaagagcagccagagcctgctgtactccagcaatcagaagaactacctggcctggttccagcagaagcctggcaaggctcctaagctgctgatctactgggccagcaccagagaaagcggcgtgccaagcagattttctggcagcggctctggcaccgacttcaccctgacaatatccagcctccagcctgaggacttcgccacctacttttgccaccagtacctgagcagctacacattcggacagggcaccaaggtggaaatcaagcggctcgagatccagaaccctgatcctgccgtgtaccagctgcgggatagcaagagcagcgacaagagcgtgtgtctgttcaccgacttcgacagccagaccaacgtgtcccagagcaaggactccgacgtgtacatcaccgataagtgcgtgctggacatgcggagcatggacttcaagagcaactccgccgtggcctggtccaacaagtccgatttcgcctgcgccaacgccttcaacaacagcattatccccgaggacacattcttcccaagccccgagagcagctgcgacgtgaagctggtggaaaagagcttcgagacagacaccaacctgaacttccagaacctgagcgtgatcggcttcagaatcctgctgctgaaagtggccggctttaacctgctgatgaccctgcggctgtggtccagccgcgccaagagaagcggatctggcgtgaagcagaccctgaatttcgacctgctgaagctggctggcgacgtggaatccaacccaggccctactagtatggactggatttggcgcatccttttccttgtcggcgctgctaccggcgcgcattccgggccccagctccagctgcaagagtctggacctggcctggtcaagcctagcgagacactgagcctgacctgtaccgtgtccggcgatagcatcagcagcggcgattactactggggctggatcagacagcctcctggcaaaggactggaatggatcggccacatctactacagcggcgtgacctactacaaccccagcctgaagtccagagtgaccatcagcgtggacaccagccggaaccagttctccctgaagctgtctagcgtgacagccgccgataccgccgtgtactactgcaccagagaggacagcagcaactggcggagtagaggccagggaacactggtcacagttagctctggatccggcggaggcggaagtggaggcggaggatctggcggcggaggctctttcgaagaggtgcagctggttgaatctggcggaggactggttcagcctggcggatctctgagactgtcttgtgccgccagcggctacaccttcaccagctattggctgcactgggtccgacaggcccctggcaaaggacttgagtgggtcggatatatcaggcccagcaccggctacacagagtacaaccagaagttcaaggaccgcttcaccatcagcgccgacaccagcaagaataccgcctacctccagatgaacagcctgagagccgaggacaccgccgtgtactactgtgccagatccagatggctgctggactattggggccagggcacactggttacagttagctctacgcgtgaggacctgaagaacgtgttcccacctgaggtggccgtgttcgagcctagcgaggccgagatcagccacacccagaaagccaccctcgtgtgcctggctaccggcttctaccccgaccatgtggaactgtcttggtgggtcaacggcaaagaggtgcacagcggcgtgtgtaccgacccccagccactgaaagaacagcccgccctgaacgacagccggtactgcctgagcagcagactgagagtgtccgccaccttctggcagaacccccggaaccacttcagatgccaggtgcagttctacggcctgagcgagaacgacgagtggacccaggacagagccaagcccgtgacccagatcgtgtctgccgaagcctggggcagagccgattgcggctttaccagcgagagctaccagcagggcgtgctgagcgccaccatcctgtacgagatcctgctgggcaaggccaccctgtacgccgtgctggtgtctgccctggtgctgatggctatggtcaagcggaaggacagccgggga

SEQ ID NO: 10369 - DNA, 3270 bp, Artificial Sequence
  Synthetic Polynucloetide
atggccttaccagtgaccgccttgctcctgccgctggccttgctgctccacgccgccaggccggaagtgcagctggttgaatctggcggaggactggttcagcctggcggatctctgagactgtcttgtgccgccagcggcttcagcttcagcgacttttggatgagctgggtccgacaggcccctggcaaaggacttgaatgggtcgccacaatcagccaggccggcagcgagaaggactacgtggactctgtgaagggcagattcaccatcagccgggacaacgccaagaagtccctgtacctccagatgaacagcctgagagccgaggacaccgccgtgtactattgtgcctctggcgtgtacagcttcgactacagaggccagggcaccctggtcacagtctcttctggtaccggcggaggcggatctggcggcggaggtagcggtggcggaggatctgaattcgacattcagatgacacagagccctagcagcctgagcgcctctgtgggagacagagtgaccatcacatgcaagagcagccagagcctgctgtactccagcaatcagaagaactacctggcctggttccagcagaagcctggcaaggctcctaagctgctgatctactgggccagcaccagagaaagcggcgtgccaagcagattttctggcagcggctctggcaccgacttcaccctgacaatatccagcctccagcctgaggacttcgccacctacttttgccaccagtacctgagcagctacacattcggacagggcaccaaggtggaaatcaagcggctcgaggacctgaagaacgtgttcccacctgaggtggccgtgttcgagcctagcgaggccgagatcagccacacccagaaagccaccctcgtgtgcctggctaccggcttctaccccgaccatgtggaactgtcttggtgggtcaacggcaaagaggtgcacagcggcgtgtctaccgacccccagccactgaaagaacagcccgccctgaacgacagccggtactgcctgagcagcagactgagagtgtccgccaccttctggcagaacccccggaaccacttcagatgccaggtgcagttctacggcctgagcgagaacgacgagtggacccaggacagagccaagcccgtgacccagatcgtgtctgccgaagcctggggcagagccgattgcggatcccagagcttcggcctgctggaccccaagctgtgctacctgctggatggcatcctgttcatctacggcgtgatcctgaccgccctgttcctgagagtgaagttcagcagaagcgccgacgcccctgcctaccagcagggacagaaccaactgtacaacgagctgaacctgggcagacgggaagagtacgacgtgctggacaagcggagaggcagggaccctgagatgggcggaaagccccagcggagaaagaacccccaggaaggactgtataacgaactccagaaagacaagatggccgaagcctacagcgagatcggcatgaagggcgagcggagaagaggcaagggccacgatggcctgtaccagggcctgagcaccgccaccaaggacacctatgacgccctgcacatgcaggccctgcctccaagaagggccaagcgatctggatctggagcaacaaacttctcactactcaaacaagcaggtgacgtggaggagaatcccgggcctactagtatggactggatttggcgcatccttttccttgtcggcgctgctaccggcgcgcattccgggccccagctccagctgcaagagtctggacctggcctggtcaagcctagcgagacactgagcctgacctgtaccgtgtccggcgatagcatcagcagcggcgattactactggggctggatcagacagcctcctggcaaaggactggaatggatcggccacatctactacagcggcgtgacctactacaaccccagcctgaagtccagagtgaccatcagcgtggacaccagccggaaccagttctccctgaagctgtctagcgtgacagccgccgataccgccgtgtactactgcaccagagaggacagcagcaactggcggagtagaggccagggaacactggtcacagttagctctggatccggcggaggcggaagtggaggcggaggatctggcggcggaggctctttcgaagaggtgcagctggttgaatctggcggaggactggttcagcctggcggatctctgagactgtcttgtgccgccagcggctacaccttcaccagctattggctgcactgggtccgacaggcccctggcaaaggacttgagtgggtcggatatatcaggcccagcaccggctacacagagtacaaccagaagttcaaggaccgcttcaccatcagcgccgacaccagcaagaataccgcctacctccagatgaacagcctgagagccgaggacaccgccgtgtactactgtgccagatccagatggctgctggactattggggccagggcacactggttacagttagctctacgcgtatccagaaccctgatcctgccgtgtaccagctgcgggatagcaagagcagcgacaagagcgtgtgtctgttcaccgacttcgacagccagaccaacgtgtcccagagcaaggactccgacgtgtacatcaccgataagaccgtgctggacatgcggagcatggacttcaagagcaactccgccgtggcctggtccaacaagtccgatttcgcctgcgccaacgccttcaacaacagcattatccccgaggacacattcttcccaagccccgagagcagctgcggtacccagagttttgggttgttggaccctaaattgtgctatctgttggacggaatcctgttcatttacggagtgatcctgaccgcattgttcctgcgggttaagttttccagatccgcagacgcacccgcttaccaacaagggcagaaccaactctacaatgaacttaatttggggcggagggaagagtacgacgttctggacaaaaggaggggacgagatcccgagatgggcggaaagcctcagcgaaggaagaatccgcaagaggggctttataacgaactccagaaagataaaatggcagaagcctatagtgagattgggatgaagggagaaaggaggaggggtaaaggtcacgatgggttgtaccaaggattgagcacagccactaaagatacctatgatgcgctccacatgcaggccctgccgccaaga

SEQ ID NO: 10370 - DNA, 2760 bp, Artificial Sequence
  Synthetic Polynucloetide
atggccttaccagtgaccgccttgctcctgccgctggccttgctgctccacgccgccaggccggaagtgcagctggttgaatctggcggaggactggttcagcctggcggatctctgagactgtcttgtgccgccagcggcttcagcttcagcgacttttggatgagctgggtccgacaggcccctggcaaaggacttgaatgggtcgccacaatcagccaggccggcagcgagaaggactacgtggactctgtgaagggcagattcaccatcagccgggacaacgccaagaagtccctgtacctccagatgaacagcctgagagccgaggacaccgccgtgtactattgtgcctctggcgtgtacagcttcgactacagaggccagggcaccctggtcacagtctcttctggtaccggcggaggcggatctggcggcggaggtagcggtggcggaggatctgaattcgacattcagatgacacagagccctagcagcctgagcgcctctgtgggagacagagtgaccatcacatgcaagagcagccagagcctgctgtactccagcaatcagaagaactacctggcctggttccagcagaagcctggcaaggctcctaagctgctgatctactgggccagcaccagagaaagcggcgtgccaagcagattttctggcagcggctctggcaccgacttcaccctgacaatatccagcctccagcctgaggacttcgccacctacttttgccaccagtacctgagcagctacacattcggacagggcaccaaggtggaaatcaagcggctcgagggacagcctaaggccaatcctaccgtgacactgttccctccaagcagcgaagaactccaggccaacaaggccacacttgtgtgcctgatctccgacttctaccctggggctgtgacagtggcttggaaggccgatggatctcctgtgaaagccggcgtggaaaccaccaagccatccaagcagagcaacaacaaatacgccgccagctcctacctgagcctgacacctgagcagtggaagtcccacagatcctacagctgccaagtgacccacgaaggcagcaccgtggaaaagacagtggcccctacagagtgcagccccatcaagaccgatgtgattacaatggaccccaaggacaactgctccaaggacgccaacgataccctgctgctccagctgaccaacaccagcgcctactacatgtacttgttgctgctgctgaagtccgtggtgtacttcgccatcatcacatgctgcctgctgcggagaaccgccttctgctgcaacggcgagaagtctagggccaagcgatctggatctggagcaacaaacttctcactactcaaacaagcaggtgacgtggaggagaatcccgggcctactagtatggactggatttggcgcatccttttccttgtcggcgctgctaccggcgcgcattccgggccccagctccagctgcaagagtctggacctggcctggtcaagcctagcgagacactgagcctgacctgtaccgtgtccggcgatagcatcagcagcggcgattactactggggctggatcagacagcctcctggcaaaggactggaatggatcggccacatctactacagcggcgtgacctactacaaccccagcctgaagtccagagtgaccatcagcgtggacaccagccggaaccagttctccctgaagctgtctagcgtgacagccgccgataccgccgtgtactactgcaccagagaggacagcagcaactggcggagtagaggccagggaacactggtcacagttagctctggatccggcggaggcggaagtggaggcggaggatctggcggcggaggctctttcgaagaggtgcagctggttgaatctggcggaggactggttcagcctggcggatctctgagactgtcttgtgccgccagcggctacaccttcaccagctattggctgcactgggtccgacaggcccctggcaaaggacttgagtgggtcggatatatcaggcccagcaccggctacacagagtacaaccagaagttcaaggaccgcttcaccatcagcgccgacaccagcaagaataccgcctacctccagatgaacagcctgagagccgaggacaccgccgtgtactactgtgccagatccagatggctgctggactattggggccagggcacactggttacagttagctctacgcgtgcctctacaaagggaccctccgtgtttcctctggctcccagcagcaagtctacaagcggaggaacagccgctctgggctgcctggtcaaggattactttcccgagcctgtgaccgtgtcctggaatagcggagcactgacaagcggcgtgcacacctttccagccgtgctgcaaagcagcggcctgtactctctgagcagcgtggtcacagtgcctagctctagcctgggcacccagacctacatctgcaatgtgaaccacaagcctagcaacaccaaggtggacaagagagtggaacccaagagctgtgaagtgaaaaccgactccaccgaccacgtgaagcccaaagagacagagaacaccaagcagcccagcaagagctgccacaagcccaaggccatcgtgcacaccgagaaagtgaacatgatgagcctgaccgtgctgggcctgcggatgctgttcgccaaaaccgtggccgtgaacttcctgctgaccgccaagctgttcttcctc

SEQ ID NO: 10371 - DNA, 2703 bp, Artificial Sequence
  Synthetic Polynucloetide
atggccttaccagtgaccgccttgctcctgccgctggccttgctgctccacgccgccaggccggaagtgcagctggttgaatctggcggaggactggttcagcctggcggatctctgagactgtcttgtgccgccagcggcttcagcttcagcgacttttggatgagctgggtccgacaggcccctggcaaaggacttgaatgggtcgccacaatcagccaggccggcagcgagaaggactacgtggactctgtgaagggcagattcaccatcagccgggacaacgccaagaagtccctgtacctccagatgaacagcctgagagccgaggacaccgccgtgtactattgtgcctctggcgtgtacagcttcgactacagaggccagggcaccctggtcacagtctcttctggtaccggcggaggcggatctggcggcggaggtagcggtggcggaggatctgaattcgacattcagatgacacagagccctagcagcctgagcgcctctgtgggagacagagtgaccatcacatgcaagagcagccagagcctgctgtactccagcaatcagaagaactacctggcctggttccagcagaagcctggcaaggctcctaagctgctgatctactgggccagcaccagagaaagcggcgtgccaagcagattttctggcagcggctctggcaccgacttcaccctgacaatatccagcctccagcctgaggacttcgccacctacttttgccaccagtacctgagcagctacacattcggacagggcaccaaggtggaaatcaagcggctcgagggacagcctaaggccaatcctaccgtgacactgttccctccaagcagcgaagaactccaggccaacaaggccacacttgtgtgcctgatctccgacttctaccctggggctgtgacagtggcttggaaggccgatggatctcctgtgaaagccggcgtggaaaccaccaagccatccaagcagagcaacaacaaatacgccgccagctcctacctgagcctgacacctgagcagtggaagtcccacagatcctacagctgccaagtgacccacgaaggcagcaccgtggaaaagacagtggcccctacagagtgcagcggcagagccgattgcggctttaccagcgagagctaccagcagggcgtgctgagcgccaccatcctgtacgagatcctgctgggcaaggccaccctgtacgccgtgctggtgtctgccctggtgctgatggctatggtcaagcggaaggacagccggggacgcgccaagagaagcggatctggcgtgaagcagaccctgaatttcgacctgctgaagctggctggcgacgtggaatccaacccaggccctactagtatggactggatttggcgcatccttttccttgtcggcgctgctaccggcgcgcattccgggccccagctccagctgcaagagtctggacctggcctggtcaagcctagcgagacactgagcctgacctgtaccgtgtccggcgatagcatcagcagcggcgattactactggggctggatcagacagcctcctggcaaaggactggaatggatcggccacatctactacagcggcgtgacctactacaaccccagcctgaagtccagagtgaccatcagcgtggacaccagccggaaccagttctccctgaagctgtctagcgtgacagccgccgataccgccgtgtactactgcaccagagaggacagcagcaactggcggagtagaggccagggaacactggtcacagttagctctggatccggcggaggcggaagtggaggcggaggatctggcggcggaggctctttcgaagaggtgcagctggttgaatctggcggaggactggttcagcctggcggatctctgagactgtcttgtgccgccagcggctacaccttcaccagctattggctgcactgggtccgacaggcccctggcaaaggacttgagtgggtcggatatatcaggcccagcaccggctacacagagtacaaccagaagttcaaggaccgcttcaccatcagcgccgacaccagcaagaataccgcctacctccagatgaacagcctgagagccgaggacaccgccgtgtactactgtgccagatccagatggctgctggactattggggccagggcacactggttacagttagctctacgcgtgcctctacaaagggaccctccgtgtttcctctggctcccagcagcaagtctacaagcggaggaacagccgctctgggctgcctggtcaaggattactttcccgagcctgtgaccgtgtcctggaatagcggagcactgacaagcggcgtgcacacctttccagccgtgctgcaaagcagcggcctgtactctctgagcagcgtggtcacagtgcctagctctagcctgggcacccagacctacatctgcaatgtgaaccacaagcctagcaacaccaaggtggacaagagagtggaacccaagagctgtatccccgaggacacattcttcccaagccccgagagcagctgcgacgtgaagctggtggaaaagagcttcgagacagacaccaacctgaacttccagaacctgagcgtgatcggcttcagaatcctgctgctgaaagtggccggctttaacctgctgatgaccctgcggctgtggtccagc

SEQ ID NO: 10372 - DNA, 2274 bp, Artificial Sequence
  Synthetic Polynucloetide
atggccttaccagtgaccgccttgctcctgccgctggccttgctgctccacgccgccaggccggaagtgcaggttttggagtctggcggaggactggttcagcctggcggatctctgagactgtcttgtgccgccagcggcttcaccttcagcaactttgccatgagctgggtccgacaggcccctggcaaaggacttgaatgggtgtccacaatcagcggcagcgccggcacaacagattacgccgattctgtgaagggcagattcaccatcagccgggacaacagcaagaaaaccctgtacctccagatgaacagcctgcgcgtggaagataccgccgtgtactactgtgccgatggcagaggccccttcttcgattatcgcggccagggcacactggtcaccgtttcttctggtaccggcggaggcggatctggcggcggaggtagcggtggcggaggatctgaattcgacattcagatgacacagagccctagcagcctgagcgcctctgtgggagacagagtgaccatcacatgcaagagcagccagagcctgctgtactccagcaatcagaagaactacctggcctggttccagcagaagcctggcaaggctcctaagctgctgatctactgggccagcaccagagaaagcggcgtgccaagcagattttctggcagcggctctggcaccgacttcaccctgacaatatccagcctccagcctgaggacttcgccacctacttttgccaccagtacctgagcagctacacattcggacagggcaccaaggtggaaatcaagcggctcgaggacctgaagaacgtgttcccacctgaggtggccgtgttcgagcctagcgaggccgagatcagccacacccagaaagccaccctcgtgtgcctggctaccggcttctaccccgaccatgtggaactgtcttggtgggtcaacggcaaagaggtgcacagcggcgtgtgtaccgacccccagccactgaaagaacagcccgccctgaacgacagccggtactgcctgagcagcagactgagagtgtccgccaccttctggcagaacccccggaaccacttcagatgccaggtgcagttctacggcctgagcgagaacgacgagtggacccaggacagagccaagcccgtgacccagatcgtgtctgccgaagcctggggcagagccgattgcggctttaccagcgagagctaccagcagggcgtgctgagcgccaccatcctgtacgagatcctgctgggcaaggccaccctgtacgccgtgctggtgtctgccctggtgctgatggctatggtcaagcggaaggacagccggggaagggccaagcgatctggatctggagcaacaaacttctcactactcaaacaagcaggtgacgtggaggagaatcccgggcctactagtatggactggatttggcgcatccttttccttgtcggcgctgctaccggcgcgcattccttcgaagaggtgcagctggttgaatctggcggaggactggttcagcctggcggatctctgagactgtcttgtgccgccagcggctacaccttcaccagctattggctgcactgggtccgacaggcccctggcaaaggacttgagtgggtcggatatatcaggcccagcaccggctacacagagtacaaccagaagttcaaggaccgcttcaccatcagcgccgacaccagcaagaataccgcctacctccagatgaacagcctgagagccgaggacaccgccgtgtactactgtgccagatccagatggctgctggactattggggccagggcacactggttacagttagctctacgcgtatccagaaccctgatcctgccgtgtaccagctgcgggatagcaagagcagcgacaagagcgtgtgtctgttcaccgacttcgacagccagaccaacgtgtcccagagcaaggactccgacgtgtacatcaccgataagtgcgtgctggacatgcggagcatggacttcaagagcaactccgccgtggcctggtccaacaagtccgatttcgcctgcgccaacgccttcaacaacagcattatccccgaggacacattcttcccaagccccgagagcagctgcgacgtgaagctggtggaaaagagcttcgagacagacaccaacctgaacttccagaacctgagcgtgatcggcttcagaatcctgctgctgaaagtggccggctttaacctgctgatgaccctgcggctgtggtccagc

SEQ ID NO: 10373 - DNA, 2277 bp, Artificial Sequence
  Synthetic Polynucloetide
atggccttaccagtgaccgccttgctcctgccgctggccttgctgctccacgccgccaggccggacattcagatgacacagagccctagcagcctgagcgcctctgtgggagacagagtgaccatcacatgcaagagcagccagagcctgctgtactccagcaatcagaagaactacctggcctggttccagcagaagcctggcaaggctcctaagctgctgatctactgggccagcaccagagaaagcggcgtgccaagcagattttctggcagcggctctggcaccgacttcaccctgacaatatccagcctccagcctgaggacttcgccacctacttttgccaccagtacctgagcagctacacattcggacagggcaccaaggtggaaatcaagcggctcgaggacctgaagaacgtgttcccacctgaggtggccgtgttcgagcctagcgaggccgagatcagccacacccagaaagccaccctcgtgtgcctggctaccggcttctaccccgaccatgtggaactgtcttggtgggtcaacggcaaagaggtgcacagcggcgtgtgtaccgacccccagccactgaaagaacagcccgccctgaacgacagccggtactgcctgagcagcagactgagagtgtccgccaccttctggcagaacccccggaaccacttcagatgccaggtgcagttctacggcctgagcgagaacgacgagtggacccaggacagagccaagcccgtgacccagatcgtgtctgccgaagcctggggcagagccgattgcggctttaccagcgagagctaccagcagggcgtgctgagcgccaccatcctgtacgagatcctgctgggcaaggccaccctgtacgccgtgctggtgtctgccctggtgctgatggctatggtcaagcggaaggacagccggggaagggccaagcgatctggatctggagcaacaaacttctcactactcaaacaagcaggtgacgtggaggagaatcccgggcctactagtatggactggatttggcgcatccttttccttgtcggcgctgctaccggcgcccattccgggcccgaagtgcagctggttgaatctggcggaggactggttcaggctggcggatctctgagactgtcttgtgccgccagcggcagaacctttagcatgggctggtttagacaggcccctggcaaagagagagagttcgtcgccgccatcacatactctggcggcagcccttactacgccgactctgtgaagggcagattcaccatcagccgggacaacgccaagaacaccgtgtacctccagatgaacagcctgaagcctgaggacaccgccgtgtactactgcgccgccaatccaacatacggcagcgactggaacgccgagaattggggccagggaacccaagtgacagtgtctagcggatccggcggcggaggatctggcggaggcggatctgggggcggaggctctttcgaagaggtgcagctggttgaatctggcggaggactggttcagcctggcggatctctgagactgtcttgtgccgccagcggctacaccttcaccagctattggctgcactgggtccgacaggcccctggcaaaggacttgagtgggtcggatatatcaggcccagcaccggctacacagagtacaaccagaagttcaaggaccgcttcaccatcagcgccgacaccagcaagaataccgcctacctccagatgaacagcctgagagccgaggacaccgccgtgtactactgtgccagatccagatggctgctggactattggggccagggcacactggttacagttagctctacgcgtatccagaaccctgatcctgccgtgtaccagctgcgggatagcaagagcagcgacaagagcgtgtgtctgttcaccgacttcgacagccagaccaacgtgtcccagagcaaggactccgacgtgtacatcaccgataagtgcgtgctggacatgcggagcatggacttcaagagcaactccgccgtggcctggtccaacaagtccgatttcgcctgcgccaacgccttcaacaacagcattatccccgaggacacattcttcccaagccccgagagcagctgcgacgtgaagctggtggaaaagagcttcgagacagacaccaacctgaacttccagaacctgagcgtgatcggcttcagaatcctgctgctgaaagtggccggctttaacctgctgatgaccctgcggctgtggtccagc

SEQ ID NO: 10374 - DNA, 2658 bp, Artificial Sequence
  Synthetic Polynucloetide
atggccttaccagtgaccgccttgctcctgccgctggccttgctgctccacgccgccaggccggacattcagatgacacagagccctagcagcctgagcgcctctgtgggagacagagtgaccatcacatgcaagagcagccagagcctgctgtactccagcaatcagaagaactacctggcctggttccagcagaagcctggcaaggctcctaagctgctgatctactgggccagcaccagagaaagcggcgtgccaagcagattttctggcagcggctctggcaccgacttcaccctgacaatatccagcctccagcctgaggacttcgccacctacttttgccaccagtacctgagcagctacacattcggacagggcaccaaggtggaaatcaagcggctcgaggacctgaagaacgtgttcccacctgaggtggccgtgttcgagcctagcgaggccgagatcagccacacccagaaagccaccctcgtgtgcctggctaccggcttctaccccgaccatgtggaactgtcttggtgggtcaacggcaaagaggtgcacagcggcgtgtgtaccgacccccagccactgaaagaacagcccgccctgaacgacagccggtactgcctgagcagcagactgagagtgtccgccaccttctggcagaacccccggaaccacttcagatgccaggtgcagttctacggcctgagcgagaacgacgagtggacccaggacagagccaagcccgtgacccagatcgtgtctgccgaagcctggggcagagccgattgcggctttaccagcgagagctaccagcagggcgtgctgagcgccaccatcctgtacgagatcctgctgggcaaggccaccctgtacgccgtgctggtgtctgccctggtgctgatggctatggtcaagcggaaggacagccggggaagggccaagcgatctggatctggagcaacaaacttctcactactcaaacaagcaggtgacgtggaggagaatcccgggcctactagtatggactggatttggcgcatccttttccttgtcggcgctgctaccggcgcccattcccaactgcaactgcaagagtctggccctggcctggtcaagccttctgaaaccctgagcctgacctgtaccgtgtccggcggctctatcagcagcggcgattactactggggctggatcagacagcctccaggcaagggactcgaatggatcggcagcatcagctacagcggctccacctactacaacccaagcctgaagtccagagtgaccatcagcgtggacaccagcagaaaccagttctccctgaagctgagcagcgtgacagccgccgatacagccgtgtattattgcaccagagaggacagcagcaactggcggagtagaggacagggcacactggtcacagtgtcctcttctggaggcggtggaagcggtggaggaggatctgaagtgcagctggttgaatctggcggaggactggttcaggctggcggatctctgagactgtcttgtgccgccagcggcagaacctttagcatgggctggtttagacaggcccctggcaaagagagagagttcgtcgccgccatcacatactctggcggcagcccttactacgccgactctgtgaagggcagattcaccatcagccgggacaacgccaagaacaccgtgtacctccagatgaacagcctgaagcctgaggacaccgccgtgtactactgcgccgccaatccaacatacggcagcgactggaacgccgagaattggggccagggaacccaagtgacagtgtctagcggatccggcggcggaggatctggcggaggcggatctgggggcggaggctctttcgaagaggtgcagctggttgaatctggcggaggactggttcagcctggcggatctctgagactgtcttgtgccgccagcggctacaccttcaccagctattggctgcactgggtccgacaggcccctggcaaaggacttgagtgggtcggatatatcaggcccagcaccggctacacagagtacaaccagaagttcaaggaccgcttcaccatcagcgccgacaccagcaagaataccgcctacctccagatgaacagcctgagagccgaggacaccgccgtgtactactgtgccagatccagatggctgctggactattggggccagggcacactggttacagttagctctacgcgtatccagaaccctgatcctgccgtgtaccagctgcgggatagcaagagcagcgacaagagcgtgtgtctgttcaccgacttcgacagccagaccaacgtgtcccagagcaaggactccgacgtgtacatcaccgataagtgcgtgctggacatgcggagcatggacttcaagagcaactccgccgtggcctggtccaacaagtccgatttcgcctgcgccaacgccttcaacaacagcattatccccgaggacacattcttcccaagccccgagagcagctgcgacgtgaagctggtggaaaagagcttcgagacagacaccaacctgaacttccagaacctgagcgtgatcggcttcagaatcctgctgctgaaagtggccggctttaacctgctgatgaccctgcggctgtggtccagc

SEQ ID NO: 10375 - DNA, 2685 bp, Artificial Sequence
  Synthetic Polynucloetide
atggccttaccagtgaccgccttgctcctgccgctggccttgctgctccacgccgccaggccggaagtgcaggttttggagtctggcggaggactggttcagcctggcggatctctgagactgtcttgtgccgccagcggcttcaccttcagcaactttgccatgagctgggtccgacaggcccctggcaaaggacttgaatgggtgtccacaatcagcggcagcgccggcacaacagattacgccgattctgtgaagggcagattcaccatcagccgggacaacagcaagaaaaccctgtacctccagatgaacagcctgcgcgtggaagataccgccgtgtactactgtgccgatggcagaggccccttcttcgattatcgcggccagggcacactggtcaccgtttcttctggtaccggcggaggcggatctggcggcggaggtagcggtggcggaggatctgaattcgacattcagatgacacagagccctagcagcctgagcgcctctgtgggagacagagtgaccatcacatgcaagagcagccagagcctgctgtactccagcaatcagaagaactacctggcctggttccagcagaagcctggcaaggctcctaagctgctgatctactgggccagcaccagagaaagcggcgtgccaagcagattttctggcagcggctctggcaccgacttcaccctgacaatatccagcctccagcctgaggacttcgccacctacttttgccaccagtacctgagcagctacacattcggacagggcaccaaggtggaaatcaagcggctcgaggacctgaagaacgtgttcccacctgaggtggccgtgttcgagcctagcgaggccgagatcagccacacccagaaagccaccctcgtgtgcctggctaccggcttctaccccgaccatgtggaactgtcttggtgggtcaacggcaaagaggtgcacagcggcgtgtgtaccgacccccagccactgaaagaacagcccgccctgaacgacagccggtactgcctgagcagcagactgagagtgtccgccaccttctggcagaacccccggaaccacttcagatgccaggtgcagttctacggcctgagcgagaacgacgagtggacccaggacagagccaagcccgtgacccagatcgtgtctgccgaagcctggggcagagccgattgcggctttaccagcgagagctaccagcagggcgtgctgagcgccaccatcctgtacgagatcctgctgggcaaggccaccctgtacgccgtgctggtgtctgccctggtgctgatggctatggtcaagcggaaggacagccggggaagggccaagcgatctggatctggagcaacaaacttctcactactcaaacaagcaggtgacgtggaggagaatcccgggcctactagtatggactggatttggcgcatccttttccttgtcggcgctgctaccggcgcccattccgggcccgaagtgcagctggttgaatctggcggaggactggttcaggctggcggatctctgagactgtcttgtgccgccagcggcagaacctttagcatgggctggtttagacaggcccctggcaaagagagagagttcgtcgccgccatcacatacagcggcggcagcccttactacgcctcttctgtcagaggccggttcaccatcagccgggacaacgccaagaacaccgtgtacctccagatgaacagcctgaagccagaggacaccgccgtgtactactgtgccgccaatccaacctacggcagcgactggaatgccgagaattggggccagggcacccaagtgacagtgtctagtggatccggcggcggaggatctggcggaggcggatctgggggcggaggctctttcgaagaggtgcagctggttgaatctggcggaggactggttcagcctggcggatctctgagactgtcttgtgccgccagcggctacaccttcaccagctattggctgcactgggtccgacaggcccctggcaaaggacttgagtgggtcggatatatcaggcccagcaccggctacacagagtacaaccagaagttcaaggaccgcttcaccatcagcgccgacaccagcaagaataccgcctacctccagatgaacagcctgagagccgaggacaccgccgtgtactactgtgccagatccagatggctgctggactattggggccagggcacactggttacagttagctctacgcgtatccagaaccctgatcctgccgtgtaccagctgcgggatagcaagagcagcgacaagagcgtgtgtctgttcaccgacttcgacagccagaccaacgtgtcccagagcaaggactccgacgtgtacatcaccgataagtgcgtgctggacatgcggagcatggacttcaagagcaactccgccgtggcctggtccaacaagtccgatttcgcctgcgccaacgccttcaacaacagcattatccccgaggacacattcttcccaagccccgagagcagctgcgacgtgaagctggtggaaaagagcttcgagacagacaccaacctgaacttccagaacctgagcgtgatcggcttcagaatcctgctgctgaaagtggccggctttaacctgctgatgaccctgcggctgtggtccagc

SEQ ID NO: 10376 - DNA, 2178 bp, Artificial Sequence
  Synthetic Polynucloetide
atggccttaccagtgaccgccttgctcctgccgctggccttgctgctccacgccgccaggccggacattcagatgacacagagccctagcagcctgagcgcctctgtgggagacagagtgaccatcacatgcaagagcagccagagcgtgctgtactccagcaatcagaagaactacctggcctggttccagcagaagcctggcaaggctcctaagctgctgatctactgggccagcaccagagaaagcggcgtgccaagcagattttctggcagcggctctggcaccgacttcaccctgacaatatccagcctccagcctgaggacttcgccacctacttttgccaccagtacctgagcagctacacattcggacagggcaccaaggtggaaatcaagcggggcggaggcggaagtggaggcggaggatctggcggcggaggctctgaggtgcagctggttgaatctggcggaggactggttcagcctggcggatctctgagactgtcttgtgccgccagcggcttcaccttcaccacctattggatgcactgggtccgacaggcccctggcaaaggacttgagtgggtcggatatatcaggcccagcaccggctacacagagtacaaccagaagttcaaggaccgcttcaccatcagcgccgacaccagcaagaataccgcctacctccagatgaacagcctgagagccgaggacaccgccgtgtactactgtgccagatccagatggctgctggactattggggccagggcacactggttacagtttctacgcgtgagcagaaactgatctcggaagaggatctggcgaagcccaccacgacgccagcgccgcgaccaccaacaccggcgcccaccatcgcgtcgcagcccctgtccctgcgcccagaggcgtgccggccagcggcggggggcgcagtgcacacgagggggctggacttcgcctgtgacatctacatctgggcgcccttggccgggacttgtggggtccttctcctgtcactggttatcaccctttactgcaaacggggcagaaagaaactcctgtatatattcaaacaaccatttatgagaccagtacaaactactcaagaggaagatggctgtagctgccgatttccagaagaagaagaaggaggatgtgaactgagagtgaagttcagcaggagcgcagacgcccccgcgtaccagcagggccagaaccagctctataacgagctgaatctaggacgaagagaggagtacgatgttttggacaagagacgtggccgggaccctgagatggggggaaagccgagaaggaagaaccctcaggaaggcctgtacaatgaactgcagaaagataagatggcggaggcctacagtgagattgggatgaaaggcgagcgccggaggggcaaggggcacgatggcctttaccagggtctcagtacagccaccaaggacacctacgacgcccttcacatgcaggccctgccccctcgctctagtggctccggcgagggcagaggaagtctactaacctgcggagatgtggaagaaaatcctggcccacatatgaccgagtacaagcccacggtgcgcctcgccacccgcgacgacgtccccagggccgtacgcaccctcgccgccgcgttcgccgactaccccgccacgcgccacaccgtcgatccggaccgccacatcgagcgggtcaccgagctgcaagaactcttcctcacgcgcgtcgggctcgacatcggcaaggtgtgggtcgcggacgacggcgccgcggtggcggtctggaccacgccggagagcgtcgaagcgggggcggtgttcgccgagatcggcccgcgcatggccgagttgagcggttcccggctggccgcgcagcaacagatggaaggcctcctggcgccgcaccggcccaaggagcccgcgtggttcctggccaccgtcggcgtctcgcccgaccaccagggcaagggtctgggcagcgccgtcgtgctccccggagtggaggcggccgagcgcgccggggtgcccgccttcctggagacctccgcgccccgcaacctccccttctacgagcggctcggcttcaccgtcaccgccgacgtcgaggtgcccgaaggaccgcgcacctggtgcatgacccgcaagcccggtgcctga

SEQ ID NO: 10377 - DNA, 2160 bp, Artificial Sequence
  Synthetic Polynucloetide
atggccttaccagtgaccgccttgctcctgccgctggccttgctgctccacgccgccaggccggacattcagatgacacagagccctagcagcctgagcgcctctgtgggagacagagtgaccatcacatgcaagagcagccagagcgtgctgtactccagcaatcagaagaactacctggcctggttccagcagaagcctggcaaggctcctaagctgctgatctactgggccagcaccagagaaagcggcgtgccaagcagattttctggcagcggctctggcaccgacttcaccctgacaatatccagcctccagcctgaggacttcgccacctacttttgccaccagtacctgagcagctacacattcggacagggcaccaaggtggaaatcaagcggggcggaggcggaagtggaggcggaggatctggcggcggaggctctgaggtgcagctggttgaatctggcggaggactggttcagcctggcggatctctgagactgtcttgtgccgccagcggcttcaccttcaccacctattggatgcactgggtccgacaggcccctggcaaaggacttgagtgggtcggatatatcaggcccagcaccggctacacagagtacaaccagaagttcaaggaccgcttcaccatcagcgccgacaccagcaagaataccgcctacctccagatgaacagcctgagagccgaggacaccgccgtgtactactgtgccagatccagatggctgctggactattggggccagggcacactggttacagtttctacgcgtgagcagaaactgatctcggaagaggatctgaaaattgaagttatgtatcctcctccttacctagacaatgagaagagcaatggaaccattatccatgtgaaagggaaacacctttgtccaagtcccctatttcccggaccttctaagcccttttgggtgctggtggtggttgggggagtcctggcttgctatagcttgctagtaacagtggcctttattattttctgggtgaggagtaagaggagcaggctcctgcacagtgactacatgaacatgactccacgccgccccggacccacccgcaagcattaccagccctatgccccaccacgcgacttcgcagcctatcgctccagagtgaagttcagcaggagcgcagacgcccccgcgtaccagcagggccagaaccagctctataacgagctcaatctaggacgaagagaggagtacgatgttttggacaagagacgtggccgggaccctgagatggggggaaagccgagaaggaagaaccctcaggaaggcctgtacaatgaactgcagaaagataagatggcggaggcctacagtgagattgggatgaaaggcgagcgccggaggggcaaggggcacgatggcctttaccagggtctcagtacagccaccaaggacacctacgacgcccttcacatgcaggccctgccccctcgctctagtggctccggcgagggcagaggaagtctactaacctgcggagatgtggaagaaaatcctggcccacatatgaccgagtacaagcccacggtgcgcctcgccacccgcgacgacgtccccagggccgtacgcaccctcgccgccgcgttcgccgactaccccgccacgcgccacaccgtcgatccggaccgccacatcgagcgggtcaccgagctgcaagaactcttcctcacgcgcgtcgggctcgacatcggcaaggtgtgggtcgcggacgacggcgccgcggtggcggtctggaccacgccggagagcgtcgaagcgggggcggtgttcgccgagatcggcccgcgcatggccgagttgagcggttcccggctggccgcgcagcaacagatggaaggcctcctggcgccgcaccggcccaaggagcccgcgtggttcctggccaccgtcggcgtctcgcccgaccaccagggcaagggtctgggcagcgccgtcgtgctccccggagtggaggcggccgagcgcgccggggtgcccgccttcctggagacctccgcgccccgcaacctccccttctacgagcggctcggcttcaccgtcaccgccgacgtcgaggtgcccgaaggaccgcgcacctggtgcatgacccgcaagcccggtgcctga

SEQ ID NO: 10378 - DNA, 1488 bp, Artificial Sequence
  Synthetic Polynucloetide
atggccttaccagtgaccgccttgctcctgccgctggccttgctgctccacgccgccaggccggacattcagatgacacagagccctagcagcctgagcgcctctgtgggagacagagtgaccatcacatgcaagagcagccagagcgtgctgtactccagcaatcagaagaactacctggcctggttccagcagaagcctggcaaggctcctaagctgctgatctactgggccagcaccagagaaagcggcgtgccaagcagattttctggcagcggctctggcaccgacttcaccctgacaatatccagcctccagcctgaggacttcgccacctacttttgccaccagtacctgagcagctacacattcggacagggcaccaaggtggaaatcaagcggggcggaggcggaagtggaggcggaggatctggcggcggaggctctgaggtgcagctggttgaatctggcggaggactggttcagcctggcggatctctgagactgtcttgtgccgccagcggcttcaccttcaccacctattggatgcactgggtccgacaggcccctggcaaaggacttgagtgggtcggatatatcaggcccagcaccggctacacagagtacaaccagaagttcaaggaccgcttcaccatcagcgccgacaccagcaagaataccgcctacctccagatgaacagcctgagagccgaggacaccgccgtgtactactgtgccagatccagatggctgctggactattggggccagggcacactggttacagtttctacgcgtgagcagaaactgatctcggaagaggatctgaaaattgaagttatgtatcctcctccttacctagacaatgagaagagcaatggaaccattatccatgtgaaagggaaacacctttgtccaagtcccctatttcccggaccttctaagcccttttgggtgctggtggtggttgggggagtcctggcttgctatagcttgctagtaacagtggcctttattattttctgggtgaggagtaagaggagcaggctcctgcacagtgactacatgaacatgactccacgccgccccggacccacccgcaagcattaccagccctatgccccaccacgcgacttcgcagcctatcgctccagagtgaagttcagcaggagcgcagacgcccccgcgtaccagcagggccagaaccagctctataacgagctcaatctaggacgaagagaggagtacgatgttttggacaagagacgtggccgggaccctgagatggggggaaagccgagaaggaagaaccctcaggaaggcctgtacaatgaactgcagaaagataagatggcggaggcctacagtgagattgggatgaaaggcgagcgccggaggggcaaggggcacgatggcctttaccagggtctcagtacagccaccaaggacacctacgacgcccttcacatgcaggccctgccccctcgc

SEQ ID NO: 10379 - DNA, 1509 bp, Artificial Sequence
  Synthetic Polynucloetide
atggccttaccagtgaccgccttgctcctgccgctggccttgctgctccacgccgccaggccggacattcagatgacacagagccctagcagcctgagcgcctctgtgggagacagagtgaccatcacatgcaagagcagccagagcgtgctgtactccagcaatcagaagaactacctggcctggttccagcagaagcctggcaaggctcctaagctgctgatctactgggccagcaccagagaaagcggcgtgccaagcagattttctggcagcggctctggcaccgacttcaccctgacaatatccagcctccagcctgaggacttcgccacctacttttgccaccagtacctgagcagctacacattcggacagggcaccaaggtggaaatcaagcggggcggaggcggaagtggaggcggaggatctggcggcggaggctctgaggtgcagctggttgaatctggcggaggactggttcagcctggcggatctctgagactgtcttgtgccgccagcggcttcaccttcaccacctattggatgcactgggtccgacaggcccctggcaaaggacttgagtgggtcggatatatcaggcccagcaccggctacacagagtacaaccagaagttcaaggaccgcttcaccatcagcgccgacaccagcaagaataccgcctacctccagatgaacagcctgagagccgaggacaccgccgtgtactactgtgccagatccagatggctgctggactattggggccagggcacactggttacagtttctacgcgtgagcagaaactgatctcggaagaggatctggcgaagcccaccacgacgccagcgccgcgaccaccaacaccggcgcccaccatcgcgtcgcagcccctgtccctgcgcccagaggcgtgccggccagcggcggggggcgcagtgcacacgagggggctggacttcgcctgtgacatctacatctgggcgcccttggccgggacttgtggggtccttctcctgtcactggttatcaccctttactgcaaacggggcagaaagaaactcctgtatatattcaaacaaccatttatgagaccagtacaaactactcaagaggaagatggctgtagctgccgatttccagaagaagaagaaggaggatgtgaactgagagtgaagttcagcaggagcgcagacgcccccgcgtaccagcagggccagaaccagctctataacgagctgaatctaggacgaagagaggagtacgatgttttggacaagagacgtggccgggaccctgagatggggggaaagccgagaaggaagaaccctcaggaaggcctgtacaatgaactgcagaaagataagatggcggaggcctacagtgagattgggatgaaaggcgagcgccggaggggcaaggggcacgatggcctttaccagggtctcagtacagccaccaaggacacctacgacgcccttcacatgcaggccctgccccctcgctga

SEQ ID NO: 10380 - DNA, 1509 bp, Artificial Sequence
  Synthetic Polynucloetide
atggccttaccagtgaccgccttgctcctgccgctggccttgctgctccacgccgccaggccggaggtgcagctggttgaatctggcggaggactggttcagcctggcggatctctgagactgtcttgtgccgccagcggcttcaccttcaccacctattggatgcactgggtccgacaggcccctggcaaaggacttgagtgggtcggatatatcaggcccagcaccggctacacagagtacaaccagaagttcaaggaccgcttcaccatcagcgccgacaccagcaagaataccgcctacctccagatgaacagcctgagagccgaggacaccgccgtgtactactgtgccagatccagatggctgctggactattggggccagggcacactggttacagtttctggcggaggcggaagtggaggcggaggatctggcggcggaggctctgacattcagatgacacagagccctagcagcctgagcgcctctgtgggagacagagtgaccatcacatgcaagagcagccagagcgtgctgtactccagcaatcagaagaactacctggcctggttccagcagaagcctggcaaggctcctaagctgctgatctactgggccagcaccagagaaagcggcgtgccaagcagattttctggcagcggctctggcaccgacttcaccctgacaatatccagcctccagcctgaggacttcgccacctacttttgccaccagtacctgagcagctacacattcggacagggcaccaaggtggaaatcaagcggacgcgtgagcagaaactgatctcggaagaggatctggcgaagcccaccacgacgccagcgccgcgaccaccaacaccggcgcccaccatcgcgtcgcagcccctgtccctgcgcccagaggcgtgccggccagcggcggggggcgcagtgcacacgagggggctggacttcgcctgtgacatctacatctgggcgcccttggccgggacttgtggggtccttctcctgtcactggttatcaccctttactgcaaacggggcagaaagaaactcctgtatatattcaaacaaccatttatgagaccagtacaaactactcaagaggaagatggctgtagctgccgatttccagaagaagaagaaggaggatgtgaactgagagtgaagttcagcaggagcgcagacgcccccgcgtaccagcagggccagaaccagctctataacgagctgaatctaggacgaagagaggagtacgatgttttggacaagagacgtggccgggaccctgagatggggggaaagccgagaaggaagaaccctcaggaaggcctgtacaatgaactgcagaaagataagatggcggaggcctacagtgagattgggatgaaaggcgagcgccggaggggcaaggggcacgatggcctttaccagggtctcagtacagccaccaaggacacctacgacgcccttcacatgcaggccctgccccctcgctga

SEQ ID NO: 10381 - DNA, 2748 bp, Artificial Sequence
  Synthetic Polynucloetide
atggccttaccagtgaccgccttgctcctgccgctggccttgctgctccacgccgccaggccggacattcagatgacacagagccctagcagcctgagcgcctctgtgggagacagagtgaccatcacatgcaagagcagccagagcgtgctgtactccagcaatcagaagaactacctggcctggttccagcagaagcctggcaaggctcctaagctgctgatctactgggccagcaccagagaaagcggcgtgccaagcagattttctggcagcggctctggcaccgacttcaccctgacaatatccagcctccagcctgaggacttcgccacctacttttgccaccagtacctgagcagctacacattcggacagggcaccaaggtggaaatcaagcggggcggaggcggaagtggaggcggaggatctggcggcggaggctctgaggtgcagctggttgaatctggcggaggactggttcagcctggcggatctctgagactgtcttgtgccgccagcggcttcaccttcaccacctattggatgcactgggtccgacaggcccctggcaaaggacttgagtgggtcggatatatcaggcccagcaccggctacacagagtacaaccagaagttcaaggaccgcttcaccatcagcgccgacaccagcaagaataccgcctacctccagatgaacagcctgagagccgaggacaccgccgtgtactactgtgccagatccagatggctgctggactattggggccagggcacactggttacagtttctacgcgtgagcagaaactgatctcggaagaggatctggcgaagcccaccacgacgccagcgccgcgaccaccaacaccggcgcccaccatcgcgtcgcagcccctgtccctgcgcccagaggcgtgccggccagcggcggggggcgcagtgcacacgagggggctggacttcgcctgtgacatctacatctgggcgcccttggccgggacttgtggggtccttctcctgtcactggttatcaccctttactgcgggcgcgccagagtgaagttcagcaggagcgcagacgcccccgcgtaccagcagggccagaaccagctctataacgagctgaatctaggacgaagagaggagtacgatgttttggacaagagacgtggccgggaccctgagatggggggaaagccgagaaggaagaaccctcaggaaggcctgtacaatgaactgcagaaagataagatggcggaggcctacagtgagattgggatgaaaggcgagcgccggaggggcaaggggcacgatggcctttaccagggtctcagtacagccaccaaggacacctacgacgcccttcacatgcaggccctgccccctcgctctagaggatctggagcaacaaacttctcactactcaaacaagcaggtgacgtggaggagaatcccgggcctgggatccacatggccacttacgaggttctctgtgaggtggcgcggaaactgggcacggatgacagggaagtggtattgttcctcctaaacgtgttcatacctcaacccacactggcccaattaattggagctcttagagctttaaaggaggagggcaggttaacgtttcccctgttagcggaatgtctgtttcgtgcaggtcgcagagacctcttgcgcgacctgcttcacttagacccgcgttttttagagcgccacctagcgggcacaatgagttatttcagcccttatcagctcactgttctccacgtagacggggagctgtgtgcgagggatattaggtctttgatatttttaagcaaggacactatagggtctcgcagcacaccacagacattcttacactgggtgtactgtatggaaaacttagacctactgggtcccactgacgtggatgccctaatgtcaatgcttagatctttgtcaagagtagacctacagcgccaagtgcaaaccctaatgggccttcacctttccggcccatcacactcccaacactatcgccatacaccactcgagaccgatttctacgactacaaggacgacgatgacaagactagtggctccggcgagggcagaggaagtctactaacctgcggagatgtggaagaaaatcctggcccacatatgaccgagtacaagcccacggtgcgcctcgccacccgcgacgacgtccccagggccgtacgcaccctcgccgccgcgttcgccgactaccccgccacgcgccacaccgtcgatccggaccgccacatcgagcgggtcaccgagctgcaagaactcttcctcacgcgcgtcgggctcgacatcggcaaggtgtgggtcgcggacgacggcgccgcggtggcggtctggaccacgccggagagcgtcgaagcgggggcggtgttcgccgagatcggcccgcgcatggccgagttgagcggttcccggctggccgcgcagcaacagatggaaggcctcctggcgccgcaccggcccaaggagcccgcgtggttcctggccaccgtcggcgtctcgcccgaccaccagggcaagggtctgggcagcgccgtcgtgctccccggagtggaggcggccgagcgcgccggggtgcccgccttcctggagacctccgcgccccgcaacctccccttctacgagcggctcggcttcaccgtcaccgccgacgtcgaggtgcccgaaggaccgcgcacctggtgcatgacccgcaagcccggtgcctga

SEQ ID NO: 10382 - DNA, 2568 bp, Artificial Sequence
  Synthetic Polynucloetide
atggccttaccagtgaccgccttgctcctgccgctggccttgctgctccacgccgccaggccggacattcagatgacacagagccctagcagcctgagcgcctctgtgggagacagagtgaccatcacatgcaagagcagccagagcgtgctgtactccagcaatcagaagaactacctggcctggttccagcagaagcctggcaaggctcctaagctgctgatctactgggccagcaccagagaaagcggcgtgccaagcagattttctggcagcggctctggcaccgacttcaccctgacaatatccagcctccagcctgaggacttcgccacctacttttgccaccagtacctgagcagctacacattcggacagggcaccaaggtggaaatcaagcggctcgagatccagaaccctgatcctgccgtgtaccagctgcgggatagcaagagcagcgacaagagcgtgtgtctgttcaccgacttcgacagccagaccaacgtgtcccagagcaaggactccgacgtgtacatcaccgataagtgcgtgctggacatgcggagcatggacttcaagagcaactccgccgtggcctggtccaacaagtccgatttcgcctgcgccaacgccttcaacaacagcattatccccgaggacacattcttcccaagcagcgacgtgccctgcgacgtgaagctggtggaaaagagcttcgagacagacaccaacctgaacttccagaacctgagcgtgatcggcttcagaatcctgctgctgaaagtggccggctttaacctgctgatgaccctgcggctgtggtccagccgcgccaagagaagcggatctggcgtgaagcagaccctgaatttcgacctgctgaagctggctggcgacgtggaatccaacccaggccctactagtatggactggatttggcgcatccttttccttgtcggcgctgctaccggcgcgcattccttcgaagaggtgcagctggttgaatctggcggaggactggttcagcctggcggatctctgagactgtcttgtgccgccagcggcttcaccttcaccacctattggatgcactgggtccgacaggcccctggcaaaggacttgagtgggtcggatatatcaggcccagcaccggctacacagagtacaaccagaagttcaaggaccgcttcaccatcagcgccgacaccagcaagaataccgcctacctccagatgaacagcctgagagccgaggacaccgccgtgtactactgtgccagatccagatggctgctggactattggggccagggcacactggttacagtttctacgcgtgaggacctgaagaacgtgttcccacctgaggtggccgtgttcgagcctagcaaggccgagatcgcccacacccagaaagccaccctcgtgtgcctggctaccggcttctaccccgaccatgtggaactgtcttggtgggtcaacggcaaagaggtgcacagcggcgtgtgtaccgacccccagccactgaaagaacagcccgccctgaacgacagccggtactgcctgagcagcagactgagagtgtccgccaccttctggcagaacccccggaaccacttcagatgccaggtgcagttctacggcctgagcgagaacgacgagtggacccaggacagagccaagcccgtgacccagatcgtgtctgccgaagcctggggcagagccgattgcggcatcaccagcgccagctaccaccagggcgtgctgagcgccaccatcctgtacgagatcctgctgggcaaggccaccctgtacgccgtgctggtgtctgccctggtgctgatggctatggtcaagcggaaggacagccggggaagggccaagcgatctggatctggagcaacaaacttctcactactcaaacaagcaggtgacgtggaggagaatcccgggccttctagaggccatatgaccgagtacaagcccacggtgcgcctcgccacccgcgacgacgtccccagggccgtacgcaccctcgccgccgcgttcgccgactaccccgccacgcgccacaccgtcgatccggaccgccacatcgagcgggtcaccgagctgcaagaactcttcctcacgcgcgtcgggctcgacatcggcaaggtgtgggtcgcggacgacggcgccgcggtggcggtctggaccacgccggagagcgtcgaagcgggggcggtgttcgccgagatcggcccgcgcatggccgagttgagcggttcccggctggccgcgcagcaacagatggaaggcctcctggcgccgcaccggcccaaggagcccgcgtggttcctggccaccgtcggcgtctcgcccgaccaccagggcaagggtctgggcagcgccgtcgtgctccccggagtggaggcggccgagcgcgccggggtgcccgccttcctggagacctccgcgccccgcaacctccccttctacgagcggctcggcttcaccgtcaccgccgacgtcgaggtgcccgaaggaccgcgcacctggtgcatgacccgcaagcccggtgcctga

SEQ ID NO: 10383 - DNA, 2565 bp, Artificial Sequence
  Synthetic Polynucloetide
atggccttaccagtgaccgccttgctcctgccgctggccttgctgctccacgccgccaggccggacattcagatgacacagagccctagcagcctgagcgcctctgtgggagacagagtgaccatcacatgcaagagcagccagagcgtgctgtactccagcaatcagaagaactacctggcctggttccagcagaagcctggcaaggctcctaagctgctgatctactgggccagcaccagagaaagcggcgtgccaagcagattttctggcagcggctctggcaccgacttcaccctgacaatatccagcctccagcctgaggacttcgccacctacttttgccaccagtacctgagcagctacacattcggacagggcaccaaggtggaaatcaagcggctcgaggacctgaagaacgtgttcccacctgaggtggccgtgttcgagcctagcaaggccgagatcgcccacacccagaaagccaccctcgtgtgcctggctaccggcttctaccccgaccatgtggaactgtcttggtgggtcaacggcaaagaggtgcacagcggcgtgtgtaccgacccccagccactgaaagaacagcccgccctgaacgacagccggtactgcctgagcagcagactgagagtgtccgccaccttctggcagaacccccggaaccacttcagatgccaggtgcagttctacggcctgagcgagaacgacgagtggacccaggacagagccaagcccgtgacccagatcgtgtctgccgaagcctggggcagagccgattgcggcatcaccagcgccagctaccaccagggcgtgctgagcgccaccatcctgtacgagatcctgctgggcaaggccaccctgtacgccgtgctggtgtctgccctggtgctgatggctatggtcaagcggaaggacagccggggaagggccaagcgatctggatctggagcaacaaacttctcactactcaaacaagcaggtgacgtggaggagaatcccgggcctactagtatggactggatttggcgcatccttttccttgtcggcgctgctaccggcgcgcattccttcgaagaggtgcagctggttgaatctggcggaggactggttcagcctggcggatctctgagactgtcttgtgccgccagcggcttcaccttcaccacctattggatgcactgggtccgacaggcccctggcaaaggacttgagtgggtcggatatatcaggcccagcaccggctacacagagtacaaccagaagttcaaggaccgcttcaccatcagcgccgacaccagcaagaataccgcctacctccagatgaacagcctgagagccgaggacaccgccgtgtactactgtgccagatccagatggctgctggactattggggccagggcacactggttacagtttctacgcgtatccagaaccctgatcctgccgtgtaccagctgcgggatagcaagagcagcgacaagagcgtgtgtctgttcaccgacttcgacagccagaccaacgtgtcccagagcaaggactccgacgtgtacatcaccgataagtgcgtgctggacatgcggagcatggacttcaagagcaactccgccgtggcctggtccaacaagtccgatttcgcctgcgccaacgccttcaacaacagcattatccccgaggacacattcttcccaagcagcgacgtgccctgcgacgtgaagctggtggaaaagagcttcgagacagacaccaacctgaacttccagaacctgagcgtgatcggcttcagaatcctgctgctgaaagtggccggctttaacctgctgatgaccctgcggctgtggtccagccgcgccaagagaagcggatctggcgtgaagcagaccctgaatttcgacctgctgaagctggctggcgacgtggaatccaacccaggcccttctagaggccatatgaccgagtacaagcccacggtgcgcctcgccacccgcgacgacgtccccagggccgtacgcaccctcgccgccgcgttcgccgactaccccgccacgcgccacaccgtcgatccggaccgccacatcgagcgggtcaccgagctgcaagaactcttcctcacgcgcgtcgggctcgacatcggcaaggtgtgggtcgcggacgacggcgccgcggtggcggtctggaccacgccggagagcgtcgaagcgggggcggtgttcgccgagatcggcccgcgcatggccgagttgagcggttcccggctggccgcgcagcaacagatggaaggcctcctggcgccgcaccggcccaaggagcccgcgtggttcctggccaccgtcggcgtctcgcccgaccaccagggcaagggtctgggcagcgccgtcgtgctccccggagtggaggcggccgagcgcgccggggtgcccgccttcctggagacctccgcgccccgcaacctccccttctacgagcggctcggcttcaccgtcaccgccgacgtcgaggtgcccgaaggaccgcgcacctggtgcatgacccgcaagcccggtgcctga

SEQ ID NO: 10384 - DNA, 1863 bp, Artificial Sequence
  Synthetic Polynucloetide
atggccttaccagtgaccgccttgctcctgccgctggccttgctgctccacgccgccaggccggacattcagatgacacagagccctagcagcctgagcgcctctgtgggagacagagtgaccatcacatgcaagagcagccagagcgtgctgtactccagcaatcagaagaactacctggcctggttccagcagaagcctggcaaggctcctaagctgctgatctactgggccagcaccagagaaagcggcgtgccaagcagattttctggcagcggctctggcaccgacttcaccctgacaatatccagcctccagcctgaggacttcgccacctacttttgccaccagtacctgagcagctacacattcggacagggcaccaaggtggaaatcaagcggctcgaggacctgaagaacgtgttcccacctgaggtggccgtgttcgagcctagcgaggccgagatcagccacacccagaaagccaccctcgtgtgcctggctaccggcttctaccccgaccatgtggaactgtcttggtgggtcaacggcaaagaggtgcacagcggcgtgtgtaccgacccccagccactgaaagaacagcccgccctgaacgacagccggtactgcctgagcagcagactgagagtgtccgccaccttctggcagaacccccggaaccacttcagatgccaggtgcagttctacggcctgagcgagaacgacgagtggacccaggacagagccaagcccgtgacccagatcgtgtctgccgaagcctggggcagagccgattgcggctttaccagcgagagctaccagcagggcgtgctgagcgccaccatcctgtacgagatcctgctgggcaaggccaccctgtacgccgtgctggtgtctgccctggtgctgatggctatggtcaagcggaaggacagccggggaagggccaagcgatctggatctggagcaacaaacttctcactactcaaacaagcaggtgacgtggaggagaatcccgggcctactagtatggactggatttggcgcatccttttccttgtcggcgctgctaccggcgcgcattccttcgaagaggtgcagctggttgaatctggcggaggactggttcagcctggcggatctctgagactgtcttgtgccgccagcggcttcaccttcaccacctattggatgcactgggtccgacaggcccctggcaaaggacttgagtgggtcggatatatcaggcccagcaccggctacacagagtacaaccagaagttcaaggaccgcttcaccatcagcgccgacaccagcaagaataccgcctacctccagatgaacagcctgagagccgaggacaccgccgtgtactactgtgccagatccagatggctgctggactattggggccagggcacactggttacagtttctacgcgtatccagaaccctgatcctgccgtgtaccagctgcgggatagcaagagcagcgacaagagcgtgtgtctgttcaccgacttcgacagccagaccaacgtgtcccagagcaaggactccgacgtgtacatcaccgataagtgcgtgctggacatgcggagcatggacttcaagagcaactccgccgtggcctggtccaacaagtccgatttcgcctgcgccaacgccttcaacaacagcattatccccgaggacacattcttcccaagccccgagagcagctgcgacgtgaagctggtggaaaagagcttcgagacagacaccaacctgaacttccagaacctgagcgtgatcggcttcagaatcctgctgctgaaagtggccggctttaacctgctgatgaccctgcggctgtggtccagc

SEQ ID NO: 10385 - DNA, 2538 bp, Artificial Sequence
  Synthetic Polynucloetide
atggccttaccagtgaccgccttgctcctgccgctggccttgctgctccacgccgccaggccggacattcagatgacacagagccctagcagcctgagcgcctctgtgggagacagagtgaccatcacatgcaagagcagccagagcgtgctgtactccagcaatcagaagaactacctggcctggttccagcagaagcctggcaaggctcctaagctgctgatctactgggccagcaccagagaaagcggcgtgccaagcagattttctggcagcggctctggcaccgacttcaccctgacaatatccagcctccagcctgaggacttcgccacctacttttgccaccagtacctgagcagctacacattcggacagggcaccaaggtggaaatcaagcggctcgaggacctgaagaacgtgttcccacctgaggtggccgtgttcgagcctagcgaggccgagatcagccacacccagaaagccaccctcgtgtgcctggctaccggcttctaccccgaccatgtggaactgtcttggtgggtcaacggcaaagaggtgcacagcggcgtgtgtaccgacccccagccactgaaagaacagcccgccctgaacgacagccggtactgcctgagcagcagactgagagtgtccgccaccttctggcagaacccccggaaccacttcagatgccaggtgcagttctacggcctgagcgagaacgacgagtggacccaggacagagccaagcccgtgacccagatcgtgtctgccgaagcctggggcagagccgattgcggctttaccagcgagagctaccagcagggcgtgctgagcgccaccatcctgtacgagatcctgctgggcaaggccaccctgtacgccgtgctggtgtctgccctggtgctgatggctatggtcaagcggaaggacagccggggaagggccaagcgatctggatctggagcaacaaacttctcactactcaaacaagcaggtgacgtggaggagaatcccgggcctactagtatggactggatttggcgcatccttttccttgtcggcgctgctaccggcgcgcattccttcgaagaggtgcagctggttgaatctggcggaggactggttcagcctggcggatctctgagactgtcttgtgccgccagcggcttcaccttcaccacctattggatgcactgggtccgacaggcccctggcaaaggacttgagtgggtcggatatatcaggcccagcaccggctacacagagtacaaccagaagttcaaggaccgcttcaccatcagcgccgacaccagcaagaataccgcctacctccagatgaacagcctgagagccgaggacaccgccgtgtactactgtgccagatccagatggctgctggactattggggccagggcacactggttacagtttctacgcgtatccagaaccctgatcctgccgtgtaccagctgcgggatagcaagagcagcgacaagagcgtgtgtctgttcaccgacttcgacagccagaccaacgtgtcccagagcaaggactccgacgtgtacatcaccgataagtgcgtgctggacatgcggagcatggacttcaagagcaactccgccgtggcctggtccaacaagtccgatttcgcctgcgccaacgccttcaacaacagcattatccccgaggacacattcttcccaagccccgagagcagctgcgacgtgaagctggtggaaaagagcttcgagacagacaccaacctgaacttccagaacctgagcgtgatcggcttcagaatcctgctgctgaaagtggccggctttaacctgctgatgaccctgcggctgtggtccagccgcgccaagagaagcggatctggcgtgaagcagaccctgaatttcgacctgctgaagctggctggcgacgtggaatccaacccaggcccttctagaggcgggatccacaccatggctacctacgaggtgctgtgcgaggtggcaagaaagctgggcaccgacgacagagaagtggtgctgttcctgctgaacgtgttcatccctcagcctacactggcccagctgatcggtgcactgagagccctgaaagaggaaggccggctgacctttcctctgctggccgaatgcctgttcagagccggaagaagggatctgctgcgggacctgctgcatctggaccccagatttctggaaagacacctggccggcaccatgagctacttcagcccttaccagctgaccgtgctgcacgttgacggcgaactgtgcgccagagatattcggagcctgatcttcctgagcaaggacaccatcggcagccggtctacccctcagacatttctgcactgggtgtactgcatggaaaacctggacctgctcggccccacagatgtggatgccctgatgtccatgctgagaagcctgagcagagtggacctccagagacaggtgcagacactgatgggactgcacctgagcggacctagccacagccagcactacagacacacccct

SEQ ID NO: 10386 - DNA, 1875 bp, Artificial Sequence
  Synthetic Polynucloetide
atggccttaccagtgaccgccttgctcctgccgctggccttgctgctccacgccgccaggccggacattcagatgacacagagccctagcagcctgagcgcctctgtgggagacagagtgaccatcacatgcaagagcagccagagcgtgctgtactccagcaatcagaagaactacctggcctggttccagcagaagcctggcaaggctcctaagctgctgatctactgggccagcaccagagaaagcggcgtgccaagcagattttctggcagcggctctggcaccgacttcaccctgacaatatccagcctccagcctgaggacttcgccacctacttttgccaccagtacctgagcagctacacattcggacagggcaccaaggtggaaatcaagcggctcgagatccagaaccctgatcctgccgtgtaccagctgcgggatagcaagagcagcgacaagagcgtgtgtctgttcaccgacttcgacagccagaccaacgtgtcccagagcaaggactccgacgtgtacatcaccgataagtgcgtgctggacatgcggagcatggacttcaagagcaactccgccgtggcctggtccaacaagtccgatttcgcctgcgccaacgccttcaacaacagcattatccccgaggacacattcttcccaagccccgagagcagctgcgacgtgaagctggtggaaaagagcttcgagacagacaccaacctgaacttccagaacctgagcgtgatcggcttcagaatcctgctgctgaaagtggccggctttaacctgctgatgaccctgcggctgtggtccagccgcgccaagagaagcggatctggcgtgaagcagaccctgaatttcgacctgctgaagctggctggcgacgtggaatccaacccaggccctactagtatggactggatttggcgcatccttttccttgtcggcgctgctaccggcgcgcattccttcgaagaggtgcagctggttgaatctggcggaggactggttcagcctggcggatctctgagactgtcttgtgccgccagcggcttcaccttcaccacctattggatgcactgggtccgacaggcccctggcaaaggacttgagtgggtcggatatatcaggcccagcaccggctacacagagtacaaccagaagttcaaggaccgcttcaccatcagcgccgacaccagcaagaataccgcctacctccagatgaacagcctgagagccgaggacaccgccgtgtactactgtgccagatccagatggctgctggactattggggccagggcacactggttacagtttctacgcgtgaggacctgaagaacgtgttcccacctgaggtggccgtgttcgagcctagcgaggccgagatcagccacacccagaaagccaccctcgtgtgcctggctaccggcttctaccccgaccatgtggaactgtcttggtgggtcaacggcaaagaggtgcacagcggcgtgtgtaccgacccccagccactgaaagaacagcccgccctgaacgacagccggtactgcctgagcagcagactgagagtgtccgccaccttctggcagaacccccggaaccacttcagatgccaggtgcagttctacggcctgagcgagaacgacgagtggacccaggacagagccaagcccgtgacccagatcgtgtctgccgaagcctggggcagagccgattgcggctttaccagcgagagctaccagcagggcgtgctgagcgccaccatcctgtacgagatcctgctgggcaaggccaccctgtacgccgtgctggtgtctgccctggtgctgatggctatggtcaagcggaaggacagccgggga

SEQ ID NO: 10387 - DNA, 2541 bp, Artificial Sequence
  Synthetic Polynucloetide
atggccttaccagtgaccgccttgctcctgccgctggccttgctgctccacgccgccaggccggacattcagatgacacagagccctagcagcctgagcgcctctgtgggagacagagtgaccatcacatgcaagagcagccagagcgtgctgtactccagcaatcagaagaactacctggcctggttccagcagaagcctggcaaggctcctaagctgctgatctactgggccagcaccagagaaagcggcgtgccaagcagattttctggcagcggctctggcaccgacttcaccctgacaatatccagcctccagcctgaggacttcgccacctacttttgccaccagtacctgagcagctacacattcggacagggcaccaaggtggaaatcaagcggctcgagatccagaaccctgatcctgccgtgtaccagctgcgggatagcaagagcagcgacaagagcgtgtgtctgttcaccgacttcgacagccagaccaacgtgtcccagagcaaggactccgacgtgtacatcaccgataagtgcgtgctggacatgcggagcatggacttcaagagcaactccgccgtggcctggtccaacaagtccgatttcgcctgcgccaacgccttcaacaacagcattatccccgaggacacattcttcccaagccccgagagcagctgcgacgtgaagctggtggaaaagagcttcgagacagacaccaacctgaacttccagaacctgagcgtgatcggcttcagaatcctgctgctgaaagtggccggctttaacctgctgatgaccctgcggctgtggtccagccgcgccaagagaagcggatctggcgtgaagcagaccctgaatttcgacctgctgaagctggctggcgacgtggaatccaacccaggccctactagtatggactggatttggcgcatccttttccttgtcggcgctgctaccggcgcgcattccttcgaagaggtgcagctggttgaatctggcggaggactggttcagcctggcggatctctgagactgtcttgtgccgccagcggcttcaccttcaccacctattggatgcactgggtccgacaggcccctggcaaaggacttgagtgggtcggatatatcaggcccagcaccggctacacagagtacaaccagaagttcaaggaccgcttcaccatcagcgccgacaccagcaagaataccgcctacctccagatgaacagcctgagagccgaggacaccgccgtgtactactgtgccagatccagatggctgctggactattggggccagggcacactggttacagtttctacgcgtgaggacctgaagaacgtgttcccacctgaggtggccgtgttcgagcctagcgaggccgagatcagccacacccagaaagccaccctcgtgtgcctggctaccggcttctaccccgaccatgtggaactgtcttggtgggtcaacggcaaagaggtgcacagcggcgtgtgtaccgacccccagccactgaaagaacagcccgccctgaacgacagccggtactgcctgagcagcagactgagagtgtccgccaccttctggcagaacccccggaaccacttcagatgccaggtgcagttctacggcctgagcgagaacgacgagtggacccaggacagagccaagcccgtgacccagatcgtgtctgccgaagcctggggcagagccgattgcggctttaccagcgagagctaccagcagggcgtgctgagcgccaccatcctgtacgagatcctgctgggcaaggccaccctgtacgccgtgctggtgtctgccctggtgctgatggctatggtcaagcggaaggacagccggggaagggccaagcgatctggatctggagcaacaaacttctcactactcaaacaagcaggtgacgtggaggagaatcccgggccttctagaggcgggatccacaccatggctacctacgaggtgctgtgcgaggtggcaagaaagctgggcaccgacgacagagaagtggtgctgttcctgctgaacgtgttcatccctcagcctacactggcccagctgatcggtgcactgagagccctgaaagaggaaggccggctgacctttcctctgctggccgaatgcctgttcagagccggaagaagggatctgctgcgggacctgctgcatctggaccccagatttctggaaagacacctggccggcaccatgagctacttcagcccttaccagctgaccgtgctgcacgttgacggcgaactgtgcgccagagatattcggagcctgatcttcctgagcaaggacaccatcggcagccggtctacccctcagacatttctgcactgggtgtactgcatggaaaacctggacctgctcggccccacagatgtggatgccctgatgtccatgctgagaagcctgagcagagtggacctccagagacaggtgcagacactgatgggactgcacctgagcggacctagccacagccagcactacagacacacccct

SEQ ID NO: 10388 - DNA, 2700 bp, Artificial Sequence
  Synthetic Polynucloetide
atggccttaccagtgaccgccttgctcctgccgctggccttgctgctccacgccgccaggccgctcgaggggaaaccaattcccaaccctcttctgggactggattcaaccggcagcggcgaggacctgaagaacgtgttcccacctgaggtggccgtgttcgagcctagcaaggccgagatcgcccacacccagaaagccaccctcgtgtgcctggctaccggcttctaccccgaccatgtggaactgtcttggtgggtcaacggcaaagaggtgcacagcggcgtgtgtaccgacccccagccactgaaagaacagcccgccctgaacgacagccggtactgcctgagcagcagactgagagtgtccgccaccttctggcagaacccccggaaccacttcagatgccaggtgcagttctacggcctgagcgagaacgacgagtggacccaggacagagccaagcccgtgacccagatcgtgtctgccgaagcctggggcagagccgattgcggcatcaccagcgccagctaccaccagggcgtgctgagcgccaccatcctgtacgagatcctgctgggcaaggccaccctgtacgccgtgctggtgtctgccctggtgctgatggctatggtcaagcggaaggacagccggggaagggccaagcgatctggatctggagcaacaaacttctcactactcaaacaagcaggtgacgtggaggagaatcccgggcctactagcatggccttaccagtgaccgccttgctcctgccgctggccttgctgctccacgccgccaggccggacattcagatgacacagagccctagcagcctgagcgcctctgtgggagacagagtgaccatcacatgcaagagcagccagagcgtgctgtactccagcaatcagaagaactacctggcctggttccagcagaagcctggcaaggctcctaagctgctgatctactgggccagcaccagagaaagcggcgtgccaagcagattttctggcagcggctctggcaccgacttcaccctgacaatatccagcctccagcctgaggacttcgccacctacttttgccaccagtacctgagcagctacacattcggacagggcaccaaggtggaaatcaagcggggcggaggcggaagtggaggcggaggatctggcggcggaggctctgaggtgcagctggttgaatctggcggaggactggttcagcctggcggatctctgagactgtcttgtgccgccagcggcttcaccttcaccacctattggatgcactgggtccgacaggcccctggcaaaggacttgagtgggtcggatatatcaggcccagcaccggctacacagagtacaaccagaagttcaaggaccgcttcaccatcagcgccgacaccagcaagaataccgcctacctccagatgaacagcctgagagccgaggacaccgccgtgtactactgtgccagatccagatggctgctggactattggggccagggcacactggttacagtttctacgcgtgagcagaaactgatctcggaagaggatgggagcggcatccagaaccctgatcctgccgtgtaccagctgcgggatagcaagagcagcgacaagagcgtgtgtctgttcaccgacttcgacagccagaccaacgtgtcccagagcaaggactccgacgtgtacatcaccgataagtgcgtgctggacatgcggagcatggacttcaagagcaactccgccgtggcctggtccaacaagtccgatttcgcctgcgccaacgccttcaacaacagcattatccccgaggacacattcttcccaagcagcgacgtgccctgcgacgtgaagctggtggaaaagagcttcgagacagacaccaacctgaacttccagaacctgagcgtgatcggcttcagaatcctgctgctgaaagtggccggctttaacctgctgatgaccctgcggctgtggtccagccgcgccaagagaagcggatctggcgtgaagcagaccctgaatttcgacctgctgaagctggctggcgacgtggaatccaacccaggcccttctagaggccatatgaccgagtacaagcccacggtgcgcctcgccacccgcgacgacgtccccagggccgtacgcaccctcgccgccgcgttcgccgactaccccgccacgcgccacaccgtcgatccggaccgccacatcgagcgggtcaccgagctgcaagaactcttcctcacgcgcgtcgggctcgacatcggcaaggtgtgggtcgcggacgacggcgccgcggtggcggtctggaccacgccggagagcgtcgaagcgggggcggtgttcgccgagatcggcccgcgcatggccgagttgagcggttcccggctggccgcgcagcaacagatggaaggcctcctggcgccgcaccggcccaaggagcccgcgtggttcctggccaccgtcggcgtctcgcccgaccaccagggcaagggtctgggcagcgccgtcgtgctccccggagtggaggcggccgagcgcgccggggtgcccgccttcctggagacctccgcgccccgcaacctccccttctacgagcggctcggcttcaccgtcaccgccgacgtcgaggtgcccgaaggaccgcgcacctggtgcatgacccgcaagcccggtgcctga

SEQ ID NO: 10389 - DNA, 2703 bp, Artificial Sequence
  Synthetic Polynucloetide
atggccttaccagtgaccgccttgctcctgccgctggccttgctgctccacgccgccaggccgctcgagcagaaactgatctcggaagaggatctgggctccggcgatcgccctgatcctgccgtgtaccagctgcgggatagcaagagcagcgacaagagcgtgtgtctgttcaccgacttcgacagccagaccaacgtgtcccagagcaaggactccgacgtgtacatcaccgataagtgcgtgctggacatgcggagcatggacttcaagagcaactccgccgtggcctggtccaacaagtccgatttcgcctgcgccaacgccttcaacaacagcattatccccgaggacacattcttcccaagccccgagagcagctgcgacgtgaagctggtggaaaagagcttcgagacagacaccaacctgaacttccagaacctgagcgtgatcggcttcagaatcctgctgctgaaagtggccggctttaacctgctgatgaccctgcggctgtggtccagctctagtcgcgccaagagaagcggatctggcgtgaagcagaccctgaatttcgacctgctgaagctggctggcgacgtggaatccaacccaggccccactagcatggccttaccagtgaccgccttgctcctgccgctggccttgctgctccacgccgccaggccggacattcagatgacacagagccctagcagcctgagcgcctctgtgggagacagagtgaccatcacatgcaagagcagccagagcgtgctgtactccagcaatcagaagaactacctggcctggttccagcagaagcctggcaaggctcctaagctgctgatctactgggccagcaccagagaaagcggcgtgccaagcagattttctggcagcggctctggcaccgacttcaccctgacaatatccagcctccagcctgaggacttcgccacctacttttgccaccagtacctgagcagctacacattcggacagggcaccaaggtggaaatcaagcggggcggaggcggaagtggaggcggaggatctggcggcggaggctctgaggtgcagctggttgaatctggcggaggactggttcagcctggcggatctctgagactgtcttgtgccgccagcggcttcaccttcaccacctattggatgcactgggtccgacaggcccctggcaaaggacttgagtgggtcggatatatcaggcccagcaccggctacacagagtacaaccagaagttcaaggaccgcttcaccatcagcgccgacaccagcaagaataccgcctacctccagatgaacagcctgagagccgaggacaccgccgtgtactactgtgccagatccagatggctgctggactattggggccagggcacactggttacagtttctacgcgtgggaaaccaattcccaaccctcttctgggactggattcaaccggcagcggcgaggacctgaagaacgtgttcccacctgaggtggccgtgttcgagcctagcgaggccgagatcagccacacccagaaagccaccctcgtgtgcctggctaccggcttctaccccgaccatgtggaactgtcttggtgggtcaacggcaaagaggtgcacagcggcgtgtgtaccgacccccagccactgaaagaacagcccgccctgaacgacagccggtactgcctgagcagcagactgagagtgtccgccaccttctggcagaacccccggaaccacttcagatgccaggtgcagttctacggcctgagcgagaacgacgagtggacccaggacagagccaagcccgtgacccagatcgtgtctgccgaagcctggggcagagccgattgcggctttaccagcgagagctaccagcagggcgtgctgagcgccaccatcctgtacgagatcctgctgggcaaggccaccctgtacgccgtgctggtgtctgccctggtgctgatggctatggtcaagcggaaggacagccggggaagggccaagcgatctggatctggagcaacaaacttctcactactcaaacaagcaggtgacgtggaggagaatcccgggccttctagaggccatatgaccgagtacaagcccacggtgcgcctcgccacccgcgacgacgtccccagggccgtacgcaccctcgccgccgcgttcgccgactaccccgccacgcgccacaccgtcgatccggaccgccacatcgagcgggtcaccgagctgcaagaactcttcctcacgcgcgtcgggctcgacatcggcaaggtgtgggtcgcggacgacggcgccgcggtggcggtctggaccacgccggagagcgtcgaagcgggggcggtgttcgccgagatcggcccgcgcatggccgagttgagcggttcccggctggccgcgcagcaacagatggaaggcctcctggcgccgcaccggcccaaggagcccgcgtggttcctggccaccgtcggcgtctcgcccgaccaccagggcaagggtctgggcagcgccgtcgtgctccccggagtggaggcggccgagcgcgccggggtgcccgccttcctggagacctccgcgccccgcaacctccccttctacgagcggctcggcttcaccgtcaccgccgacgtcgaggtgcccgaaggaccgcgcacctggtgcatgacccgcaagcccggtgcctga

SEQ ID NO: 10390 - DNA, 2565 bp, Artificial Sequence
  Synthetic Polynucloetide
atggccttaccagtgaccgccttgctcctgccgctggccttgctgctccacgccgccaggccggacattcagatgacacagagccctagcagcctgagcgcctctgtgggagacagagtgaccatcacatgcaagagcagccagagcgtgctgtactccagcaatcagaagaactacctggcctggttccagcagaagcctggcaaggctcctaagctgctgatctactgggccagcaccagagaaagcggcgtgccaagcagattttctggcagcggctctggcaccgacttcaccctgacaatatccagcctccagcctgaggacttcgccacctacttttgccaccagtacctgagcagctacacattcggacagggcaccaaggtggaaatcaagcggctcgaggacctgaagaacgtgttcccacctgaggtggccgtgttcgagcctagcgaggccgagatcagccacacccagaaagccaccctcgtgtgcctggctaccggcttctaccccgaccatgtggaactgtcttggtgggtcaacggcaaagaggtgcacagcggcgtgtctaccgacccccagccactgaaagaacagcccgccctgaacgacagccggtactgcctgagcagcagactgagagtgtccgccaccttctggcagaacccccggaaccacttcagatgccaggtgcagttctacggcctgagcgagaacgacgagtggacccaggacagagccaagcccgtgacccagatcgtgtctgccgaagcctggggcagagccgattgcggctttaccagcgagagctaccagcagggcgtgctgagcgccaccatcctgtacgagatcctgctgggcaaggccaccctgtacgccgtgctggtgtctgccctggtgctgatggctatggtcaagcggaaggacagccggggaagggccaagcgatctggatctggagcaacaaacttctcactactcaaacaagcaggtgacgtggaggagaatcccgggcctactagtatggactggatttggcgcatccttttccttgtcggcgctgctaccggcgcgcattccttcgaagaggtgcagctggttgaatctggcggaggactggttcagcctggcggatctctgagactgtcttgtgccgccagcggcttcaccttcaccacctattggatgcactgggtccgacaggcccctggcaaaggacttgagtgggtcggatatatcaggcccagcaccggctacacagagtacaaccagaagttcaaggaccgcttcaccatcagcgccgacaccagcaagaataccgcctacctccagatgaacagcctgagagccgaggacaccgccgtgtactactgtgccagatccagatggctgctggactattggggccagggcacactggttacagtttctacgcgtatccagaaccctgatcctgccgtgtaccagctgcgggatagcaagagcagcgacaagagcgtgtgtctgttcaccgacttcgacagccagaccaacgtgtcccagagcaaggactccgacgtgtacatcaccgataagaccgtgctggacatgcggagcatggacttcaagagcaactccgccgtggcctggtccaacaagtccgatttcgcctgcgccaacgccttcaacaacagcattatccccgaggacacattcttcccaagccccgagagcagctgcgacgtgaagctggtggaaaagagcttcgagacagacaccaacctgaacttccagaacctgagcgtgatcggcttcagaatcctgctgctgaaagtggccggctttaacctgctgatgaccctgcggctgtggtccagccgcgccaagagaagcggatctggcgtgaagcagaccctgaatttcgacctgctgaagctggctggcgacgtggaatccaacccaggcccttctagaggccatatgaccgagtacaagcccacggtgcgcctcgccacccgcgacgacgtccccagggccgtacgcaccctcgccgccgcgttcgccgactaccccgccacgcgccacaccgtcgatccggaccgccacatcgagcgggtcaccgagctgcaagaactcttcctcacgcgcgtcgggctcgacatcggcaaggtgtgggtcgcggacgacggcgccgcggtggcggtctggaccacgccggagagcgtcgaagcgggggcggtgttcgccgagatcggcccgcgcatggccgagttgagcggttcccggctggccgcgcagcaacagatggaaggcctcctggcgccgcaccggcccaaggagcccgcgtggttcctggccaccgtcggcgtctcgcccgaccaccagggcaagggtctgggcagcgccgtcgtgctccccggagtggaggcggccgagcgcgccggggtgcccgccttcctggagacctccgcgccccgcaacctccccttctacgagcggctcggcttcaccgtcaccgccgacgtcgaggtgcccgaaggaccgcgcacctggtgcatgacccgcaagcccggtgcctga

SEQ ID NO: 10391 - DNA, 2811 bp, Artificial Sequence
  Synthetic Polynucloetide
atggccttaccagtgaccgccttgctcctgccgctggccttgctgctccacgccgccaggccggacattcagatgacacagagccctagcagcctgagcgcctctgtgggagacagagtgaccatcacatgcaagagcagccagagcgtgctgtactccagcaatcagaagaactacctggcctggttccagcagaagcctggcaaggctcctaagctgctgatctactgggccagcaccagagaaagcggcgtgccaagcagattttctggcagcggctctggcaccgacttcaccctgacaatatccagcctccagcctgaggacttcgccacctacttttgccaccagtacctgagcagctacacattcggacagggcaccaaggtggaaatcaagcggctcgaggacctgaagaacgtgttcccacctgaggtggccgtgttcgagcctagcgaggccgagatcagccacacccagaaagccaccctcgtgtgcctggctaccggcttctaccccgaccatgtggaactgtcttggtgggtcaacggcaaagaggtgcacagcggcgtgtctaccgacccccagccactgaaagaacagcccgccctgaacgacagccggtactgcctgagcagcagactgagagtgtccgccaccttctggcagaacccccggaaccacttcagatgccaggtgcagttctacggcctgagcgagaacgacgagtggacccaggacagagccaagcccgtgacccagatcgtgtctgccgaagcctggggcagagccgattgcggctttaccagcgagagctaccagcagggcgtgctgagcgccaccatcctgtacgagatcctgctgggcaaggccaccctgtacgccgtgctggtgtctgccctggtgctgatggctatggtcaagcggaaggacagccggggaagggccaagcgatctggatctggagcaacaaacttctcactactcaaacaagcaggtgacgtggaggagaatcccgggcctactagtatggactggatttggcgcatccttttccttgtcggcgctgctaccggcgcgcattccttcgaagaggtgcagctggttgaatctggcggaggactggttcagcctggcggatctctgagactgtcttgtgccgccagcggcttcaccttcaccacctattggatgcactgggtccgacaggcccctggcaaaggacttgagtgggtcggatatatcaggcccagcaccggctacacagagtacaaccagaagttcaaggaccgcttcaccatcagcgccgacaccagcaagaataccgcctacctccagatgaacagcctgagagccgaggacaccgccgtgtactactgtgccagatccagatggctgctggactattggggccagggcacactggttacagtttctacgcgtgagcagaaactgatctcggaagaggatgggagcggcaccccattcccttctctggcccctcccatcatgctgctggtggacggcaagcagcagatggtggtcgtgtgcctggtgctggatgtggccccacctggactggacagccccatctggtttagcgccggcaatggctctgccctggacgcctttacctacggcccaagccctgccaccgatggcacctggacaaatctggcccacctgagcctgcccagcgaggaactggcttcttgggagcctctcgtgtgccacacaggacctggcgctgagggacacagcagatccacccagcctatgcacctgtctggcgaggccagcaccgccagaacctgtcctcaggaacctctgagaggcacccctggcggagcactgtggctgggagtgctgagactgctgctgttcaagctgctgctgtttgacctgctgctgacctgctcctgtctgtgcgatcctgccggccctctgccttctcctgccaccaccacaagactgagagccctgggcagccacagactgcaccctgccacagagacaggcggcagagaggccacaagcagccctagaccccagcccagagacagaagatggggcgataccccccctggcagaaagcctggatctccagtccgcgccaagagaagcggatctggcgtgaagcagaccctgaatttcgacctgctgaagctggctggcgacgtggaatccaacccaggcccttctagaggccatatgaccgagtacaagcccacggtgcgcctcgccacccgcgacgacgtccccagggccgtacgcaccctcgccgccgcgttcgccgactaccccgccacgcgccacaccgtcgatccggaccgccacatcgagcgggtcaccgagctgcaagaactcttcctcacgcgcgtcgggctcgacatcggcaaggtgtgggtcgcggacgacggcgccgcggtggcggtctggaccacgccggagagcgtcgaagcgggggcggtgttcgccgagatcggcccgcgcatggccgagttgagcggttcccggctggccgcgcagcaacagatggaaggcctcctggcgccgcaccggcccaaggagcccgcgtggttcctggccaccgtcggcgtctcgcccgaccaccagggcaagggtctgggcagcgccgtcgtgctccccggagtggaggcggccgagcgcgccggggtgcccgccttcctggagacctccgcgccccgcaacctccccttctacgagcggctcggcttcaccgtcaccgccgacgtcgaggtgcccgaaggaccgcgcacctggtgcatgacccgcaagcccggtgcctga

SEQ ID NO: 10392 - DNA, 2865 bp, Artificial Sequence
  Synthetic Polynucloetide
atggccttaccagtgaccgccttgctcctgccgctggccttgctgctccacgccgccaggccgctcgaggacctgaagaacgtgttcccacctgaggtggccgtgttcgagcctagcgaggccgagatcagccacacccagaaagccaccctcgtgtgcctggctaccggcttctaccccgaccatgtggaactgtcttggtgggtcaacggcaaagaggtgcacagcggcgtgtctaccgacccccagccactgaaagaacagcccgccctgaacgacagccggtactgcctgagcagcagactgagagtgtccgccaccttctggcagaacccccggaaccacttcagatgccaggtgcagttctacggcctgagcgagaacgacgagtggacccaggacagagccaagcccgtgacccagatcgtgtctgccgaagcctggggcagagccgattgcggctttaccagcgagagctaccagcagggcgtgctgagcgccaccatcctgtacgagatcctgctgggcaaggccaccctgtacgccgtgctggtgtctgccctggtgctgatggctatggtcaagcggaaggacagccggggaagggccaagcgatctggatctggagcaacaaacttctcactactcaaacaagcaggtgacgtggaggagaatcccgggcctactagcatggccttaccagtgaccgccttgctcctgccgctggccttgctgctccacgccgccaggccggacattcagatgacacagagccctagcagcctgagcgcctctgtgggagacagagtgaccatcacatgcaagagcagccagagcgtgctgtactccagcaatcagaagaactacctggcctggttccagcagaagcctggcaaggctcctaagctgctgatctactgggccagcaccagagaaagcggcgtgccaagcagattttctggcagcggctctggcaccgacttcaccctgacaatatccagcctccagcctgaggacttcgccacctacttttgccaccagtacctgagcagctacacattcggacagggcaccaaggtggaaatcaagcggggcggaggcggaagtggaggcggaggatctggcggcggaggctctgaggtgcagctggttgaatctggcggaggactggttcagcctggcggatctctgagactgtcttgtgccgccagcggcttcaccttcaccacctattggatgcactgggtccgacaggcccctggcaaaggacttgagtgggtcggatatatcaggcccagcaccggctacacagagtacaaccagaagttcaaggaccgcttcaccatcagcgccgacaccagcaagaataccgcctacctccagatgaacagcctgagagccgaggacaccgccgtgtactactgtgccagatccagatggctgctggactattggggccagggcacactggttacagtttctacgcgtgagcagaaactgatctcggaagaggatctggggagcggcaccccattcccttctctggcccctcccatcatgctgctggtggacggcaagcagcagatggtggtcgtgtgcctggtgctggatgtggccccacctggactggacagccccatctggtttagcgccggcaatggctctgccctggacgcctttacctacggcccaagccctgccaccgatggcacctggacaaatctggcccacctgagcctgcccagcgaggaactggcttcttgggagcctctcgtgtgccacacaggacctggcgctgagggacacagcagatccacccagcctatgcacctgtctggcgaggccagcaccgccagaacctgtcctcaggaacctctgagaggcacccctggcggagcactgtggctgggagtgctgagactgctgctgttcaagctgctgctgtttgacctgctgctgacctgctcctgtctgtgcgatcctgccggccctctgccttctcctgccaccaccacaagactgagagccctgggcagccacagactgcaccctgccacagagacaggcggcagagaggccacaagcagccctagaccccagcccagagacagaagatggggcgataccccccctggcagaaagcctggatctccagtccgcgccaagagaagcggatctggcgtgaagcagaccctgaatttcgacctgctgaagctggctggcgacgtggaatccaacccaggcccttctagatctagaggccatatgaccgagtacaagcccacggtgcgcctcgccacccgcgacgacgtccccagggccgtacgcaccctcgccgccgcgttcgccgactaccccgccacgcgccacaccgtcgatccggaccgccacatcgagcgggtcaccgagctgcaagaactcttcctcacgcgcgtcgggctcgacatcggcaaggtgtgggtcgcggacgacggcgccgcggtggcggtctggaccacgccggagagcgtcgaagcgggggcggtgttcgccgagatcggcccgcgcatggccgagttgagcggttcccggctggccgcgcagcaacagatggaaggcctcctggcgccgcaccggcccaaggagcccgcgtggttcctggccaccgtcggcgtctcgcccgaccaccagggcaagggtctgggcagcgccgtcgtgctccccggagtggaggcggccgagcgcgccggggtgcccgccttcctggagacctccgcgccccgcaacctccccttctacgagcggctcggcttcaccgtcaccgccgacgtcgaggtgcccgaaggaccgcgcacctggtgcatgacccgcaagcccggtgcctga

SEQ ID NO: 10393 - DNA, 2676 bp, Artificial Sequence
  Synthetic Polynucloetide
atggccttaccagtgaccgccttgctcctgccgctggccttgctgctccacgccgccaggccggacattcagatgacacagagccctagcagcctgagcgcctctgtgggagacagagtgaccatcacatgcaagagcagccagagcgtgctgtactccagcaatcagaagaactacctggcctggttccagcagaagcctggcaaggctcctaagctgctgatctactgggccagcaccagagaaagcggcgtgccaagcagattttctggcagcggctctggcaccgacttcaccctgacaatatccagcctccagcctgaggacttcgccacctacttttgccaccagtacctgagcagctacacattcggacagggcaccaaggtggaaatcaagcggctcgaggggaaaccaattcccaaccctcttctgggactggattcaaccggcagcggcgacaagcagctggacgccgacgtgtcccccaagcctaccatcttcctgccctctatcgccgagacaaagctccagaaggccggcacctacctgtgcctgctggaaaagttcttcccagatgtgattaagatccactggcaggaaaagaagtccaacaccatcctgggcagccaggaaggcaacaccatgaagaccaacgacacctacatgaagttcagctggctgaccgtgcccgagaagtccctggacaaagaacacagatgcatcgtgcggcacgaaaacaacaagaacggcgtggaccaggaaatcatcttcccacccatcaagaccgatgtgattacaatggaccccaaggacaactgctccaaggacgccaacgataccctgctgctccagctgaccaacaccagcgcctactacatgtacttgttgctgctgctgaagtccgtggtgtacttcgccatcatcacatgctgcctgctgcggagaaccgccttctgctgcaacggcgagaagtctagggccaagcgatctggatctggagcaacaaacttctcactactcaaacaagcaggtgacgtggaggagaatcccgggcctactagtatggactggatttggcgcatccttttccttgtcggcgctgctaccggcgcgcattccttcgaagaggtgcagctggttgaatctggcggaggactggttcagcctggcggatctctgagactgtcttgtgccgccagcggcttcaccttcaccacctattggatgcactgggtccgacaggcccctggcaaaggacttgagtgggtcggatatatcaggcccagcaccggctacacagagtacaaccagaagttcaaggaccgcttcaccatcagcgccgacaccagcaagaataccgcctacctccagatgaacagcctgagagccgaggacaccgccgtgtactactgtgccagatccagatggctgctggactattggggccagggcacactggttacagtttctacgcgtgagcagaaactgatctcggaagaggatgggagcggcagccagcctcacaccaagcccagcgtgttcgtgatgaagaacggcaccaacgtggcctgcctcgtgaaagagttctaccccaaggacatcaggatcaacctggtgtccagcaagaagatcaccgagttcgaccccgccatcgtgatctcccccagcggcaagtacaacgccgtgaagctggggaagtacgaggacagcaacagcgtgacctgctccgtgcagcacgacaacaagaccgtgcacagcaccgactttgaagtgaaaaccgactccaccgaccacgtgaagcccaaagagacagagaacaccaagcagcccagcaagagctgccacaagcccaaggccatcgtgcacaccgagaaagtgaacatgatgagcctgaccgtgctgggcctgcggatgctgttcgccaaaaccgtggccgtgaacttcctgctgaccgccaagctgttcttcctccgcgccaagagaagcggatctggcgtgaagcagaccctgaatttcgacctgctgaagctggctggcgacgtggaatccaacccaggcccttctagaggccatatgaccgagtacaagcccacggtgcgcctcgccacccgcgacgacgtccccagggccgtacgcaccctcgccgccgcgttcgccgactaccccgccacgcgccacaccgtcgatccggaccgccacatcgagcgggtcaccgagctgcaagaactcttcctcacgcgcgtcgggctcgacatcggcaaggtgtgggtcgcggacgacggcgccgcggtggcggtctggaccacgccggagagcgtcgaagcgggggcggtgttcgccgagatcggcccgcgcatggccgagttgagcggttcccggctggccgcgcagcaacagatggaaggcctcctggcgccgcaccggcccaaggagcccgcgtggttcctggccaccgtcggcgtctcgcccgaccaccagggcaagggtctgggcagcgccgtcgtgctccccggagtggaggcggccgagcgcgccggggtgcccgccttcctggagacctccgcgccccgcaacctccccttctacgagcggctcggcttcaccgtcaccgccgacgtcgaggtgcccgaaggaccgcgcacctggtgcatgacccgcaagcccggtgcctga

SEQ ID NO: 10394 - DNA, 1887 bp, Artificial Sequence
  Synthetic Polynucloetide
atggccttaccagtgaccgccttgctcctgccgctggccttgctgctccacgccgccaggccggacattcagatgacacagagccctagcagcctgagcgcctctgtgggagacagagtgaccatcacatgcaagagcagccagagcgtgctgtactccagcaatcagaagaactacctggcctggttccagcagaagcctggcaaggctcctaagctgctgatctactgggccagcaccagagaaagcggcgtgccaagcagattttctggcagcggctctggcaccgacttcaccctgacaatatccagcctccagcctgaggacttcgccacctacttttgccaccagtacctgagcagctacacattcggacagggcaccaaggtggaaatcaagcggctcgagagccagcctcacaccaagcccagcgtgttcgtgatgaagaacggcaccaacgtggcctgcctcgtgaaagagttctaccccaaggacatcaggatcaacctggtgtccagcaagaagatcaccgagttcgaccccgccatcgtgatctcccccagcggcaagtacaacgccgtgaagctggggaagtacgaggacagcaacagcgtgacctgctccgtgcagcacgacaacaagaccgtgcacagcaccgactttgaagtgaaaaccgactccaccgaccacgtgaagcccaaagagacagagaacaccaagcagcccagcaagagctgccacaagcccaaggccatcgtgcacaccgagaaagtgaacatgatgagcctgaccgtgctgggcctgcggatgctgttcgccaaaaccgtggccgtgaacttcctgctgaccgccaagctgttcttcctcagggccaagcgatctggatctggagcaacaaacttctcactactcaaacaagcaggtgacgtggaggagaatcccgggcctactagtatggactggatttggcgcatccttttccttgtcggcgctgctaccggcgcgcattccttcgaagaggtgcagctggttgaatctggcggaggactggttcagcctggcggatctctgagactgtcttgtgccgccagcggcttcaccttcaccacctattggatgcactgggtccgacaggcccctggcaaaggacttgagtgggtcggatatatcaggcccagcaccggctacacagagtacaaccagaagttcaaggaccgcttcaccatcagcgccgacaccagcaagaataccgcctacctccagatgaacagcctgagagccgaggacaccgccgtgtactactgtgccagatccagatggctgctggactattggggccagggcacactggttacagtttctacgcgtgacaagcagctggacgccgacgtgtcccccaagcctaccatcttcctgccctctatcgccgagacaaagctccagaaggccggcacctacctgtgcctgctggaaaagttcttcccagatgtgattaagatccactggcaggaaaagaagtccaacaccatcctgggcagccaggaaggcaacaccatgaagaccaacgacacctacatgaagttcagctggctgaccgtgcccgagaagtccctggacaaagaacacagatgcatcgtgcggcacgaaaacaacaagaacggcgtggaccaggaaatcatcttcccacccatcaagaccgatgtgattacaatggaccccaaggacaactgctccaaggacgccaacgataccctgctgctccagctgaccaacaccagcgcctactacatgtacttgttgctgctgctgaagtccgtggtgtacttcgccatcatcacatgctgcctgctgcggagaaccgccttctgctgcaacggcgagaagtct

SEQ ID NO: 10395 - DNA, 2721 bp, Artificial Sequence
  Synthetic Polynucloetide
atggccttaccagtgaccgccttgctcctgccgctggccttgctgctccacgccgccaggccgctcgaggggaaaccaattcccaaccctcttctgggactggattcaaccggcagcggcgacaagcagctggacgccgacgtgtcccccaagcctaccatcttcctgccctctatcgccgagacaaagctccagaaggccggcacctacctgtgcctgctggaaaagttcttcccagatgtgattaagatccactggcaggaaaagaagtccaacaccatcctgggcagccaggaaggcaacaccatgaagaccaacgacacctacatgaagttcagctggctgaccgtgcccgagaagtccctggacaaagaacacagatgcatcgtgcggcacgaaaacaacaagaacggcgtggaccaggaaatcatcttcccacccatcaagaccgatgtgattacaatggaccccaaggacaactgctccaaggacgccaacgataccctgctgctccagctgaccaacaccagcgcctactacatgtacttgttgctgctgctgaagtccgtggtgtacttcgccatcatcacatgctgcctgctgcggagaaccgccttctgctgcaacggcgagaagtctagggccaagcgatctggatctggagcaacaaacttctcactactcaaacaagcaggtgacgtggaggagaatcccgggcctactagcatggccttaccagtgaccgccttgctcctgccgctggccttgctgctccacgccgccaggccggacattcagatgacacagagccctagcagcctgagcgcctctgtgggagacagagtgaccatcacatgcaagagcagccagagcgtgctgtactccagcaatcagaagaactacctggcctggttccagcagaagcctggcaaggctcctaagctgctgatctactgggccagcaccagagaaagcggcgtgccaagcagattttctggcagcggctctggcaccgacttcaccctgacaatatccagcctccagcctgaggacttcgccacctacttttgccaccagtacctgagcagctacacattcggacagggcaccaaggtggaaatcaagcggggcggaggcggaagtggaggcggaggatctggcggcggaggctctgaggtgcagctggttgaatctggcggaggactggttcagcctggcggatctctgagactgtcttgtgccgccagcggcttcaccttcaccacctattggatgcactgggtccgacaggcccctggcaaaggacttgagtgggtcggatatatcaggcccagcaccggctacacagagtacaaccagaagttcaaggaccgcttcaccatcagcgccgacaccagcaagaataccgcctacctccagatgaacagcctgagagccgaggacaccgccgtgtactactgtgccagatccagatggctgctggactattggggccagggcacactggttacagtttctacgcgtgagcagaaactgatctcggaagaggatgggagcggcagccagcctcacaccaagcccagcgtgttcgtgatgaagaacggcaccaacgtggcctgcctcgtgaaagagttctaccccaaggacatcaggatcaacctggtgtccagcaagaagatcaccgagttcgaccccgccatcgtgatctcccccagcggcaagtacaacgccgtgaagctggggaagtacgaggacagcaacagcgtgacctgctccgtgcagcacgacaacaagaccgtgcacagcaccgactttgaagtgaaaaccgactccaccgaccacgtgaagcccaaagagacagagaacaccaagcagcccagcaagagctgccacaagcccaaggccatcgtgcacaccgagaaagtgaacatgatgagcctgaccgtgctgggcctgcggatgctgttcgccaaaaccgtggccgtgaacttcctgctgaccgccaagctgttcttcctccgcgccaagagaagcggatctggcgtgaagcagaccctgaatttcgacctgctgaagctggctggcgacgtggaatccaacccaggcccttctagaggccatatgaccgagtacaagcccacggtgcgcctcgccacccgcgacgacgtccccagggccgtacgcaccctcgccgccgcgttcgccgactaccccgccacgcgccacaccgtcgatccggaccgccacatcgagcgggtcaccgagctgcaagaactcttcctcacgcgcgtcgggctcgacatcggcaaggtgtgggtcgcggacgacggcgccgcggtggcggtctggaccacgccggagagcgtcgaagcgggggcggtgttcgccgagatcggcccgcgcatggccgagttgagcggttcccggctggccgcgcagcaacagatggaaggcctcctggcgccgcaccggcccaaggagcccgcgtggttcctggccaccgtcggcgtctcgcccgaccaccagggcaagggtctgggcagcgccgtcgtgctccccggagtggaggcggccgagcgcgccggggtgcccgccttcctggagacctccgcgccccgcaacctccccttctacgagcggctcggcttcaccgtcaccgccgacgtcgaggtgcccgaaggaccgcgcacctggtgcatgacccgcaagcccggtgcctga

SEQ ID NO: 10396 - DNA, 3096 bp, Artificial Sequence
  Synthetic Polynucloetide
atggccttaccagtgaccgccttgctcctgccgctggccttgctgctccacgccgccaggccggacattcagatgacacagagccctagcagcctgagcgcctctgtgggagacagagtgaccatcacatgcaagagcagccagagcgtgctgtactccagcaatcagaagaactacctggcctggttccagcagaagcctggcaaggctcctaagctgctgatctactgggccagcaccagagaaagcggcgtgccaagcagattttctggcagcggctctggcaccgacttcaccctgacaatatccagcctccagcctgaggacttcgccacctacttttgccaccagtacctgagcagctacacattcggacagggcaccaaggtggaaatcaagcggggacagcctaaggccaatcctaccgtgacactgttccctccaagcagcgaagaactccaggccaacaaggccacacttgtgtgcctgatctccgacttctaccctggggctgtgacagtggcttggaaggccgatggatctcctgtgaaagccggcgtggaaaccaccaagccatccaagcagagcaacaacaaatacgccgccagctcctacctgagcctgacacctgagcagtggaagtcccacagatcctacagctgccaagtgacccacgaaggcagcaccgtggaaaagacagtggcccctacagagtgcagcggatcccagagcttcggcctgctggaccccaagctgtgctacctgctggatggcatcctgttcatctacggcgtgatcctgaccgccctgttcctgagagtgaagttcagcagaagcgccgacgcccctgcctaccagcagggacagaaccaactgtacaacgagctgaacctgggcagacgggaagagtacgacgtgctggacaagcggagaggcagggaccctgagatgggcggaaagccccagcggagaaagaacccccaggaaggactgtataacgaactccagaaagacaagatggccgaagcctacagcgagatcggcatgaagggcgagcggagaagaggcaagggccacgatggcctgtaccagggcctgagcaccgccaccaaggacacctatgacgccctgcacatgcaggccctgcctccaagaagggccaagcgatctggatctggagcaacaaacttctcactactcaaacaagcaggtgacgtggaggagaatcccgggcctactagtatggactggatttggcgcatccttttccttgtcggcgctgctaccggcgcgcattccttcgaagaggtgcagctggttgaatctggcggaggactggttcagcctggcggatctctgagactgtcttgtgccgccagcggcttcaccttcaccacctattggatgcactgggtccgacaggcccctggcaaaggacttgagtgggtcggatatatcaggcccagcaccggctacacagagtacaaccagaagttcaaggaccgcttcaccatcagcgccgacaccagcaagaataccgcctacctccagatgaacagcctgagagccgaggacaccgccgtgtactactgtgccagatccagatggctgctggactattggggccagggcacactggttacagtttctgcctctacaaagggaccctccgtgtttcctctggctcccagcagcaagtctacaagcggaggaacagccgctctgggctgcctggtcaaggattactttcccgagcctgtgaccgtgtcctggaatagcggagcactgacaagcggcgtgcacacctttccagccgtgctgcaaagcagcggcctgtactctctgagcagcgtggtcacagtgcctagctctagcctgggcacccagacctacatctgcaatgtgaaccacaagcctagcaacaccaaggtggacaagagagtggaacccaagagctgtggtacccagagttttgggttgttggaccctaaattgtgctatctgttggacggaatcctgttcatttacggagtgatcctgaccgcattgttcctgcgggttaagttttccagatccgcagacgcacccgcttaccaacaagggcagaaccaactctacaatgaacttaatttggggcggagggaagagtacgacgttctggacaaaaggaggggacgagatcccgagatgggcggaaagcctcagcgaaggaagaatccgcaagaggggctttataacgaactccagaaagataaaatggcagaagcctatagtgagattgggatgaagggagaaaggaggaggggtaaaggtcacgatgggttgtaccaaggattgagcacagccactaaagatacctatgatgcgctccacatgcaggccctgccgccaagacgcgccaagagaagcggatctggcgtgaagcagaccctgaatttcgacctgctgaagctggctggcgacgtggaatccaacccaggcccttctagaggccatatgaccgagtacaagcccacggtgcgcctcgccacccgcgacgacgtccccagggccgtacgcaccctcgccgccgcgttcgccgactaccccgccacgcgccacaccgtcgatccggaccgccacatcgagcgggtcaccgagctgcaagaactcttcctcacgcgcgtcgggctcgacatcggcaaggtgtgggtcgcggacgacggcgccgcggtggcggtctggaccacgccggagagcgtcgaagcgggggcggtgttcgccgagatcggcccgcgcatggccgagttgagcggttcccggctggccgcgcagcaacagatggaaggcctcctggcgccgcaccggcccaaggagcccgcgtggttcctggccaccgtcggcgtctcgcccgaccaccagggcaagggtctgggcagcgccgtcgtgctccccggagtggaggcggccgagcgcgccggggtgcccgccttcctggagacctccgcgccccgcaacctccccttctacgagcggctcggcttcaccgtcaccgccgacgtcgaggtgcccgaaggaccgcgcacctggtgcatgacccgcaagcccggtgcctga

SEQ ID NO: 10397 - DNA, 2451 bp, Artificial Sequence
  Synthetic Polynucloetide
atggccttaccagtgaccgccttgctcctgccgctggccttgctgctccacgccgccaggccggacattcagatgacacagagccctagcagcctgagcgcctctgtgggagacagagtgaccatcacatgcaagagcagccagagcgtgctgtactccagcaatcagaagaactacctggcctggttccagcagaagcctggcaaggctcctaagctgctgatctactgggccagcaccagagaaagcggcgtgccaagcagattttctggcagcggctctggcaccgacttcaccctgacaatatccagcctccagcctgaggacttcgccacctacttttgccaccagtacctgagcagctacacattcggacagggcaccaaggtggaaatcaagcggctcgaggacctgaagaacgtgttcccacctgaggtggccgtgttcgagcctagcgaggccgagatcagccacacccagaaagccaccctcgtgtgcctggctaccggcttctaccccgaccatgtggaactgtcttggtgggtcaacggcaaagaggtgcacagcggcgtgtctaccgacccccagccactgaaagaacagcccgccctgaacgacagccggtactgcctgagcagcagactgagagtgtccgccaccttctggcagaacccccggaaccacttcagatgccaggtgcagttctacggcctgagcgagaacgacgagtggacccaggacagagccaagcccgtgacccagatcgtgtctgccgaagcctggggcagagccgattgcggatcccagagcttcggcctgctggaccccaagctgtgctacctgctggatggcatcctgttcatctacggcgtgatcctgaccgccctgttcctgagagtgaagttcagcagaagcgccgacgcccctgcctaccagcagggacagaaccaactgtacaacgagctgaacctgggcagacgggaagagtacgacgtgctggacaagcggagaggcagggaccctgagatgggcggaaagccccagcggagaaagaacccccaggaaggactgtataacgaactccagaaagacaagatggccgaagcctacagcgagatcggcatgaagggcgagcggagaagaggcaagggccacgatggcctgtaccagggcctgagcaccgccaccaaggacacctatgacgccctgcacatgcaggccctgcctccaagaagggccaagcgatctggatctggagcaacaaacttctcactactcaaacaagcaggtgacgtggaggagaatcccgggcctactagtatggactggatttggcgcatccttttccttgtcggcgctgctaccggcgcgcattccttcgaagaggtgcagctggttgaatctggcggaggactggttcagcctggcggatctctgagactgtcttgtgccgccagcggcttcaccttcaccacctattggatgcactgggtccgacaggcccctggcaaaggacttgagtgggtcggatatatcaggcccagcaccggctacacagagtacaaccagaagttcaaggaccgcttcaccatcagcgccgacaccagcaagaataccgcctacctccagatgaacagcctgagagccgaggacaccgccgtgtactactgtgccagatccagatggctgctggactattggggccagggcacactggttacagtttctacgcgtatccagaaccctgatcctgccgtgtaccagctgcgggatagcaagagcagcgacaagagcgtgtgtctgttcaccgacttcgacagccagaccaacgtgtcccagagcaaggactccgacgtgtacatcaccgataagaccgtgctggacatgcggagcatggacttcaagagcaactccgccgtggcctggtccaacaagtccgatttcgcctgcgccaacgccttcaacaacagcattatccccgaggacacattcttcccaagccccgagagcagctgcggtacccagagttttgggttgttggaccctaaattgtgctatctgttggacggaatcctgttcatttacggagtgatcctgaccgcattgttcctgcgggttaagttttccagatccgcagacgcacccgcttaccaacaagggcagaaccaactctacaatgaacttaatttggggcggagggaagagtacgacgttctggacaaaaggaggggacgagatcccgagatgggcggaaagcctcagcgaaggaagaatccgcaagaggggctttataacgaactccagaaagataaaatggcagaagcctatagtgagattgggatgaagggagaaaggaggaggggtaaaggtcacgatgggttgtaccaaggattgagcacagccactaaagatacctatgatgcgctccacatgcaggccctgccgccaaga

SEQ ID NO: 10398 - DNA, 2451 bp, Artificial Sequence
  Synthetic Polynucloetide
atggccttaccagtgaccgccttgctcctgccgctggccttgctgctccacgccgccaggccggacattcagatgacacagagccctagcagcctgagcgcctctgtgggagacagagtgaccatcacatgcaagagcagccagagcgtgctgtactccagcaatcagaagaactacctggcctggttccagcagaagcctggcaaggctcctaagctgctgatctactgggccagcaccagagaaagcggcgtgccaagcagattttctggcagcggctctggcaccgacttcaccctgacaatatccagcctccagcctgaggacttcgccacctacttttgccaccagtacctgagcagctacacattcggacagggcaccaaggtggaaatcaagcggctcgaggacctgaagaacgtgttcccacctgaggtggccgtgttcgagcctagcaaggccgagatcgcccacacccagaaagccaccctcgtgtgcctggctaccggcttctaccccgaccatgtggaactgtcttggtgggtcaacggcaaagaggtgcacagcggcgtgtgtaccgacccccagccactgaaagaacagcccgccctgaacgacagccggtactgcctgagcagcagactgagagtgtccgccaccttctggcagaacccccggaaccacttcagatgccaggtgcagttctacggcctgagcgagaacgacgagtggacccaggacagagccaagcccgtgacccagatcgtgtctgccgaagcctggggcagagccgattgcggatcccagagcttcggcctgctggaccccaagctgtgctacctgctggatggcatcctgttcatctacggcgtgatcctgaccgccctgttcctgagagtgaagttcagcagaagcgccgacgcccctgcctaccagcagggacagaaccaactgtacaacgagctgaacctgggcagacgggaagagtacgacgtgctggacaagcggagaggcagggaccctgagatgggcggaaagccccagcggagaaagaacccccaggaaggactgtataacgaactccagaaagacaagatggccgaagcctacagcgagatcggcatgaagggcgagcggagaagaggcaagggccacgatggcctgtaccagggcctgagcaccgccaccaaggacacctatgacgccctgcacatgcaggccctgcctccaagaagggccaagcgatctggatctggagcaacaaacttctcactactcaaacaagcaggtgacgtggaggagaatcccgggcctactagtatggactggatttggcgcatccttttccttgtcggcgctgctaccggcgcgcattccttcgaagaggtgcagctggttgaatctggcggaggactggttcagcctggcggatctctgagactgtcttgtgccgccagcggcttcaccttcaccacctattggatgcactgggtccgacaggcccctggcaaaggacttgagtgggtcggatatatcaggcccagcaccggctacacagagtacaaccagaagttcaaggaccgcttcaccatcagcgccgacaccagcaagaataccgcctacctccagatgaacagcctgagagccgaggacaccgccgtgtactactgtgccagatccagatggctgctggactattggggccagggcacactggttacagtttctacgcgtatccagaaccctgatcctgccgtgtaccagctgcgggatagcaagagcagcgacaagagcgtgtgtctgttcaccgacttcgacagccagaccaacgtgtcccagagcaaggactccgacgtgtacatcaccgataagtgcgtgctggacatgcggagcatggacttcaagagcaactccgccgtggcctggtccaacaagtccgatttcgcctgcgccaacgccttcaacaacagcattatccccgaggacacattcttcccaagcagcgacgtgccctgcggtacccagagttttgggttgttggaccctaaattgtgctatctgttggacggaatcctgttcatttacggagtgatcctgaccgcattgttcctgcgggttaagttttccagatccgcagacgcacccgcttaccaacaagggcagaaccaactctacaatgaacttaatttggggcggagggaagagtacgacgttctggacaaaaggaggggacgagatcccgagatgggcggaaagcctcagcgaaggaagaatccgcaagaggggctttataacgaactccagaaagataaaatggcagaagcctatagtgagattgggatgaagggagaaaggaggaggggtaaaggtcacgatgggttgtaccaaggattgagcacagccactaaagatacctatgatgcgctccacatgcaggccctgccgccaaga

SEQ ID NO: 10399 - DNA, 2664 bp, Artificial Sequence
  Synthetic Polynucloetide
atggccttaccagtgaccgccttgctcctgccgctggccttgctgctccacgccgccaggccggacattcagatgacacagagccctagcagcctgagcgcctctgtgggagacagagtgaccatcacatgcaagagcagccagagcgtgctgtactccagcaatcagaagaactacctggcctggttccagcagaagcctggcaaggctcctaagctgctgatctactgggccagcaccagagaaagcggcgtgccaagcagattttctggcagcggctctggcaccgacttcaccctgacaatatccagcctccagcctgaggacttcgccacctacttttgccaccagtacctgagcagctacacattcggacagggcaccaaggtggaaatcaagcggctcgaggggaaaccaattcccaaccctcttctgggactggattcaaccggcagcggcgaggacctgaagaacgtgttcccacctgaggtggccgtgttcgagcctagcgaggccgagatcagccacacccagaaagccaccctcgtgtgcctggctaccggcttctaccccgaccatgtggaactgtcttggtgggtcaacggcaaagaggtgcacagcggcgtgtctaccgacccccagccactgaaagaacagcccgccctgaacgacagccggtactgcctgagcagcagactgagagtgtccgccaccttctggcagaacccccggaaccacttcagatgccaggtgcagttctacggcctgagcgagaacgacgagtggacccaggacagagccaagcccgtgacccagatcgtgtctgccgaagcctggggcagagccgattgcggatcccagagcttcggcctgctggaccccaagctgtgctacctgctggatggcatcctgttcatctacggcgtgatcctgaccgccctgttcctgagagtgaagttcagcagaagcgccgacgcccctgcctaccagcagggacagaaccaactgtacaacgagctgaacctgggcagacgggaagagtacgacgtgctggacaagcggagaggcagggaccctgagatgggcggaaagccccagcggagaaagaacccccaggaaggactgtataacgaactccagaaagacaagatggccgaagcctacagcgagatcggcatgaagggcgagcggagaagaggcaagggccacgatggcctgtaccagggcctgagcaccgccaccaaggacacctatgacgccctgcacatgcaggccctgcctccaagaagggccaagcgatctggatctggagcaacaaacttctcactactcaaacaagcaggtgacgtggaggagaatcccgggcctactagtatggactggatttggcgcatccttttccttgtcggcgctgctaccggcgcgcattccttcgaagaggtgcagctggttgaatctggcggaggactggttcagcctggcggatctctgagactgtcttgtgccgccagcggcttcaccttcaccacctattggatgcactgggtccgacaggcccctggcaaaggacttgagtgggtcggatatatcaggcccagcaccggctacacagagtacaaccagaagttcaaggaccgcttcaccatcagcgccgacaccagcaagaataccgcctacctccagatgaacagcctgagagccgaggacaccgccgtgtactactgtgccagatccagatggctgctggactattggggccagggcacactggttacagtttctacgcgtgagcagaaactgatctcggaagaggatgggagcggcatccagaaccctgatcctgccgtgtaccagctgcgggatagcaagagcagcgacaagagcgtgtgtctgttcaccgacttcgacagccagaccaacgtgtcccagagcaaggactccgacgtgtacatcaccgataagaccgtgctggacatgcggagcatggacttcaagagcaactccgccgtggcctggtccaacaagtccgatttcgcctgcgccaacgccttcaacaacagcattatccccgaggacacattcttcccaagccccgagagcagctgcggtacccagagttttgggttgttggaccctaaattgtgctatctgttggacggaatcctgttcatttacggagtgatcctgaccgcattgttcctgaggagcaagcggtcacggctgctccacagcgattacatgaatatgacaccacgaagaccgggtcctactcgcaaacactaccaaccctacgcacctccccgcgactttgcagcgtaccgatctcgggttaagttttccagatccgcagacgcacccgcttaccaacaagggcagaaccaactctacaatgaacttaatttggggcggagggaagagtacgacgttctggacaaaaggaggggacgagatcccgagatgggcggaaagcctcagcgaaggaagaatccgcaagaggggctttataacgaactccagaaagataaaatggcagaagcctatagtgagattgggatgaagggagaaaggaggaggggtaaaggtcacgatgggttgtaccaaggattgagcacagccactaaagatacctatgatgcgctccacatgcaggccctgccgccaaga

SEQ ID NO: 10400 - DNA, 2787 bp, Artificial Sequence
  Synthetic Polynucloetide
atggccttaccagtgaccgccttgctcctgccgctggccttgctgctccacgccgccaggccggacattcagatgacacagagccctagcagcctgagcgcctctgtgggagacagagtgaccatcacatgcaagagcagccagagcgtgctgtactccagcaatcagaagaactacctggcctggttccagcagaagcctggcaaggctcctaagctgctgatctactgggccagcaccagagaaagcggcgtgccaagcagattttctggcagcggctctggcaccgacttcaccctgacaatatccagcctccagcctgaggacttcgccacctacttttgccaccagtacctgagcagctacacattcggacagggcaccaaggtggaaatcaagcggctcgaggggaaaccaattcccaaccctcttctgggactggattcaaccggcagcggcgaggacctgaagaacgtgttcccacctgaggtggccgtgttcgagcctagcgaggccgagatcagccacacccagaaagccaccctcgtgtgcctggctaccggcttctaccccgaccatgtggaactgtcttggtgggtcaacggcaaagaggtgcacagcggcgtgtctaccgacccccagccactgaaagaacagcccgccctgaacgacagccggtactgcctgagcagcagactgagagtgtccgccaccttctggcagaacccccggaaccacttcagatgccaggtgcagttctacggcctgagcgagaacgacgagtggacccaggacagagccaagcccgtgacccagatcgtgtctgccgaagcctggggcagagccgattgcggatcccagagcttcggcctgctggaccccaagctgtgctacctgctggatggcatcctgttcatctacggcgtgatcctgaccgccctgttcctgaggagtaagaggagcaggctcctgcacagtgactacatgaacatgactccacgccgccccggacccacccgcaagcattaccagccctatgccccaccacgcgacttcgcagcctatcgctccagagtgaagttcagcagaagcgccgacgcccctgcctaccagcagggacagaaccaactgtacaacgagctgaacctgggcagacgggaagagtacgacgtgctggacaagcggagaggcagggaccctgagatgggcggaaagccccagcggagaaagaacccccaggaaggactgtataacgaactccagaaagacaagatggccgaagcctacagcgagatcggcatgaagggcgagcggagaagaggcaagggccacgatggcctgtaccagggcctgagcaccgccaccaaggacacctatgacgccctgcacatgcaggccctgcctccaagaagggccaagcgatctggatctggagcaacaaacttctcactactcaaacaagcaggtgacgtggaggagaatcccgggcctactagtatggactggatttggcgcatccttttccttgtcggcgctgctaccggcgcgcattccttcgaagaggtgcagctggttgaatctggcggaggactggttcagcctggcggatctctgagactgtcttgtgccgccagcggcttcaccttcaccacctattggatgcactgggtccgacaggcccctggcaaaggacttgagtgggtcggatatatcaggcccagcaccggctacacagagtacaaccagaagttcaaggaccgcttcaccatcagcgccgacaccagcaagaataccgcctacctccagatgaacagcctgagagccgaggacaccgccgtgtactactgtgccagatccagatggctgctggactattggggccagggcacactggttacagtttctacgcgtgagcagaaactgatctcggaagaggatgggagcggcatccagaaccctgatcctgccgtgtaccagctgcgggatagcaagagcagcgacaagagcgtgtgtctgttcaccgacttcgacagccagaccaacgtgtcccagagcaaggactccgacgtgtacatcaccgataagaccgtgctggacatgcggagcatggacttcaagagcaactccgccgtggcctggtccaacaagtccgatttcgcctgcgccaacgccttcaacaacagcattatccccgaggacacattcttcccaagccccgagagcagctgcggtacccagagttttgggttgttggaccctaaattgtgctatctgttggacggaatcctgttcatttacggagtgatcctgaccgcattgttcctgaggagcaagcggtcacggctgctccacagcgattacatgaatatgacaccacgaagaccgggtcctactcgcaaacactaccaaccctacgcacctccccgcgactttgcagcgtaccgatctcgggttaagttttccagatccgcagacgcacccgcttaccaacaagggcagaaccaactctacaatgaacttaatttggggcggagggaagagtacgacgttctggacaaaaggaggggacgagatcccgagatgggcggaaagcctcagcgaaggaagaatccgcaagaggggctttataacgaactccagaaagataaaatggcagaagcctatagtgagattgggatgaagggagaaaggaggaggggtaaaggtcacgatgggttgtaccaaggattgagcacagccactaaagatacctatgatgcgctccacatgcaggccctgccgccaaga

SEQ ID NO: 10401 - DNA, 2670 bp, Artificial Sequence
  Synthetic Polynucloetide
atggccttaccagtgaccgccttgctcctgccgctggccttgctgctccacgccgccaggccggacattcagatgacacagagccctagcagcctgagcgcctctgtgggagacagagtgaccatcacatgcaagagcagccagagcgtgctgtactccagcaatcagaagaactacctggcctggttccagcagaagcctggcaaggctcctaagctgctgatctactgggccagcaccagagaaagcggcgtgccaagcagattttctggcagcggctctggcaccgacttcaccctgacaatatccagcctccagcctgaggacttcgccacctacttttgccaccagtacctgagcagctacacattcggacagggcaccaaggtggaaatcaagcggctcgaggggaaaccaattcccaaccctcttctgggactggattcaaccggcagcggcgaggacctgaagaacgtgttcccacctgaggtggccgtgttcgagcctagcgaggccgagatcagccacacccagaaagccaccctcgtgtgcctggctaccggcttctaccccgaccatgtggaactgtcttggtgggtcaacggcaaagaggtgcacagcggcgtgtctaccgacccccagccactgaaagaacagcccgccctgaacgacagccggtactgcctgagcagcagactgagagtgtccgccaccttctggcagaacccccggaaccacttcagatgccaggtgcagttctacggcctgagcgagaacgacgagtggacccaggacagagccaagcccgtgacccagatcgtgtctgccgaagcctggggcagagccgattgcggatcccagagcttcggcctgctggaccccaagctgtgctacctgctggatggcatcctgttcatctacggcgtgatcctgaccgccctgttcctgagagtgaagttcagcagaagcgccgacgcccctgcctaccagcagggacagaaccaactgtacaacgagctgaacctgggcagacgggaagagtacgacgtgctggacaagcggagaggcagggaccctgagatgggcggaaagccccagcggagaaagaacccccaggaaggactgtataacgaactccagaaagacaagatggccgaagcctacagcgagatcggcatgaagggcgagcggagaagaggcaagggccacgatggcctgtaccagggcctgagcaccgccaccaaggacacctatgacgccctgcacatgcaggccctgcctccaagaagggccaagcgatctggatctggagcaacaaacttctcactactcaaacaagcaggtgacgtggaggagaatcccgggcctactagtatggactggatttggcgcatccttttccttgtcggcgctgctaccggcgcgcattccttcgaagaggtgcagctggttgaatctggcggaggactggttcagcctggcggatctctgagactgtcttgtgccgccagcggcttcaccttcaccacctattggatgcactgggtccgacaggcccctggcaaaggacttgagtgggtcggatatatcaggcccagcaccggctacacagagtacaaccagaagttcaaggaccgcttcaccatcagcgccgacaccagcaagaataccgcctacctccagatgaacagcctgagagccgaggacaccgccgtgtactactgtgccagatccagatggctgctggactattggggccagggcacactggttacagtttctacgcgtgagcagaaactgatctcggaagaggatctggggagcggcatccagaaccctgatcctgccgtgtaccagctgcgggatagcaagagcagcgacaagagcgtgtgtctgttcaccgacttcgacagccagaccaacgtgtcccagagcaaggactccgacgtgtacatcaccgataagaccgtgctggacatgcggagcatggacttcaagagcaactccgccgtggcctggtccaacaagtccgatttcgcctgcgccaacgccttcaacaacagcattatccccgaggacacattcttcccaagccccgagagcagctgcggtacccagagttttgggttgttggaccctaaattgtgctatctgttggacggaatcctgttcatttacggagtgatcctgaccgcattgttcctgaagagaggccggaagaagctgctgtacatcttcaagcagcctttcatgcggcccgtgcagaccacccaggaagaggacggctgctcctgccggttccccgaggaagaagaaggcggctgcgagctgcgggttaagttttccagatccgcagacgcacccgcttaccaacaagggcagaaccaactctacaatgaacttaatttggggcggagggaagagtacgacgttctggacaaaaggaggggacgagatcccgagatgggcggaaagcctcagcgaaggaagaatccgcaagaggggctttataacgaactccagaaagataaaatggcagaagcctatagtgagattgggatgaagggagaaaggaggaggggtaaaggtcacgatgggttgtaccaaggattgagcacagccactaaagatacctatgatgcgctccacatgcaggccctgccgccaaga

SEQ ID NO: 10402 - DNA, 2796 bp, Artificial Sequence
  Synthetic Polynucloetide
atggccttaccagtgaccgccttgctcctgccgctggccttgctgctccacgccgccaggccggacattcagatgacacagagccctagcagcctgagcgcctctgtgggagacagagtgaccatcacatgcaagagcagccagagcgtgctgtactccagcaatcagaagaactacctggcctggttccagcagaagcctggcaaggctcctaagctgctgatctactgggccagcaccagagaaagcggcgtgccaagcagattttctggcagcggctctggcaccgacttcaccctgacaatatccagcctccagcctgaggacttcgccacctacttttgccaccagtacctgagcagctacacattcggacagggcaccaaggtggaaatcaagcggctcgaggggaaaccaattcccaaccctcttctgggactggattcaaccggcagcggcgaggacctgaagaacgtgttcccacctgaggtggccgtgttcgagcctagcgaggccgagatcagccacacccagaaagccaccctcgtgtgcctggctaccggcttctaccccgaccatgtggaactgtcttggtgggtcaacggcaaagaggtgcacagcggcgtgtctaccgacccccagccactgaaagaacagcccgccctgaacgacagccggtactgcctgagcagcagactgagagtgtccgccaccttctggcagaacccccggaaccacttcagatgccaggtgcagttctacggcctgagcgagaacgacgagtggacccaggacagagccaagcccgtgacccagatcgtgtctgccgaagcctggggcagagccgattgcggatcccagagcttcggcctgctggaccccaagctgtgctacctgctggatggcatcctgttcatctacggcgtgatcctgaccgccctgttcctgaaacggggcagaaagaaactcctgtatatattcaaacaaccatttatgagaccagtacaaactactcaagaggaagatggctgtagctgccgatttccagaagaagaagaaggaggatgtgaactgagagtgaagttcagcagaagcgccgacgcccctgcctaccagcagggacagaaccaactgtacaacgagctgaacctgggcagacgggaagagtacgacgtgctggacaagcggagaggcagggaccctgagatgggcggaaagccccagcggagaaagaacccccaggaaggactgtataacgaactccagaaagacaagatggccgaagcctacagcgagatcggcatgaagggcgagcggagaagaggcaagggccacgatggcctgtaccagggcctgagcaccgccaccaaggacacctatgacgccctgcacatgcaggccctgcctccaagaagggccaagcgatctggatctggagcaacaaacttctcactactcaaacaagcaggtgacgtggaggagaatcccgggcctactagtatggactggatttggcgcatccttttccttgtcggcgctgctaccggcgcgcattccttcgaagaggtgcagctggttgaatctggcggaggactggttcagcctggcggatctctgagactgtcttgtgccgccagcggcttcaccttcaccacctattggatgcactgggtccgacaggcccctggcaaaggacttgagtgggtcggatatatcaggcccagcaccggctacacagagtacaaccagaagttcaaggaccgcttcaccatcagcgccgacaccagcaagaataccgcctacctccagatgaacagcctgagagccgaggacaccgccgtgtactactgtgccagatccagatggctgctggactattggggccagggcacactggttacagtttctacgcgtgagcagaaactgatctcggaagaggatctggggagcggcatccagaaccctgatcctgccgtgtaccagctgcgggatagcaagagcagcgacaagagcgtgtgtctgttcaccgacttcgacagccagaccaacgtgtcccagagcaaggactccgacgtgtacatcaccgataagaccgtgctggacatgcggagcatggacttcaagagcaactccgccgtggcctggtccaacaagtccgatttcgcctgcgccaacgccttcaacaacagcattatccccgaggacacattcttcccaagccccgagagcagctgcggtacccagagttttgggttgttggaccctaaattgtgctatctgttggacggaatcctgttcatttacggagtgatcctgaccgcattgttcctgaagagaggccggaagaagctgctgtacatcttcaagcagcctttcatgcggcccgtgcagaccacccaggaagaggacggctgctcctgccggttccccgaggaagaagaaggcggctgcgagctgcgggttaagttttccagatccgcagacgcacccgcttaccaacaagggcagaaccaactctacaatgaacttaatttggggcggagggaagagtacgacgttctggacaaaaggaggggacgagatcccgagatgggcggaaagcctcagcgaaggaagaatccgcaagaggggctttataacgaactccagaaagataaaatggcagaagcctatagtgagattgggatgaagggagaaaggaggaggggtaaaggtcacgatgggttgtaccaaggattgagcacagccactaaagatacctatgatgcgctccacatgcaggccctgccgccaaga

SEQ ID NO: 10403 - DNA, 2469 bp, Artificial Sequence
  Synthetic Polynucloetide
atggccttaccagtgaccgccttgctcctgccgctggccttgctgctccacgccgccaggccggacattcagatgacacagagccctagcagcctgagcgcctctgtgggagacagagtgaccatcacatgcaagagcagccagagcgtgctgtactccagcaatcagaagaactacctggcctggttccagcagaagcctggcaaggctcctaagctgctgatctactgggccagcaccagagaaagcggcgtgccaagcagattttctggcagcggctctggcaccgacttcaccctgacaatatccagcctccagcctgaggacttcgccacctacttttgccaccagtacctgagcagctacacattcggacagggcaccaaggtggaaatcaagcggctcgagcagagcttcggcctgctggaccccaagctgtgctacctgctggatggcatcctgttcatctacggcgtgatcctgaccgccctgttcctgagagtgaagttcagcagaagcgccgacgcccctgcctaccagcagggacagaaccaactgtacaacgagctgaacctgggcagacgggaagagtacgacgtgctggacaagcggagaggcagggaccctgagatgggcggaaagccccagcggagaaagaacccccaggaaggactgtataacgaactccagaaagacaagatggccgaagcctacagcgagatcggcatgaagggcgagcggagaagaggcaagggccacgatggcctgtaccagggcctgagcaccgccaccaaggacacctatgacgccctgcacatgcaggccctgcctccaagaagggccaagcgatctggatctggagcaacaaacttctcactactcaaacaagcaggtgacgtggaggagaatcccgggcctactagtatggactggatttggcgcatccttttccttgtcggcgctgctaccggcgcgcattccttcgaagaggtgcagctggttgaatctggcggaggactggttcagcctggcggatctctgagactgtcttgtgccgccagcggcttcaccttcaccacctattggatgcactgggtccgacaggcccctggcaaaggacttgagtgggtcggatatatcaggcccagcaccggctacacagagtacaaccagaagttcaaggaccgcttcaccatcagcgccgacaccagcaagaataccgcctacctccagatgaacagcctgagagccgaggacaccgccgtgtactactgtgccagatccagatggctgctggactattggggccagggcacactggttacagtttctacgcgtcagagttttgggttgttggaccctaaattgtgctatctgttggacggaatcctgttcatttacggagtgatcctgaccgcattgttcctgcgggttaagttttccagatccgcagacgcacccgcttaccaacaagggcagaaccaactctacaatgaacttaatttggggcggagggaagagtacgacgttctggacaaaaggaggggacgagatcccgagatgggcggaaagcctcagcgaaggaagaatccgcaagaggggctttataacgaactccagaaagataaaatggcagaagcctatagtgagattgggatgaagggagaaaggaggaggggtaaaggtcacgatgggttgtaccaaggattgagcacagccactaaagatacctatgatgcgctccacatgcaggccctgccgccaagacgcgccaagagaagcggatctggcgtgaagcagaccctgaatttcgacctgctgaagctggctggcgacgtggaatccaacccaggcccttctagaggccatatgaccgagtacaagcccacggtgcgcctcgccacccgcgacgacgtccccagggccgtacgcaccctcgccgccgcgttcgccgactaccccgccacgcgccacaccgtcgatccggaccgccacatcgagcgggtcaccgagctgcaagaactcttcctcacgcgcgtcgggctcgacatcggcaaggtgtgggtcgcggacgacggcgccgcggtggcggtctggaccacgccggagagcgtcgaagcgggggcggtgttcgccgagatcggcccgcgcatggccgagttgagcggttcccggctggccgcgcagcaacagatggaaggcctcctggcgccgcaccggcccaaggagcccgcgtggttcctggccaccgtcggcgtctcgcccgaccaccagggcaagggtctgggcagcgccgtcgtgctccccggagtggaggcggccgagcgcgccggggtgcccgccttcctggagacctccgcgccccgcaacctccccttctacgagcggctcggcttcaccgtcaccgccgacgtcgaggtgcccgaaggaccgcgcacctggtgcatgacccgcaagcccggtgcctga

SEQ ID NO: 10404 - DNA, 1941 bp, Artificial Sequence
  Synthetic Polynucloetide
atggccttaccagtgaccgccttgctcctgccgctggccttgctgctccacgccgccaggccggacattcagatgacacagagccctagcagcctgagcgcctctgtgggagacagagtgaccatcacatgcaagagcagccagagcgtgctgtactccagcaatcagaagaactacctggcctggttccagcagaagcctggcaaggctcctaagctgctgatctactgggccagcaccagagaaagcggcgtgccaagcagattttctggcagcggctctggcaccgacttcaccctgacaatatccagcctccagcctgaggacttcgccacctacttttgccaccagtacctgagcagctacacattcggacagggcaccaaggtggaaatcaagcggctcgagggacagcctaaggccaatcctaccgtgacactgttccctccaagcagcgaagaactccaggccaacaaggccacacttgtgtgcctgatctccgacttctaccctggggctgtgacagtggcttggaaggccgatggatctcctgtgaaagccggcgtggaaaccaccaagccatccaagcagagcaacaacaaatacgccgccagctcctacctgagcctgacacctgagcagtggaagtcccacagatcctacagctgccaagtgacccacgaaggcagcaccgtggaaaagacagtggcccctacagagtgcagccccatcaagaccgatgtgattacaatggaccccaaggacaactgctccaaggacgccaacgataccctgctgctccagctgaccaacaccagcgcctactacatgtacttgttgctgctgctgaagtccgtggtgtacttcgccatcatcacatgctgcctgctgcggagaaccgccttctgctgcaacggcgagaagtctagggccaagcgatctggatctggagcaacaaacttctcactactcaaacaagcaggtgacgtggaggagaatcccgggcctactagtatggactggatttggcgcatccttttccttgtcggcgctgctaccggcgcgcattccttcgaagaggtgcagctggttgaatctggcggaggactggttcagcctggcggatctctgagactgtcttgtgccgccagcggcttcaccttcaccacctattggatgcactgggtccgacaggcccctggcaaaggacttgagtgggtcggatatatcaggcccagcaccggctacacagagtacaaccagaagttcaaggaccgcttcaccatcagcgccgacaccagcaagaataccgcctacctccagatgaacagcctgagagccgaggacaccgccgtgtactactgtgccagatccagatggctgctggactattggggccagggcacactggttacagtttctacgcgtgcctctacaaagggaccctccgtgtttcctctggctcccagcagcaagtctacaagcggaggaacagccgctctgggctgcctggtcaaggattactttcccgagcctgtgaccgtgtcctggaatagcggagcactgacaagcggcgtgcacacctttccagccgtgctgcaaagcagcggcctgtactctctgagcagcgtggtcacagtgcctagctctagcctgggcacccagacctacatctgcaatgtgaaccacaagcctagcaacaccaaggtggacaagagagtggaacccaagagctgtgaagtgaaaaccgactccaccgaccacgtgaagcccaaagagacagagaacaccaagcagcccagcaagagctgccacaagcccaaggccatcgtgcacaccgagaaagtgaacatgatgagcctgaccgtgctgggcctgcggatgctgttcgccaaaaccgtggccgtgaacttcctgctgaccgccaagctgttcttcctc

SEQ ID NO: 10405 - DNA, 1875 bp, Artificial Sequence
  Synthetic Polynucloetide
atggccttaccagtgaccgccttgctcctgccgctggccttgctgctccacgccgccaggccggacattcagatgacacagagccctagcagcctgagcgcctctgtgggagacagagtgaccatcacatgcaagagcagccagagcgtgctgtactccagcaatcagaagaactacctggcctggttccagcagaagcctggcaaggctcctaagctgctgatctactgggccagcaccagagaaagcggcgtgccaagcagattttctggcagcggctctggcaccgacttcaccctgacaatatccagcctccagcctgaggacttcgccacctacttttgccaccagtacctgagcagctacacattcggacagggcaccaaggtggaaatcaagcggctcgagggacagcctaaggccaatcctaccgtgacactgttccctccaagcagcgaagaactccaggccaacaaggccacacttgtgtgcctgatctccgacttctaccctggggctgtgacagtggcttggaaggccgatggatctcctgtgaaagccggcgtggaaaccaccaagccatccaagcagagcaacaacaaatacgccgccagctcctacctgagcctgacacctgagcagtggaagtcccacagatcctacagctgccaagtgacccacgaaggcagcaccgtggaaaagacagtggcccctacagagtgcagcggcagagccgattgcggcatcaccagcgccagctaccaccagggcgtgctgagcgccaccatcctgtacgagatcctgctgggcaaggccaccctgtacgccgtgctggtgtctgccctggtgctgatggctatggtcaagcggaaggacagccggggaagggccaagcgatctggatctggagcaacaaacttctcactactcaaacaagcaggtgacgtggaggagaatcccgggcctactagtatggactggatttggcgcatccttttccttgtcggcgctgctaccggcgcgcattccttcgaagaggtgcagctggttgaatctggcggaggactggttcagcctggcggatctctgagactgtcttgtgccgccagcggcttcaccttcaccacctattggatgcactgggtccgacaggcccctggcaaaggacttgagtgggtcggatatatcaggcccagcaccggctacacagagtacaaccagaagttcaaggaccgcttcaccatcagcgccgacaccagcaagaataccgcctacctccagatgaacagcctgagagccgaggacaccgccgtgtactactgtgccagatccagatggctgctggactattggggccagggcacactggttacagtttctacgcgtgcctctacaaagggaccctccgtgtttcctctggctcccagcagcaagtctacaagcggaggaacagccgctctgggctgcctggtcaaggattactttcccgagcctgtgaccgtgtcctggaatagcggagcactgacaagcggcgtgcacacctttccagccgtgctgcaaagcagcggcctgtactctctgagcagcgtggtcacagtgcctagctctagcctgggcacccagacctacatctgcaatgtgaaccacaagcctagcaacaccaaggtggacaagagagtggaacccaagagctgtatccccgaggacacattcttcccaagcagcgacgtgccctgcgacgtgaagctggtggaaaagagcttcgagacagacaccaacctgaacttccagaacctgagcgtgatcggcttcagaatcctgctgctgaaagtggccggctttaacctgctgatgaccctgcggctgtggtccagc

SEQ ID NO: 10406 - DNA, 1875 bp, Artificial Sequence
  Synthetic Polynucloetide
atggccttaccagtgaccgccttgctcctgccgctggccttgctgctccacgccgccaggccggacattcagatgacacagagccctagcagcctgagcgcctctgtgggagacagagtgaccatcacatgcaagagcagccagagcgtgctgtactccagcaatcagaagaactacctggcctggttccagcagaagcctggcaaggctcctaagctgctgatctactgggccagcaccagagaaagcggcgtgccaagcagattttctggcagcggctctggcaccgacttcaccctgacaatatccagcctccagcctgaggacttcgccacctacttttgccaccagtacctgagcagctacacattcggacagggcaccaaggtggaaatcaagcggctcgagggacagcctaaggccaatcctaccgtgacactgttccctccaagcagcgaagaactccaggccaacaaggccacacttgtgtgcctgatctccgacttctaccctggggctgtgacagtggcttggaaggccgatggatctcctgtgaaagccggcgtggaaaccaccaagccatccaagcagagcaacaacaaatacgccgccagctcctacctgagcctgacacctgagcagtggaagtcccacagatcctacagctgccaagtgacccacgaaggcagcaccgtggaaaagacagtggcccctacagagtgcagcggcagagccgattgcggctttaccagcgagagctaccagcagggcgtgctgagcgccaccatcctgtacgagatcctgctgggcaaggccaccctgtacgccgtgctggtgtctgccctggtgctgatggctatggtcaagcggaaggacagccggggaagggccaagcgatctggatctggagcaacaaacttctcactactcaaacaagcaggtgacgtggaggagaatcccgggcctactagtatggactggatttggcgcatccttttccttgtcggcgctgctaccggcgcgcattccttcgaagaggtgcagctggttgaatctggcggaggactggttcagcctggcggatctctgagactgtcttgtgccgccagcggcttcaccttcaccacctattggatgcactgggtccgacaggcccctggcaaaggacttgagtgggtcggatatatcaggcccagcaccggctacacagagtacaaccagaagttcaaggaccgcttcaccatcagcgccgacaccagcaagaataccgcctacctccagatgaacagcctgagagccgaggacaccgccgtgtactactgtgccagatccagatggctgctggactattggggccagggcacactggttacagtttctacgcgtgcctctacaaagggaccctccgtgtttcctctggctcccagcagcaagtctacaagcggaggaacagccgctctgggctgcctggtcaaggattactttcccgagcctgtgaccgtgtcctggaatagcggagcactgacaagcggcgtgcacacctttccagccgtgctgcaaagcagcggcctgtactctctgagcagcgtggtcacagtgcctagctctagcctgggcacccagacctacatctgcaatgtgaaccacaagcctagcaacaccaaggtggacaagagagtggaacccaagagctgtatccccgaggacacattcttcccaagccccgagagcagctgcgacgtgaagctggtggaaaagagcttcgagacagacaccaacctgaacttccagaacctgagcgtgatcggcttcagaatcctgctgctgaaagtggccggctttaacctgctgatgaccctgcggctgtggtccagc

SEQ ID NO: 10407 - DNA, 1353 bp, Artificial Sequence
  Synthetic Polynucloetide
atggccttaccagtgaccgccttgctcctgccgctggccttgctgctccacgccgccaggccggacattcagatgacacagagccctagcagcctgagcgcctctgtgggagacagagtgaccatcacatgcaagagcagccagagcgtgctgtactccagcaatcagaagaactacctggcctggttccagcagaagcctggcaaggctcctaagctgctgatctactgggccagcaccagagaaagcggcgtgccaagcagattttctggcagcggctctggcaccgacttcaccctgacaatatccagcctccagcctgaggacttcgccacctacttttgccaccagtacctgagcagctacacattcggacagggcaccaaggtggaaatcaagcggggcggaggcggaagtggaggcggaggatctggcggcggaggctctgaggtgcagctggttgaatctggcggaggactggttcagcctggcggatctctgagactgtcttgtgccgccagcggcttcaccttcaccacctattggatgcactgggtccgacaggcccctggcaaaggacttgagtgggtcggatatatcaggcccagcaccggctacacagagtacaaccagaagttcaaggaccgcttcaccatcagcgccgacaccagcaagaataccgcctacctccagatgaacagcctgagagccgaggacaccgccgtgtactactgtgccagatccagatggctgctggactattggggccagggcacactggttacagtttctacgcgtgacggtaacgaggagatgggaggaatcactcaaaccccttacaaagtctcaatttcaggaacaactgttatccttacatgtccccagtatcctggcagcgagatcctttggcagcataacgacaagaatatagggggagatgaagacgataagaatatcggatctgacgaggatcacttgagcctgaaagagttctccgagcttgaacaaagcggatattatgtgtgctatccgcgcgggtcaaagccggaagacgctaacttttacctttatctccgagccagagtgtgcgaaaattgcatggaaatggacgttatgtccgttgctacaatagttatcgtagatatatgcatcacgggtggactgcttctgctggtttattattggtccaagaatagaaaggccaaagctaaacccgtgaccagaggcgctggcgcaggcggaaggcaaaggggacaaaacaaagaacggccaccaccagtgccaaatccagattatgagcctattcggaaaggacagagggacctgtactctggcctgaatcagagaagaatc

SEQ ID NO: 10408 - DNA, 1248 bp, Artificial Sequence
  Synthetic Polynucloetide
atggccttaccagtgaccgccttgctcctgccgctggccttgctgctccacgccgccaggccggacattcagatgacacagagccctagcagcctgagcgcctctgtgggagacagagtgaccatcacatgcaagagcagccagagcgtgctgtactccagcaatcagaagaactacctggcctggttccagcagaagcctggcaaggctcctaagctgctgatctactgggccagcaccagagaaagcggcgtgccaagcagattttctggcagcggctctggcaccgacttcaccctgacaatatccagcctccagcctgaggacttcgccacctacttttgccaccagtacctgagcagctacacattcggacagggcaccaaggtggaaatcaagcggggcggaggcggaagtggaggcggaggatctggcggcggaggctctgaggtgcagctggttgaatctggcggaggactggttcagcctggcggatctctgagactgtcttgtgccgccagcggcttcaccttcaccacctattggatgcactgggtccgacaggcccctggcaaaggacttgagtgggtcggatatatcaggcccagcaccggctacacagagtacaaccagaagttcaaggaccgcttcaccatcagcgccgacaccagcaagaataccgcctacctccagatgaacagcctgagagccgaggacaccgccgtgtactactgtgccagatccagatggctgctggactattggggccagggcacactggttacagtttctacgcgtttcaagatccccatcgaggaactggaagatcgggtgttcgtgaactgcaacacctctatcacctgggtggaaggcaccgtgggaacactgctgagcgacatcaccagactggacctcggcaagcggattctggaccctcggggcatctacagatgcaacggcaccgacatctacaaggacaaagaaagcaccgtgcaggtccactacagaatgtgccagtcctgcgtggaactggaccctgctacagtggccggcatcatcgtgaccgatgtgatcgctactctgctgctggctctgggagtgttctgcttcgccggacacgaaacaggcagactgtctggcgctgccgatacacaggccctgctgagaaacgaccaagtgtatcagcccctgcgcgacagagatgatgcccagtattctcacctcggcggcaactgggctagaaacaag

SEQ ID NO: 10409 - DNA, 1278 bp, Artificial Sequence
  Synthetic Polynucloetide
atggccttaccagtgaccgccttgctcctgccgctggccttgctgctccacgccgccaggccggacattcagatgacacagagccctagcagcctgagcgcctctgtgggagacagagtgaccatcacatgcaagagcagccagagcgtgctgtactccagcaatcagaagaactacctggcctggttccagcagaagcctggcaaggctcctaagctgctgatctactgggccagcaccagagaaagcggcgtgccaagcagattttctggcagcggctctggcaccgacttcaccctgacaatatccagcctccagcctgaggacttcgccacctacttttgccaccagtacctgagcagctacacattcggacagggcaccaaggtggaaatcaagcggggcggaggcggaagtggaggcggaggatctggcggcggaggctctgaggtgcagctggttgaatctggcggaggactggttcagcctggcggatctctgagactgtcttgtgccgccagcggcttcaccttcaccacctattggatgcactgggtccgacaggcccctggcaaaggacttgagtgggtcggatatatcaggcccagcaccggctacacagagtacaaccagaagttcaaggaccgcttcaccatcagcgccgacaccagcaagaataccgcctacctccagatgaacagcctgagagccgaggacaccgccgtgtactactgtgccagatccagatggctgctggactattggggccagggcacactggttacagtttctacgcgtcagagcatcaagggcaaccacctggtcaaggtgtacgactaccaagaggacggcagcgtgctgctgacatgtgatgccgaggccaagaacatcacctggtttaaggacggcaagatgatcggcttcctgaccgaggacaagaagaagtggaacctgggcagcaacgctaaggaccccagaggcatgtatcagtgcaagggcagccagaacaagagcaagcccctccaggtgtactaccggatgtgccagaactgcatcgagctgaacgccgctaccatcagcggctttctgttcgccgagatcgtgtccatcttcgtgctggccgtgggcgtgtactttatcgctggacaggatggcgtgcggcagagcagagcttccgataagcaaaccctgctgcctaacgaccagctgtaccagcctctgaaggacagagaggacgaccagtacagccacctccagggcaatcagctgagaagaaac

SEQ ID NO: 10410 - DNA, 1227 bp, Artificial Sequence
  Synthetic Polynucloetide
atggccttaccagtgaccgccttgctcctgccgctggccttgctgctccacgccgccaggccggacattcagatgacacagagccctagcagcctgagcgcctctgtgggagacagagtgaccatcacatgcaagagcagccagagcgtgctgtactccagcaatcagaagaactacctggcctggttccagcagaagcctggcaaggctcctaagctgctgatctactgggccagcaccagagaaagcggcgtgccaagcagattttctggcagcggctctggcaccgacttcaccctgacaatatccagcctccagcctgaggacttcgccacctacttttgccaccagtacctgagcagctacacattcggacagggcaccaaggtggaaatcaagcggggcggaggcggaagtggaggcggaggatctggcggcggaggctctgaggtgcagctggttgaatctggcggaggactggttcagcctggcggatctctgagactgtcttgtgccgccagcggcttcaccttcaccacctattggatgcactgggtccgacaggcccctggcaaaggacttgagtgggtcggatatatcaggcccagcaccggctacacagagtacaaccagaagttcaaggaccgcttcaccatcagcgccgacaccagcaagaataccgcctacctccagatgaacagcctgagagccgaggacaccgccgtgtactactgtgccagatccagatggctgctggactattggggccagggcacactggttacagtttctacgcgtcagagttttgggttgttggaccctaaattgtgctatctgttggacggaatcctgttcatttacggagtgatcctgaccgcattgttcctgcgggttaagttttccagatccgcagacgcacccgcttaccaacaagggcagaaccaactctacaatgaacttaatttggggcggagggaagagtacgacgttctggacaaaaggaggggacgagatcccgagatgggcggaaagcctcagcgaaggaagaatccgcaagaggggctttataacgaactccagaaagataaaatggcagaagcctatagtgagattgggatgaagggagaaaggaggaggggtaaaggtcacgatgggttgtaccaaggattgagcacagccactaaagatacctatgatgcgctccacatgcaggccctgccgccaaga

SEQ ID NO: 10411 - DNA, 1353 bp, Artificial Sequence
  Synthetic Polynucloetide
atggccttaccagtgaccgccttgctcctgccgctggccttgctgctccacgccgccaggccggaggtgcagctggttgaatctggcggaggactggttcagcctggcggatctctgagactgtcttgtgccgccagcggcttcaccttcaccacctattggatgcactgggtccgacaggcccctggcaaaggacttgagtgggtcggatatatcaggcccagcaccggctacacagagtacaaccagaagttcaaggaccgcttcaccatcagcgccgacaccagcaagaataccgcctacctccagatgaacagcctgagagccgaggacaccgccgtgtactactgtgccagatccagatggctgctggactattggggccagggcacactggttacagtttctggcggaggcggaagtggaggcggaggatctggcggcggaggctctgacattcagatgacacagagccctagcagcctgagcgcctctgtgggagacagagtgaccatcacatgcaagagcagccagagcgtgctgtactccagcaatcagaagaactacctggcctggttccagcagaagcctggcaaggctcctaagctgctgatctactgggccagcaccagagaaagcggcgtgccaagcagattttctggcagcggctctggcaccgacttcaccctgacaatatccagcctccagcctgaggacttcgccacctacttttgccaccagtacctgagcagctacacattcggacagggcaccaaggtggaaatcaagcggacgcgtgacggtaacgaggagatgggaggaatcactcaaaccccttacaaagtctcaatttcaggaacaactgttatccttacatgtccccagtatcctggcagcgagatcctttggcagcataacgacaagaatatagggggagatgaagacgataagaatatcggatctgacgaggatcacttgagcctgaaagagttctccgagcttgaacaaagcggatattatgtgtgctatccgcgcgggtcaaagccggaagacgctaacttttacctttatctccgagccagagtgtgcgaaaattgcatggaaatggacgttatgtccgttgctacaatagttatcgtagatatatgcatcacgggtggactgcttctgctggtttattattggtccaagaatagaaaggccaaagctaaacccgtgaccagaggcgctggcgcaggcggaaggcaaaggggacaaaacaaagaacggccaccaccagtgccaaatccagattatgagcctattcggaaaggacagagggacctgtactctggcctgaatcagagaagaatc

SEQ ID NO: 10412 - DNA, 1248 bp, Artificial Sequence
  Synthetic Polynucloetide
atggccttaccagtgaccgccttgctcctgccgctggccttgctgctccacgccgccaggccggaggtgcagctggttgaatctggcggaggactggttcagcctggcggatctctgagactgtcttgtgccgccagcggcttcaccttcaccacctattggatgcactgggtccgacaggcccctggcaaaggacttgagtgggtcggatatatcaggcccagcaccggctacacagagtacaaccagaagttcaaggaccgcttcaccatcagcgccgacaccagcaagaataccgcctacctccagatgaacagcctgagagccgaggacaccgccgtgtactactgtgccagatccagatggctgctggactattggggccagggcacactggttacagtttctggcggaggcggaagtggaggcggaggatctggcggcggaggctctgacattcagatgacacagagccctagcagcctgagcgcctctgtgggagacagagtgaccatcacatgcaagagcagccagagcgtgctgtactccagcaatcagaagaactacctggcctggttccagcagaagcctggcaaggctcctaagctgctgatctactgggccagcaccagagaaagcggcgtgccaagcagattttctggcagcggctctggcaccgacttcaccctgacaatatccagcctccagcctgaggacttcgccacctacttttgccaccagtacctgagcagctacacattcggacagggcaccaaggtggaaatcaagcggacgcgtttcaagatccccatcgaggaactggaagatcgggtgttcgtgaactgcaacacctctatcacctgggtggaaggcaccgtgggaacactgctgagcgacatcaccagactggacctcggcaagcggattctggaccctcggggcatctacagatgcaacggcaccgacatctacaaggacaaagaaagcaccgtgcaggtccactacagaatgtgccagtcctgcgtggaactggaccctgctacagtggccggcatcatcgtgaccgatgtgatcgctactctgctgctggctctgggagtgttctgcttcgccggacacgaaacaggcagactgtctggcgctgccgatacacaggccctgctgagaaacgaccaagtgtatcagcccctgcgcgacagagatgatgcccagtattctcacctcggcggcaactgggctagaaacaag

SEQ ID NO: 10413 - DNA, 1278 bp, Artificial Sequence
  Synthetic Polynucloetide
atggccttaccagtgaccgccttgctcctgccgctggccttgctgctccacgccgccaggccggaggtgcagctggttgaatctggcggaggactggttcagcctggcggatctctgagactgtcttgtgccgccagcggcttcaccttcaccacctattggatgcactgggtccgacaggcccctggcaaaggacttgagtgggtcggatatatcaggcccagcaccggctacacagagtacaaccagaagttcaaggaccgcttcaccatcagcgccgacaccagcaagaataccgcctacctccagatgaacagcctgagagccgaggacaccgccgtgtactactgtgccagatccagatggctgctggactattggggccagggcacactggttacagtttctggcggaggcggaagtggaggcggaggatctggcggcggaggctctgacattcagatgacacagagccctagcagcctgagcgcctctgtgggagacagagtgaccatcacatgcaagagcagccagagcgtgctgtactccagcaatcagaagaactacctggcctggttccagcagaagcctggcaaggctcctaagctgctgatctactgggccagcaccagagaaagcggcgtgccaagcagattttctggcagcggctctggcaccgacttcaccctgacaatatccagcctccagcctgaggacttcgccacctacttttgccaccagtacctgagcagctacacattcggacagggcaccaaggtggaaatcaagcggacgcgtcagagcatcaagggcaaccacctggtcaaggtgtacgactaccaagaggacggcagcgtgctgctgacatgtgatgccgaggccaagaacatcacctggtttaaggacggcaagatgatcggcttcctgaccgaggacaagaagaagtggaacctgggcagcaacgctaaggaccccagaggcatgtatcagtgcaagggcagccagaacaagagcaagcccctccaggtgtactaccggatgtgccagaactgcatcgagctgaacgccgctaccatcagcggctttctgttcgccgagatcgtgtccatcttcgtgctggccgtgggcgtgtactttatcgctggacaggatggcgtgcggcagagcagagcttccgataagcaaaccctgctgcctaacgaccagctgtaccagcctctgaaggacagagaggacgaccagtacagccacctccagggcaatcagctgagaagaaac

SEQ ID NO: 10414 - DNA, 1227 bp, Artificial Sequence
  Synthetic Polynucloetide
atggccttaccagtgaccgccttgctcctgccgctggccttgctgctccacgccgccaggccggaggtgcagctggttgaatctggcggaggactggttcagcctggcggatctctgagactgtcttgtgccgccagcggcttcaccttcaccacctattggatgcactgggtccgacaggcccctggcaaaggacttgagtgggtcggatatatcaggcccagcaccggctacacagagtacaaccagaagttcaaggaccgcttcaccatcagcgccgacaccagcaagaataccgcctacctccagatgaacagcctgagagccgaggacaccgccgtgtactactgtgccagatccagatggctgctggactattggggccagggcacactggttacagtttctggcggaggcggaagtggaggcggaggatctggcggcggaggctctgacattcagatgacacagagccctagcagcctgagcgcctctgtgggagacagagtgaccatcacatgcaagagcagccagagcgtgctgtactccagcaatcagaagaactacctggcctggttccagcagaagcctggcaaggctcctaagctgctgatctactgggccagcaccagagaaagcggcgtgccaagcagattttctggcagcggctctggcaccgacttcaccctgacaatatccagcctccagcctgaggacttcgccacctacttttgccaccagtacctgagcagctacacattcggacagggcaccaaggtggaaatcaagcggacgcgtcagagttttgggttgttggaccctaaattgtgctatctgttggacggaatcctgttcatttacggagtgatcctgaccgcattgttcctgcgggttaagttttccagatccgcagacgcacccgcttaccaacaagggcagaaccaactctacaatgaacttaatttggggcggagggaagagtacgacgttctggacaaaaggaggggacgagatcccgagatgggcggaaagcctcagcgaaggaagaatccgcaagaggggctttataacgaactccagaaagataaaatggcagaagcctatagtgagattgggatgaagggagaaaggaggaggggtaaaggtcacgatgggttgtaccaaggattgagcacagccactaaagatacctatgatgcgctccacatgcaggccctgccgccaaga

SEQ ID NO: 10415 - DNA, 1929 bp, Artificial Sequence
  Synthetic Polynucloetide
atggccttaccagtgaccgccttgctcctgccgctggccttgctgctccacgccgccaggccggacattcagatgacacagagccctagcagcctgagcgcctctgtgggagacagagtgaccatcacatgcaagagcagccagagcgtgctgtactccagcaatcagaagaactacctggcctggttccagcagaagcctggcaaggctcctaagctgctgatctactgggccagcaccagagaaagcggcgtgccaagcagattttctggcagcggctctggcaccgacttcaccctgacaatatccagcctccagcctgaggacttcgccacctacttttgccaccagtacctgagcagctacacattcggacagggcaccaaggtggaaatcaagcggggcggaggcggaagtggaggcggaggatctggcggcggaggctctgaggtgcagctggttgaatctggcggaggactggttcagcctggcggatctctgagactgtcttgtgccgccagcggcttcaccttcaccacctattggatgcactgggtccgacaggcccctggcaaaggacttgagtgggtcggatatatcaggcccagcaccggctacacagagtacaaccagaagttcaaggaccgcttcaccatcagcgccgacaccagcaagaataccgcctacctccagatgaacagcctgagagccgaggacaccgccgtgtactactgtgccagatccagatggctgctggactattggggccagggcacactggttacagtttctacgcgtgggagcggcatccagaaccctgatcctgccgtgtaccagctgcgggatagcaagagcagcgacaagagcgtgtgtctgttcaccgacttcgacagccagaccaacgtgtcccagagcaaggactccgacgtgtacatcaccgataagaccgtgctggacatgcggagcatggacttcaagagcaactccgccgtggcctggtccaacaagtccgatttcgcctgcgccaacgccttcaacaacagcattatccccgaggacacattcttcccaagccccgagagcagctgcgacgtgaagctggtggaaaagagcttcgagacagacaccaacctgaacttccagaacctgagcgtgatcggcttcagaatcctgctgctgaaagtggccggctttaacctgctgatgaccctgcggctgtggtccagccgcgccaagagaagcggatctggcgtgaagcagaccctgaatttcgacctgctgaagctggctggcgacgtggaatccaacccaggcccttctagaggccatatgaccgagtacaagcccacggtgcgcctcgccacccgcgacgacgtccccagggccgtacgcaccctcgccgccgcgttcgccgactaccccgccacgcgccacaccgtcgatccggaccgccacatcgagcgggtcaccgagctgcaagaactcttcctcacgcgcgtcgggctcgacatcggcaaggtgtgggtcgcggacgacggcgccgcggtggcggtctggaccacgccggagagcgtcgaagcgggggcggtgttcgccgagatcggcccgcgcatggccgagttgagcggttcccggctggccgcgcagcaacagatggaaggcctcctggcgccgcaccggcccaaggagcccgcgtggttcctggccaccgtcggcgtctcgcccgaccaccagggcaagggtctgggcagcgccgtcgtgctccccggagtggaggcggccgagcgcgccggggtgcccgccttcctggagacctccgcgccccgcaacctccccttctacgagcggctcggcttcaccgtcaccgccgacgtcgaggtgcccgaaggaccgcgcacctggtgcatgacccgcaagcccggtgcctga

SEQ ID NO: 10416 - DNA, 2025 bp, Artificial Sequence
  Synthetic Polynucloetide
atggccttaccagtgaccgccttgctcctgccgctggccttgctgctccacgccgccaggccggacattcagatgacacagagccctagcagcctgagcgcctctgtgggagacagagtgaccatcacatgcaagagcagccagagcgtgctgtactccagcaatcagaagaactacctggcctggttccagcagaagcctggcaaggctcctaagctgctgatctactgggccagcaccagagaaagcggcgtgccaagcagattttctggcagcggctctggcaccgacttcaccctgacaatatccagcctccagcctgaggacttcgccacctacttttgccaccagtacctgagcagctacacattcggacagggcaccaaggtggaaatcaagcggggcggaggcggaagtggaggcggaggatctggcggcggaggctctgaggtgcagctggttgaatctggcggaggactggttcagcctggcggatctctgagactgtcttgtgccgccagcggcttcaccttcaccacctattggatgcactgggtccgacaggcccctggcaaaggacttgagtgggtcggatatatcaggcccagcaccggctacacagagtacaaccagaagttcaaggaccgcttcaccatcagcgccgacaccagcaagaataccgcctacctccagatgaacagcctgagagccgaggacaccgccgtgtactactgtgccagatccagatggctgctggactattggggccagggcacactggttacagtttctctcgaggacctgaagaacgtgttcccacctgaggtggccgtgttcgagcctagcgaggccgagatcagccacacccagaaagccaccctcgtgtgcctggctaccggcttctaccccgaccatgtggaactgtcttggtgggtcaacggcaaagaggtgcacagcggcgtgtctaccgacccccagccactgaaagaacagcccgccctgaacgacagccggtactgcctgagcagcagactgagagtgtccgccaccttctggcagaacccccggaaccacttcagatgccaggtgcagttctacggcctgagcgagaacgacgagtggacccaggacagagccaagcccgtgacccagatcgtgtctgccgaagcctggggcagagccgattgcggctttaccagcgagagctaccagcagggcgtgctgagcgccaccatcctgtacgagatcctgctgggcaaggccaccctgtacgccgtgctggtgtctgccctggtgctgatggctatggtcaagcggaaggacagccggggaagggccaagcgatctggatctggagcaacaaacttctcactactcaaacaagcaggtgacgtggaggagaatcccgggcctactagaggccatatgaccgagtacaagcccacggtgcgcctcgccacccgcgacgacgtccccagggccgtacgcaccctcgccgccgcgttcgccgactaccccgccacgcgccacaccgtcgatccggaccgccacatcgagcgggtcaccgagctgcaagaactcttcctcacgcgcgtcgggctcgacatcggcaaggtgtgggtcgcggacgacggcgccgcggtggcggtctggaccacgccggagagcgtcgaagcgggggcggtgttcgccgagatcggcccgcgcatggccgagttgagcggttcccggctggccgcgcagcaacagatggaaggcctcctggcgccgcaccggcccaaggagcccgcgtggttcctggccaccgtcggcgtctcgcccgaccaccagggcaagggtctgggcagcgccgtcgtgctccccggagtggaggcggccgagcgcgccggggtgcccgccttcctggagacctccgcgccccgcaacctccccttctacgagcggctcggcttcaccgtcaccgccgacgtcgaggtgcccgaaggaccgcgcacctggtgcatgacccgcaagcccggtgcctga

SEQ ID NO: 10417 - DNA, 2175 bp, Artificial Sequence
  Synthetic Polynucloetide
atggccttaccagtgaccgccttgctcctgccgctggccttgctgctccacgccgccaggccggacattcagatgacacagagccctagcagcctgagcgcctctgtgggagacagagtgaccatcacatgcaagagcagccagagcgtgctgtactccagcaatcagaagaactacctggcctggttccagcagaagcctggcaaggctcctaagctgctgatctactgggccagcaccagagaaagcggcgtgccaagcagattttctggcagcggctctggcaccgacttcaccctgacaatatccagcctccagcctgaggacttcgccacctacttttgccaccagtacctgagcagctacacattcggacagggcaccaaggtggaaatcaagcggggcggaggcggaagtggaggcggaggatctggcggcggaggctctgaggtgcagctggttgaatctggcggaggactggttcagcctggcggatctctgagactgtcttgtgccgccagcggcttcaccttcaccacctattggatgcactgggtccgacaggcccctggcaaaggacttgagtgggtcggatatatcaggcccagcaccggctacacagagtacaaccagaagttcaaggaccgcttcaccatcagcgccgacaccagcaagaataccgcctacctccagatgaacagcctgagagccgaggacaccgccgtgtactactgtgccagatccagatggctgctggactattggggccagggcacactggttacagtttctacgcgtgagcagaaactgatctcggaagaggatctggggagcggcaccccattcccttctctggcccctcccatcatgctgctggtggacggcaagcagcagatggtggtcgtgtgcctggtgctggatgtggccccacctggactggacagccccatctggtttagcgccggcaatggctctgccctggacgcctttacctacggcccaagccctgccaccgatggcacctggacaaatctggcccacctgagcctgcccagcgaggaactggcttcttgggagcctctcgtgtgccacacaggacctggcgctgagggacacagcagatccacccagcctatgcacctgtctggcgaggccagcaccgccagaacctgtcctcaggaacctctgagaggcacccctggcggagcactgtggctgggagtgctgagactgctgctgttcaagctgctgctgtttgacctgctgctgacctgctcctgtctgtgcgatcctgccggccctctgccttctcctgccaccaccacaagactgagagccctgggcagccacagactgcaccctgccacagagacaggcggcagagaggccacaagcagccctagaccccagcccagagacagaagatggggcgataccccccctggcagaaagcctggatctccagtccgcgccaagagaagcggatctggcgtgaagcagaccctgaatttcgacctgctgaagctggctggcgacgtggaatccaacccaggcccttctagatctagaggccatatgaccgagtacaagcccacggtgcgcctcgccacccgcgacgacgtccccagggccgtacgcaccctcgccgccgcgttcgccgactaccccgccacgcgccacaccgtcgatccggaccgccacatcgagcgggtcaccgagctgcaagaactcttcctcacgcgcgtcgggctcgacatcggcaaggtgtgggtcgcggacgacggcgccgcggtggcggtctggaccacgccggagagcgtcgaagcgggggcggtgttcgccgagatcggcccgcgcatggccgagttgagcggttcccggctggccgcgcagcaacagatggaaggcctcctggcgccgcaccggcccaaggagcccgcgtggttcctggccaccgtcggcgtctcgcccgaccaccagggcaagggtctgggcagcgccgtcgtgctccccggagtggaggcggccgagcgcgccggggtgcccgccttcctggagacctccgcgccccgcaacctccccttctacgagcggctcggcttcaccgtcaccgccgacgtcgaggtgcccgaaggaccgcgcacctggtgcatgacccgcaagcccggtgcctga

SEQ ID NO: 10418 - DNA, 1635 bp, Artificial Sequence
  Synthetic Polynucloetide
atggccttaccagtgaccgccttgctcctgccgctggccttgctgctccacgccgccaggccggacattcagatgacacagagccctagcagcctgagcgcctctgtgggagacagagtgaccatcacatgcaagagcagccagagcgtgctgtactccagcaatcagaagaactacctggcctggttccagcagaagcctggcaaggctcctaagctgctgatctactgggccagcaccagagaaagcggcgtgccaagcagattttctggcagcggctctggcaccgacttcaccctgacaatatccagcctccagcctgaggacttcgccacctacttttgccaccagtacctgagcagctacacattcggacagggcaccaaggtggaaatcaagcggctcgaggacctgaagaacgtgttcccacctgaggtggccgtgttcgagcctagcgaggccgagatcagccacacccagaaagccaccctcgtgtgcctggctaccggcttctaccccgaccatgtggaactgtcttggtgggtcaacggcaaagaggtgcacagcggcgtgtctaccgacccccagccactgaaagaacagcccgccctgaacgacagccggtactgcctgagcagcagactgagagtgtccgccaccttctggcagaacccccggaaccacttcagatgccaggtgcagttctacggcctgagcgagaacgacgagtggacccaggacagagccaagcccgtgacccagatcgtgtctgccgaagcctggggcagagccgattgcggctttaccagcgagagctaccagcagggcgtgctgagcgccaccatcctgtacgagatcctgctgggcaaggccaccctgtacgccgtgctggtgtctgccctggtgctgatggctatggtcaagcggaaggacagccggggaagggccaagcgatctggatctggagcaacaaacttctcactactcaaacaagcaggtgacgtggaggagaatcccgggcctactagaggccatatgaccgagtacaagcccacggtgcgcctcgccacccgcgacgacgtccccagggccgtacgcaccctcgccgccgcgttcgccgactaccccgccacgcgccacaccgtcgatccggaccgccacatcgagcgggtcaccgagctgcaagaactcttcctcacgcgcgtcgggctcgacatcggcaaggtgtgggtcgcggacgacggcgccgcggtggcggtctggaccacgccggagagcgtcgaagcgggggcggtgttcgccgagatcggcccgcgcatggccgagttgagcggttcccggctggccgcgcagcaacagatggaaggcctcctggcgccgcaccggcccaaggagcccgcgtggttcctggccaccgtcggcgtctcgcccgaccaccagggcaagggtctgggcagcgccgtcgtgctccccggagtggaggcggccgagcgcgccggggtgcccgccttcctggagacctccgcgccccgcaacctccccttctacgagcggctcggcttcaccgtcaccgccgacgtcgaggtgcccgaaggaccgcgcacctggtgcatgacccgcaagcccggtgcctga

SEQ ID NO: 10419 - DNA, 942 bp, Artificial Sequence
  Synthetic Polynucloetide
atggccttaccagtgaccgccttgctcctgccgctggccttgctgctccacgccgccaggccggacattcagatgacacagagccctagcagcctgagcgcctctgtgggagacagagtgaccatcacatgcaagagcagccagagcgtgctgtactccagcaatcagaagaactacctggcctggttccagcagaagcctggcaaggctcctaagctgctgatctactgggccagcaccagagaaagcggcgtgccaagcagattttctggcagcggctctggcaccgacttcaccctgacaatatccagcctccagcctgaggacttcgccacctacttttgccaccagtacctgagcagctacacattcggacagggcaccaaggtggaaatcaagcggctcgaggacctgaagaacgtgttcccacctgaggtggccgtgttcgagcctagcgaggccgagatcagccacacccagaaagccaccctcgtgtgcctggctaccggcttctaccccgaccatgtggaactgtcttggtgggtcaacggcaaagaggtgcacagcggcgtgtctaccgacccccagccactgaaagaacagcccgccctgaacgacagccggtactgcctgagcagcagactgagagtgtccgccaccttctggcagaacccccggaaccacttcagatgccaggtgcagttctacggcctgagcgagaacgacgagtggacccaggacagagccaagcccgtgacccagatcgtgtctgccgaagcctggggcagagccgattgcggctttaccagcgagagctaccagcagggcgtgctgagcgccaccatcctgtacgagatcctgctgggcaaggccaccctgtacgccgtgctggtgtctgccctggtgctgatggctatggtcaagcggaaggacagccgggga

SEQ ID NO: 10420 - DNA, 1335 bp, Artificial Sequence
  Synthetic Polynucloetide
atggactggatttggcgcatccttttccttgtcggcgctgctaccggcgcgcattccttcgaagaggtgcagctggttgaatctggcggaggactggttcagcctggcggatctctgagactgtcttgtgccgccagcggcttcaccttcaccacctattggatgcactgggtccgacaggcccctggcaaaggacttgagtgggtcggatatatcaggcccagcaccggctacacagagtacaaccagaagttcaaggaccgcttcaccatcagcgccgacaccagcaagaataccgcctacctccagatgaacagcctgagagccgaggacaccgccgtgtactactgtgccagatccagatggctgctggactattggggccagggcacactggttacagtttctacgcgtatccagaaccctgatcctgccgtgtaccagctgcgggatagcaagagcagcgacaagagcgtgtgtctgttcaccgacttcgacagccagaccaacgtgtcccagagcaaggactccgacgtgtacatcaccgataagaccgtgctggacatgcggagcatggacttcaagagcaactccgccgtggcctggtccaacaagtccgatttcgcctgcgccaacgccttcaacaacagcattatccccgaggacacattcttcccaagccccgagagcagctgcgacgtgaagctggtggaaaagagcttcgagacagacaccaacctgaacttccagaacctgagcgtgatcggcttcagaatcctgctgctgaaagtggccggctttaacctgctgatgaccctgcggctgtggtccagccgcgccaagagaagcggatctggcgtgaagcagaccctgaatttcgacctgctgaagctggctggcgacgtggaatccaacccaggcccttctagaggccatatggccaagcctttgtctcaagaagaatccaccctcattgaaagagcaacggctacaatcaacagcatccccatctctgaagactacagcgtcgccagcgcagctctctctagcgacggccgcatcttcactggtgtcaatgtatatcattttactgggggaccttgtgcagaactcgtggtgctgggcactgctgctgctgcggcagctggcaacctgacttgtatcgtcgcgatcggaaatgagaacaggggcatcttgagcccctgcggacggtgccgacaggtgcttctcgatctgcatcctgggatcaaagccatagtgaaggacagtgatggacagccgacggcagttgggattcgtgaattgctgccctctggttatgtgtgggagggctga

SEQ ID NO: 10421 - DNA, 834 bp, Artificial Sequence
  Synthetic Polynucloetide
atggactggatttggcgcatccttttccttgtcggcgctgctaccggcgcgcattccttcgaagaggtgcagctggttgaatctggcggaggactggttcagcctggcggatctctgagactgtcttgtgccgccagcggcttcaccttcaccacctattggatgcactgggtccgacaggcccctggcaaaggacttgagtgggtcggatatatcaggcccagcaccggctacacagagtacaaccagaagttcaaggaccgcttcaccatcagcgccgacaccagcaagaataccgcctacctccagatgaacagcctgagagccgaggacaccgccgtgtactactgtgccagatccagatggctgctggactattggggccagggcacactggttacagtttctacgcgtatccagaaccctgatcctgccgtgtaccagctgcgggatagcaagagcagcgacaagagcgtgtgtctgttcaccgacttcgacagccagaccaacgtgtcccagagcaaggactccgacgtgtacatcaccgataagaccgtgctggacatgcggagcatggacttcaagagcaactccgccgtggcctggtccaacaagtccgatttcgcctgcgccaacgccttcaacaacagcattatccccgaggacacattcttcccaagccccgagagcagctgcgacgtgaagctggtggaaaagagcttcgagacagacaccaacctgaacttccagaacctgagcgtgatcggcttcagaatcctgctgctgaaagtggccggctttaacctgctgatgaccctgcggctgtggtccagc

SEQ ID NO: 10422 - DNA, 1689 bp, Artificial Sequence
  Synthetic Polynucloetide
atggccttaccagtgaccgccttgctcctgccgctggccttgctgctccacgccgccaggccggacattcagatgacacagagccctagcagcctgagcgcctctgtgggagacagagtgaccatcacatgcaagagcagccagagcgtgctgtactccagcaatcagaagaactacctggcctggttccagcagaagcctggcaaggctcctaagctgctgatctactgggccagcaccagagaaagcggcgtgccaagcagattttctggcagcggctctggcaccgacttcaccctgacaatatccagcctccagcctgaggacttcgccacctacttttgccaccagtacctgagcagctacacattcggacagggcaccaaggtggaaatcaagcggctcgaggggaaaccaattcccaaccctcttctgggactggattcaaccggcagcggcgaggacctgaagaacgtgttcccacctgaggtggccgtgttcgagcctagcgaggccgagatcagccacacccagaaagccaccctcgtgtgcctggctaccggcttctaccccgaccatgtggaactgtcttggtgggtcaacggcaaagaggtgcacagcggcgtgtgtaccgacccccagccactgaaagaacagcccgccctgaacgacagccggtactgcctgagcagcagactgagagtgtccgccaccttctggcagaacccccggaaccacttcagatgccaggtgcagttctacggcctgagcgagaacgacgagtggacccaggacagagccaagcccgtgacccagatcgtgtctgccgaagcctggggcagagccgattgcggctttaccagcgagagctaccagcagggcgtgctgagcgccaccatcctgtacgagatcctgctgggcaaggccaccctgtacgccgtgctggtgtctgccctggtgctgatggctatggtcaagcggaaggacagccggggaagggccaagcgatctggatctggagcaacaaacttctcactactcaaacaagcaggtgacgtggaggagaatcccgggcctactagaggccatatgaccgagtacaagcccacggtgcgcctcgccacccgcgacgacgtccccagggccgtacgcaccctcgccgccgcgttcgccgactaccccgccacgcgccacaccgtcgatccggaccgccacatcgagcgggtcaccgagctgcaagaactcttcctcacgcgcgtcgggctcgacatcggcaaggtgtgggtcgcggacgacggcgccgcggtggcggtctggaccacgccggagagcgtcgaagcgggggcggtgttcgccgagatcggcccgcgcatggccgagttgagcggttcccggctggccgcgcagcaacagatggaaggcctcctggcgccgcaccggcccaaggagcccgcgtggttcctggccaccgtcggcgtctcgcccgaccaccagggcaagggtctgggcagcgccgtcgtgctccccggagtggaggcggccgagcgcgccggggtgcccgccttcctggagacctccgcgccccgcaacctccccttctacgagcggctcggcttcaccgtcaccgccgacgtcgaggtgcccgaaggaccgcgcacctggtgcatgacccgcaagcccggtgcctga

SEQ ID NO: 10423 - DNA, 999 bp, Artificial Sequence
  Synthetic Polynucloetide
atggccttaccagtgaccgccttgctcctgccgctggccttgctgctccacgccgccaggccggacattcagatgacacagagccctagcagcctgagcgcctctgtgggagacagagtgaccatcacatgcaagagcagccagagcgtgctgtactccagcaatcagaagaactacctggcctggttccagcagaagcctggcaaggctcctaagctgctgatctactgggccagcaccagagaaagcggcgtgccaagcagattttctggcagcggctctggcaccgacttcaccctgacaatatccagcctccagcctgaggacttcgccacctacttttgccaccagtacctgagcagctacacattcggacagggcaccaaggtggaaatcaagcggctcgaggggaaaccaattcccaaccctcttctgggactggattcaaccggcagcggcgaggacctgaagaacgtgttcccacctgaggtggccgtgttcgagcctagcgaggccgagatcagccacacccagaaagccaccctcgtgtgcctggctaccggcttctaccccgaccatgtggaactgtcttggtgggtcaacggcaaagaggtgcacagcggcgtgtgtaccgacccccagccactgaaagaacagcccgccctgaacgacagccggtactgcctgagcagcagactgagagtgtccgccaccttctggcagaacccccggaaccacttcagatgccaggtgcagttctacggcctgagcgagaacgacgagtggacccaggacagagccaagcccgtgacccagatcgtgtctgccgaagcctggggcagagccgattgcggctttaccagcgagagctaccagcagggcgtgctgagcgccaccatcctgtacgagatcctgctgggcaaggccaccctgtacgccgtgctggtgtctgccctggtgctgatggctatggtcaagcggaaggacagccggggatga

SEQ ID NO: 10424 - DNA, 1371 bp, Artificial Sequence
  Synthetic Polynucloetide
atggactggatttggcgcatccttttccttgtcggcgctgctaccggcgcgcattccttcgaagaggtgcagctggttgaatctggcggaggactggttcagcctggcggatctctgagactgtcttgtgccgccagcggcttcaccttcaccacctattggatgcactgggtccgacaggcccctggcaaaggacttgagtgggtcggatatatcaggcccagcaccggctacacagagtacaaccagaagttcaaggaccgcttcaccatcagcgccgacaccagcaagaataccgcctacctccagatgaacagcctgagagccgaggacaccgccgtgtactactgtgccagatccagatggctgctggactattggggccagggcacactggttacagtttctacgcgtgagcagaaactgatctcggaagaggatgggagcggcatccagaaccctgatcctgccgtgtaccagctgcgggatagcaagagcagcgacaagagcgtgtgtctgttcaccgacttcgacagccagaccaacgtgtcccagagcaaggactccgacgtgtacatcaccgataagtgcgtgctggacatgcggagcatggacttcaagagcaactccgccgtggcctggtccaacaagtccgatttcgcctgcgccaacgccttcaacaacagcattatccccgaggacacattcttcccaagccccgagagcagctgcgacgtgaagctggtggaaaagagcttcgagacagacaccaacctgaacttccagaacctgagcgtgatcggcttcagaatcctgctgctgaaagtggccggctttaacctgctgatgaccctgcggctgtggtccagccgcgccaagagaagcggatctggcgtgaagcagaccctgaatttcgacctgctgaagctggctggcgacgtggaatccaacccaggcccttctagaggccatatggccaagcctttgtctcaagaagaatccaccctcattgaaagagcaacggctacaatcaacagcatccccatctctgaagactacagcgtcgccagcgcagctctctctagcgacggccgcatcttcactggtgtcaatgtatatcattttactgggggaccttgtgcagaactcgtggtgctgggcactgctgctgctgcggcagctggcaacctgacttgtatcgtcgcgatcggaaatgagaacaggggcatcttgagcccctgcggacggtgccgacaggtgcttctcgatctgcatcctgggatcaaagccatagtgaaggacagtgatggacagccgacggcagttgggattcgtgaattgctgccctctggttatgtgtgggagggctga

SEQ ID NO: 10425 - DNA, 873 bp, Artificial Sequence
  Synthetic Polynucloetide
atggactggatttggcgcatccttttccttgtcggcgctgctaccggcgcgcattccttcgaagaggtgcagctggttgaatctggcggaggactggttcagcctggcggatctctgagactgtcttgtgccgccagcggcttcaccttcaccacctattggatgcactgggtccgacaggcccctggcaaaggacttgagtgggtcggatatatcaggcccagcaccggctacacagagtacaaccagaagttcaaggaccgcttcaccatcagcgccgacaccagcaagaataccgcctacctccagatgaacagcctgagagccgaggacaccgccgtgtactactgtgccagatccagatggctgctggactattggggccagggcacactggttacagtttctacgcgtgagcagaaactgatctcggaagaggatgggagcggcatccagaaccctgatcctgccgtgtaccagctgcgggatagcaagagcagcgacaagagcgtgtgtctgttcaccgacttcgacagccagaccaacgtgtcccagagcaaggactccgacgtgtacatcaccgataagtgcgtgctggacatgcggagcatggacttcaagagcaactccgccgtggcctggtccaacaagtccgatttcgcctgcgccaacgccttcaacaacagcattatccccgaggacacattcttcccaagccccgagagcagctgcgacgtgaagctggtggaaaagagcttcgagacagacaccaacctgaacttccagaacctgagcgtgatcggcttcagaatcctgctgctgaaagtggccggctttaacctgctgatgaccctgcggctgtggtccagctga

SEQ ID NO: 10426 - DNA, 1929 bp, Artificial Sequence
  Synthetic Polynucloetide
atggccttaccagtgaccgccttgctcctgccgctggccttgctgctccacgccgccaggccggacattcagatgacacagagccctagcagcctgagcgcctctgtgggagacagagtgaccatcacatgcaagagcagccagagcgtgctgtactccagcaatcagaagaactacctggcctggttccagcagaagcctggcaaggctcctaagctgctgatctactgggccagcaccagagaaagcggcgtgccaagcagattttctggcagcggctctggcaccgacttcaccctgacaatatccagcctccagcctgaggacttcgccacctacttttgccaccagtacctgagcagctacacattcggacagggcaccaaggtggaaatcaagcggggcggaggcggaagtggaggcggaggatctggcggcggaggctctgaggtgcagctggttgaatctggcggaggactggttcagcctggcggatctctgagactgtcttgtgccgccagcggcttcaccttcaccacctattggatgcactgggtccgacaggcccctggcaaaggacttgagtgggtcggatatatcaggcccagcaccggctacacagagtacaaccagaagttcaaggaccgcttcaccatcagcgccgacaccagcaagaataccgcctacctccagatgaacagcctgagagccgaggacaccgccgtgtactactgtgccagatccagatggctgctggactattggggccagggcacactggttacagtttctacgcgtgggagcggcatccagaaccctgatcctgccgtgtaccagctgcgggatagcaagagcagcgacaagagcgtgtgtctgttcaccgacttcgacagccagaccaacgtgtcccagagcaaggactccgacgtgtacatcaccgataagaccgtgctggacatgcggagcatggacttcaagagcaactccgccgtggcctggtccaacaagtccgatttcgcctgcgccaacgccttcaacaacagcattatccccgaggacacattcttcccaagcagcgacgtgccctgcgacgtgaagctggtggaaaagagcttcgagacagacaccaacctgaacttccagaacctgagcgtgatcggcttcagaatcctgctgctgaaagtggccggctttaacctgctgatgaccctgcggctgtggtccagccgcgccaagagaagcggatctggcgtgaagcagaccctgaatttcgacctgctgaagctggctggcgacgtggaatccaacccaggcccttctagaggccatatgaccgagtacaagcccacggtgcgcctcgccacccgcgacgacgtccccagggccgtacgcaccctcgccgccgcgttcgccgactaccccgccacgcgccacaccgtcgatccggaccgccacatcgagcgggtcaccgagctgcaagaactcttcctcacgcgcgtcgggctcgacatcggcaaggtgtgggtcgcggacgacggcgccgcggtggcggtctggaccacgccggagagcgtcgaagcgggggcggtgttcgccgagatcggcccgcgcatggccgagttgagcggttcccggctggccgcgcagcaacagatggaaggcctcctggcgccgcaccggcccaaggagcccgcgtggttcctggccaccgtcggcgtctcgcccgaccaccagggcaagggtctgggcagcgccgtcgtgctccccggagtggaggcggccgagcgcgccggggtgcccgccttcctggagacctccgcgccccgcaacctccccttctacgagcggctcggcttcaccgtcaccgccgacgtcgaggtgcccgaaggaccgcgcacctggtgcatgacccgcaagcccggtgcctga

SEQ ID NO: 10427 - DNA, 2025 bp, Artificial Sequence
  Synthetic Polynucloetide
atggccttaccagtgaccgccttgctcctgccgctggccttgctgctccacgccgccaggccggacattcagatgacacagagccctagcagcctgagcgcctctgtgggagacagagtgaccatcacatgcaagagcagccagagcgtgctgtactccagcaatcagaagaactacctggcctggttccagcagaagcctggcaaggctcctaagctgctgatctactgggccagcaccagagaaagcggcgtgccaagcagattttctggcagcggctctggcaccgacttcaccctgacaatatccagcctccagcctgaggacttcgccacctacttttgccaccagtacctgagcagctacacattcggacagggcaccaaggtggaaatcaagcggggcggaggcggaagtggaggcggaggatctggcggcggaggctctgaggtgcagctggttgaatctggcggaggactggttcagcctggcggatctctgagactgtcttgtgccgccagcggcttcaccttcaccacctattggatgcactgggtccgacaggcccctggcaaaggacttgagtgggtcggatatatcaggcccagcaccggctacacagagtacaaccagaagttcaaggaccgcttcaccatcagcgccgacaccagcaagaataccgcctacctccagatgaacagcctgagagccgaggacaccgccgtgtactactgtgccagatccagatggctgctggactattggggccagggcacactggttacagtttctctcgaggacctgaagaacgtgttcccacctgaggtggccgtgttcgagcctagcaaggccgagatcgcccacacccagaaagccaccctcgtgtgcctggctaccggcttctaccccgaccatgtggaactgtcttggtgggtcaacggcaaagaggtgcacagcggcgtgtctaccgacccccagccactgaaagaacagcccgccctgaacgacagccggtactgcctgagcagcagactgagagtgtccgccaccttctggcagaacccccggaaccacttcagatgccaggtgcagttctacggcctgagcgagaacgacgagtggacccaggacagagccaagcccgtgacccagatcgtgtctgccgaagcctggggcagagccgattgcggcatcaccagcgccagctaccaccagggcgtgctgagcgccaccatcctgtacgagatcctgctgggcaaggccaccctgtacgccgtgctggtgtctgccctggtgctgatggctatggtcaagcggaaggacagccggggaagggccaagcgatctggatctggagcaacaaacttctcactactcaaacaagcaggtgacgtggaggagaatcccgggcctactagaggccatatgaccgagtacaagcccacggtgcgcctcgccacccgcgacgacgtccccagggccgtacgcaccctcgccgccgcgttcgccgactaccccgccacgcgccacaccgtcgatccggaccgccacatcgagcgggtcaccgagctgcaagaactcttcctcacgcgcgtcgggctcgacatcggcaaggtgtgggtcgcggacgacggcgccgcggtggcggtctggaccacgccggagagcgtcgaagcgggggcggtgttcgccgagatcggcccgcgcatggccgagttgagcggttcccggctggccgcgcagcaacagatggaaggcctcctggcgccgcaccggcccaaggagcccgcgtggttcctggccaccgtcggcgtctcgcccgaccaccagggcaagggtctgggcagcgccgtcgtgctccccggagtggaggcggccgagcgcgccggggtgcccgccttcctggagacctccgcgccccgcaacctccccttctacgagcggctcggcttcaccgtcaccgccgacgtcgaggtgcccgaaggaccgcgcacctggtgcatgacccgcaagcccggtgcctga

SEQ ID NO: 10428 - DNA, 2094 bp, Artificial Sequence
  Synthetic Polynucloetide
atggccttaccagtgaccgccttgctcctgccgctggccttgctgctccacgccgccaggccggacattcagatgacacagagccctagcagcctgagcgcctctgtgggagacagagtgaccatcacatgcaagagcagccagagcgtgctgtactccagcaatcagaagaactacctggcctggttccagcagaagcctggcaaggctcctaagctgctgatctactgggccagcaccagagaaagcggcgtgccaagcagattttctggcagcggctctggcaccgacttcaccctgacaatatccagcctccagcctgaggacttcgccacctacttttgccaccagtacctgagcagctacacattcggacagggcaccaaggtggaaatcaagcggggcggaggcggaagtggaggcggaggatctggcggcggaggctctgaggtgcagctggttgaatctggcggaggactggttcagcctggcggatctctgagactgtcttgtgccgccagcggcttcaccttcaccacctattggatgcactgggtccgacaggcccctggcaaaggacttgagtgggtcggatatatcaggcccagcaccggctacacagagtacaaccagaagttcaaggaccgcttcaccatcagcgccgacaccagcaagaataccgcctacctccagatgaacagcctgagagccgaggacaccgccgtgtactactgtgccagatccagatggctgctggactattggggccagggcacactggttacagtttctacgcgtgggtctggaggcggaggcagcggcggaggcgggagcggcgacggtaacgaggagatgggaggaatcactcaaaccccttacaaagtctcaatttcaggaacaactgttatccttacatgtccccagtatcctggcagcgagatcctttggcagcataacgacaagaatatagggggagatgaagacgataagaatatcggatctgacgaggatcacttgagcctgaaagagttctccgagcttgaacaaagcggatattatgtgtgctatccgcgcgggtcaaagccggaagacgctaacttttacctttatctccgagccagagtgtgcgaaaattgcatggaaatggacgttatgtccgttgctacaatagttatcgtagatatatgcatcacgggtggactgcttctgctggtttattattggtccaagaatagaaaggccaaagctaaacccgtgaccagaggcgctggcgcaggcggaaggcaaaggggacaaaacaaagaacggccaccaccagtgccaaatccagattatgagcctattcggaaaggacagagggacctgtactctggcctgaatcagagaagaatccgcgccaagagaagcggatctggcgtgaagcagaccctgaatttcgacctgctgaagctggctggcgacgtggaatccaacccaggcccttctagaggccatatgaccgagtacaagcccacggtgcgcctcgccacccgcgacgacgtccccagggccgtacgcaccctcgccgccgcgttcgccgactaccccgccacgcgccacaccgtcgatccggaccgccacatcgagcgggtcaccgagctgcaagaactcttcctcacgcgcgtcgggctcgacatcggcaaggtgtgggtcgcggacgacggcgccgcggtggcggtctggaccacgccggagagcgtcgaagcgggggcggtgttcgccgagatcggcccgcgcatggccgagttgagcggttcccggctggccgcgcagcaacagatggaaggcctcctggcgccgcaccggcccaaggagcccgcgtggttcctggccaccgtcggcgtctcgcccgaccaccagggcaagggtctgggcagcgccgtcgtgctccccggagtggaggcggccgagcgcgccggggtgcccgccttcctggagacctccgcgccccgcaacctccccttctacgagcggctcggcttcaccgtcaccgccgacgtcgaggtgcccgaaggaccgcgcacctggtgcatgacccgcaagcccggtgcctga

SEQ ID NO: 10429 - DNA, 1989 bp, Artificial Sequence
  Synthetic Polynucloetide
atggccttaccagtgaccgccttgctcctgccgctggccttgctgctccacgccgccaggccggacattcagatgacacagagccctagcagcctgagcgcctctgtgggagacagagtgaccatcacatgcaagagcagccagagcgtgctgtactccagcaatcagaagaactacctggcctggttccagcagaagcctggcaaggctcctaagctgctgatctactgggccagcaccagagaaagcggcgtgccaagcagattttctggcagcggctctggcaccgacttcaccctgacaatatccagcctccagcctgaggacttcgccacctacttttgccaccagtacctgagcagctacacattcggacagggcaccaaggtggaaatcaagcggggcggaggcggaagtggaggcggaggatctggcggcggaggctctgaggtgcagctggttgaatctggcggaggactggttcagcctggcggatctctgagactgtcttgtgccgccagcggcttcaccttcaccacctattggatgcactgggtccgacaggcccctggcaaaggacttgagtgggtcggatatatcaggcccagcaccggctacacagagtacaaccagaagttcaaggaccgcttcaccatcagcgccgacaccagcaagaataccgcctacctccagatgaacagcctgagagccgaggacaccgccgtgtactactgtgccagatccagatggctgctggactattggggccagggcacactggttacagtttctacgcgtgggtctggaggcggaggcagcggcggaggcgggagcggcttcaagatccccatcgaggaactggaagatcgggtgttcgtgaactgcaacacctctatcacctgggtggaaggcaccgtgggaacactgctgagcgacatcaccagactggacctcggcaagcggattctggaccctcggggcatctacagatgcaacggcaccgacatctacaaggacaaagaaagcaccgtgcaggtccactacagaatgtgccagtcctgcgtggaactggaccctgctacagtggccggcatcatcgtgaccgatgtgatcgctactctgctgctggctctgggagtgttctgcttcgccggacacgaaacaggcagactgtctggcgctgccgatacacaggccctgctgagaaacgaccaagtgtatcagcccctgcgcgacagagatgatgcccagtattctcacctcggcggcaactgggctagaaacaagcgcgccaagagaagcggatctggcgtgaagcagaccctgaatttcgacctgctgaagctggctggcgacgtggaatccaacccaggcccttctagaggccatatgaccgagtacaagcccacggtgcgcctcgccacccgcgacgacgtccccagggccgtacgcaccctcgccgccgcgttcgccgactaccccgccacgcgccacaccgtcgatccggaccgccacatcgagcgggtcaccgagctgcaagaactcttcctcacgcgcgtcgggctcgacatcggcaaggtgtgggtcgcggacgacggcgccgcggtggcggtctggaccacgccggagagcgtcgaagcgggggcggtgttcgccgagatcggcccgcgcatggccgagttgagcggttcccggctggccgcgcagcaacagatggaaggcctcctggcgccgcaccggcccaaggagcccgcgtggttcctggccaccgtcggcgtctcgcccgaccaccagggcaagggtctgggcagcgccgtcgtgctccccggagtggaggcggccgagcgcgccggggtgcccgccttcctggagacctccgcgccccgcaacctccccttctacgagcggctcggcttcaccgtcaccgccgacgtcgaggtgcccgaaggaccgcgcacctggtgcatgacccgcaagcccggtgcctga

SEQ ID NO: 10430 - DNA, 2019 bp, Artificial Sequence
  Synthetic Polynucloetide
atggccttaccagtgaccgccttgctcctgccgctggccttgctgctccacgccgccaggccggacattcagatgacacagagccctagcagcctgagcgcctctgtgggagacagagtgaccatcacatgcaagagcagccagagcgtgctgtactccagcaatcagaagaactacctggcctggttccagcagaagcctggcaaggctcctaagctgctgatctactgggccagcaccagagaaagcggcgtgccaagcagattttctggcagcggctctggcaccgacttcaccctgacaatatccagcctccagcctgaggacttcgccacctacttttgccaccagtacctgagcagctacacattcggacagggcaccaaggtggaaatcaagcggggcggaggcggaagtggaggcggaggatctggcggcggaggctctgaggtgcagctggttgaatctggcggaggactggttcagcctggcggatctctgagactgtcttgtgccgccagcggcttcaccttcaccacctattggatgcactgggtccgacaggcccctggcaaaggacttgagtgggtcggatatatcaggcccagcaccggctacacagagtacaaccagaagttcaaggaccgcttcaccatcagcgccgacaccagcaagaataccgcctacctccagatgaacagcctgagagccgaggacaccgccgtgtactactgtgccagatccagatggctgctggactattggggccagggcacactggttacagtttctacgcgtgggtctggaggcggaggcagcggcggaggcgggagcggccagagcatcaagggcaaccacctggtcaaggtgtacgactaccaagaggacggcagcgtgctgctgacatgtgatgccgaggccaagaacatcacctggtttaaggacggcaagatgatcggcttcctgaccgaggacaagaagaagtggaacctgggcagcaacgctaaggaccccagaggcatgtatcagtgcaagggcagccagaacaagagcaagcccctccaggtgtactaccggatgtgccagaactgcatcgagctgaacgccgctaccatcagcggctttctgttcgccgagatcgtgtccatcttcgtgctggccgtgggcgtgtactttatcgctggacaggatggcgtgcggcagagcagagcttccgataagcaaaccctgctgcctaacgaccagctgtaccagcctctgaaggacagagaggacgaccagtacagccacctccagggcaatcagctgagaagaaaccgcgccaagagaagcggatctggcgtgaagcagaccctgaatttcgacctgctgaagctggctggcgacgtggaatccaacccaggcccttctagaggccatatgaccgagtacaagcccacggtgcgcctcgccacccgcgacgacgtccccagggccgtacgcaccctcgccgccgcgttcgccgactaccccgccacgcgccacaccgtcgatccggaccgccacatcgagcgggtcaccgagctgcaagaactcttcctcacgcgcgtcgggctcgacatcggcaaggtgtgggtcgcggacgacggcgccgcggtggcggtctggaccacgccggagagcgtcgaagcgggggcggtgttcgccgagatcggcccgcgcatggccgagttgagcggttcccggctggccgcgcagcaacagatggaaggcctcctggcgccgcaccggcccaaggagcccgcgtggttcctggccaccgtcggcgtctcgcccgaccaccagggcaagggtctgggcagcgccgtcgtgctccccggagtggaggcggccgagcgcgccggggtgcccgccttcctggagacctccgcgccccgcaacctccccttctacgagcggctcggcttcaccgtcaccgccgacgtcgaggtgcccgaaggaccgcgcacctggtgcatgacccgcaagcccggtgcctga

SEQ ID NO: 10431 - DNA, 1968 bp, Artificial Sequence
  Synthetic Polynucloetide
atggccttaccagtgaccgccttgctcctgccgctggccttgctgctccacgccgccaggccggacattcagatgacacagagccctagcagcctgagcgcctctgtgggagacagagtgaccatcacatgcaagagcagccagagcgtgctgtactccagcaatcagaagaactacctggcctggttccagcagaagcctggcaaggctcctaagctgctgatctactgggccagcaccagagaaagcggcgtgccaagcagattttctggcagcggctctggcaccgacttcaccctgacaatatccagcctccagcctgaggacttcgccacctacttttgccaccagtacctgagcagctacacattcggacagggcaccaaggtggaaatcaagcggggcggaggcggaagtggaggcggaggatctggcggcggaggctctgaggtgcagctggttgaatctggcggaggactggttcagcctggcggatctctgagactgtcttgtgccgccagcggcttcaccttcaccacctattggatgcactgggtccgacaggcccctggcaaaggacttgagtgggtcggatatatcaggcccagcaccggctacacagagtacaaccagaagttcaaggaccgcttcaccatcagcgccgacaccagcaagaataccgcctacctccagatgaacagcctgagagccgaggacaccgccgtgtactactgtgccagatccagatggctgctggactattggggccagggcacactggttacagtttctacgcgtgggtctggaggcggaggcagcggcggaggcgggagcggccagagttttgggttgttggaccctaaattgtgctatctgttggacggaatcctgttcatttacggagtgatcctgaccgcattgttcctgcgggttaagttttccagatccgcagacgcacccgcttaccaacaagggcagaaccaactctacaatgaacttaatttggggcggagggaagagtacgacgttctggacaaaaggaggggacgagatcccgagatgggcggaaagcctcagcgaaggaagaatccgcaagaggggctttataacgaactccagaaagataaaatggcagaagcctatagtgagattgggatgaagggagaaaggaggaggggtaaaggtcacgatgggttgtaccaaggattgagcacagccactaaagatacctatgatgcgctccacatgcaggccctgccgccaagacgcgccaagagaagcggatctggcgtgaagcagaccctgaatttcgacctgctgaagctggctggcgacgtggaatccaacccaggcccttctagaggccatatgaccgagtacaagcccacggtgcgcctcgccacccgcgacgacgtccccagggccgtacgcaccctcgccgccgcgttcgccgactaccccgccacgcgccacaccgtcgatccggaccgccacatcgagcgggtcaccgagctgcaagaactcttcctcacgcgcgtcgggctcgacatcggcaaggtgtgggtcgcggacgacggcgccgcggtggcggtctggaccacgccggagagcgtcgaagcgggggcggtgttcgccgagatcggcccgcgcatggccgagttgagcggttcccggctggccgcgcagcaacagatggaaggcctcctggcgccgcaccggcccaaggagcccgcgtggttcctggccaccgtcggcgtctcgcccgaccaccagggcaagggtctgggcagcgccgtcgtgctccccggagtggaggcggccgagcgcgccggggtgcccgccttcctggagacctccgcgccccgcaacctccccttctacgagcggctcggcttcaccgtcaccgccgacgtcgaggtgcccgaaggaccgcgcacctggtgcatgacccgcaagcccggtgcctga

SEQ ID NO: 10432 - DNA, 2268 bp, Artificial Sequence
  Synthetic Polynucloetide
atggccttaccagtgaccgccttgctcctgccgctggccttgctgctccacgccgccaggccggaagtgcagctggttgaatctggcggaggactggttcagcctggcggatctctgagactgtcttgtgccgccagcggcttcagcttcagcgacttttggatgagctgggtccgacaggcccctggcaaaggacttgaatgggtcgccacaatcagccaggccggcagcgagaaggactacgtggactctgtgaagggcagattcaccatcagccgggacaacgccaagaagtccctgtacctccagatgaacagcctgagagccgaggacaccgccgtgtactattgtgcctctggcgtgtacagcttcgactacagaggccagggcaccctggtcacagtctcttctggtaccggcggaggcggatctggcggcggaggtagcggtggcggaggatctgaattcgacattcagatgacacagagccctagcagcctgagcgcctctgtgggagacagagtgaccatcacatgcaagagcagccagagcgtgctgtactccagcaatcagaagaactacctggcctggttccagcagaagcctggcaaggctcctaagctgctgatctactgggccagcaccagagaaagcggcgtgccaagcagattttctggcagcggctctggcaccgacttcaccctgacaatatccagcctccagcctgaggacttcgccacctacttttgccaccagtacctgagcagctacacattcggacagggcaccaaggtggaaatcaagcggctcgaggacctgaagaacgtgttcccacctgaggtggccgtgttcgagcctagcgaggccgagatcagccacacccagaaagccaccctcgtgtgcctggctaccggcttctaccccgaccatgtggaactgtcttggtgggtcaacggcaaagaggtgcacagcggcgtgtgtaccgacccccagccactgaaagaacagcccgccctgaacgacagccggtactgcctgagcagcagactgagagtgtccgccaccttctggcagaacccccggaaccacttcagatgccaggtgcagttctacggcctgagcgagaacgacgagtggacccaggacagagccaagcccgtgacccagatcgtgtctgccgaagcctggggcagagccgattgcggctttaccagcgagagctaccagcagggcgtgctgagcgccaccatcctgtacgagatcctgctgggcaaggccaccctgtacgccgtgctggtgtctgccctggtgctgatggctatggtcaagcggaaggacagccggggaagggccaagcgatctggatctggagcaacaaacttctcactactcaaacaagcaggtgacgtggaggagaatcccgggcctactagtatggactggatttggcgcatccttttccttgtcggcgctgctaccggcgcgcattccttcgaagaggtgcagctggttgaatctggcggaggactggttcagcctggcggatctctgagactgtcttgtgccgccagcggcttcaccttcaccacctattggatgcactgggtccgacaggcccctggcaaaggacttgagtgggtcggatatatcaggcccagcaccggctacacagagtacaaccagaagttcaaggaccgcttcaccatcagcgccgacaccagcaagaataccgcctacctccagatgaacagcctgagagccgaggacaccgccgtgtactactgtgccagatccagatggctgctggactattggggccagggcacactggttacagtttctacgcgtatccagaaccctgatcctgccgtgtaccagctgcgggatagcaagagcagcgacaagagcgtgtgtctgttcaccgacttcgacagccagaccaacgtgtcccagagcaaggactccgacgtgtacatcaccgataagtgcgtgctggacatgcggagcatggacttcaagagcaactccgccgtggcctggtccaacaagtccgatttcgcctgcgccaacgccttcaacaacagcattatccccgaggacacattcttcccaagccccgagagcagctgcgacgtgaagctggtggaaaagagcttcgagacagacaccaacctgaacttccagaacctgagcgtgatcggcttcagaatcctgctgctgaaagtggccggctttaacctgctgatgaccctgcggctgtggtccagc

SEQ ID NO: 10433 - DNA, 2280 bp, Artificial Sequence
  Synthetic Polynucloetide
atggccttaccagtgaccgccttgctcctgccgctggccttgctgctccacgccgccaggccggaagtgcagctggttgaatctggcggaggactggttcagcctggcggatctctgagactgtcttgtgccgccagcggcttcagcttcagcgacttttggatgagctgggtccgacaggcccctggcaaaggacttgaatgggtcgccacaatcagccaggccggcagcgagaaggactacgtggactctgtgaagggcagattcaccatcagccgggacaacgccaagaagtccctgtacctccagatgaacagcctgagagccgaggacaccgccgtgtactattgtgcctctggcgtgtacagcttcgactacagaggccagggcaccctggtcacagtctcttctggtaccggcggaggcggatctggcggcggaggtagcggtggcggaggatctgaattcgacattcagatgacacagagccctagcagcctgagcgcctctgtgggagacagagtgaccatcacatgcaagagcagccagagcgtgctgtactccagcaatcagaagaactacctggcctggttccagcagaagcctggcaaggctcctaagctgctgatctactgggccagcaccagagaaagcggcgtgccaagcagattttctggcagcggctctggcaccgacttcaccctgacaatatccagcctccagcctgaggacttcgccacctacttttgccaccagtacctgagcagctacacattcggacagggcaccaaggtggaaatcaagcggctcgagatccagaaccctgatcctgccgtgtaccagctgcgggatagcaagagcagcgacaagagcgtgtgtctgttcaccgacttcgacagccagaccaacgtgtcccagagcaaggactccgacgtgtacatcaccgataagtgcgtgctggacatgcggagcatggacttcaagagcaactccgccgtggcctggtccaacaagtccgatttcgcctgcgccaacgccttcaacaacagcattatccccgaggacacattcttcccaagccccgagagcagctgcgacgtgaagctggtggaaaagagcttcgagacagacaccaacctgaacttccagaacctgagcgtgatcggcttcagaatcctgctgctgaaagtggccggctttaacctgctgatgaccctgcggctgtggtccagccgcgccaagagaagcggatctggcgtgaagcagaccctgaatttcgacctgctgaagctggctggcgacgtggaatccaacccaggccctactagtatggactggatttggcgcatccttttccttgtcggcgctgctaccggcgcgcattccttcgaagaggtgcagctggttgaatctggcggaggactggttcagcctggcggatctctgagactgtcttgtgccgccagcggcttcaccttcaccacctattggatgcactgggtccgacaggcccctggcaaaggacttgagtgggtcggatatatcaggcccagcaccggctacacagagtacaaccagaagttcaaggaccgcttcaccatcagcgccgacaccagcaagaataccgcctacctccagatgaacagcctgagagccgaggacaccgccgtgtactactgtgccagatccagatggctgctggactattggggccagggcacactggttacagtttctacgcgtgaggacctgaagaacgtgttcccacctgaggtggccgtgttcgagcctagcgaggccgagatcagccacacccagaaagccaccctcgtgtgcctggctaccggcttctaccccgaccatgtggaactgtcttggtgggtcaacggcaaagaggtgcacagcggcgtgtgtaccgacccccagccactgaaagaacagcccgccctgaacgacagccggtactgcctgagcagcagactgagagtgtccgccaccttctggcagaacccccggaaccacttcagatgccaggtgcagttctacggcctgagcgagaacgacgagtggacccaggacagagccaagcccgtgacccagatcgtgtctgccgaagcctggggcagagccgattgcggctttaccagcgagagctaccagcagggcgtgctgagcgccaccatcctgtacgagatcctgctgggcaaggccaccctgtacgccgtgctggtgtctgccctggtgctgatggctatggtcaagcggaaggacagccgggga

SEQ ID NO: 10434 - DNA, 2856 bp, Artificial Sequence
  Synthetic Polynucloetide
atggccttaccagtgaccgccttgctcctgccgctggccttgctgctccacgccgccaggccggaagtgcagctggttgaatctggcggaggactggttcagcctggcggatctctgagactgtcttgtgccgccagcggcttcagcttcagcgacttttggatgagctgggtccgacaggcccctggcaaaggacttgaatgggtcgccacaatcagccaggccggcagcgagaaggactacgtggactctgtgaagggcagattcaccatcagccgggacaacgccaagaagtccctgtacctccagatgaacagcctgagagccgaggacaccgccgtgtactattgtgcctctggcgtgtacagcttcgactacagaggccagggcaccctggtcacagtctcttctggtaccggcggaggcggatctggcggcggaggtagcggtggcggaggatctgaattcgacattcagatgacacagagccctagcagcctgagcgcctctgtgggagacagagtgaccatcacatgcaagagcagccagagcgtgctgtactccagcaatcagaagaactacctggcctggttccagcagaagcctggcaaggctcctaagctgctgatctactgggccagcaccagagaaagcggcgtgccaagcagattttctggcagcggctctggcaccgacttcaccctgacaatatccagcctccagcctgaggacttcgccacctacttttgccaccagtacctgagcagctacacattcggacagggcaccaaggtggaaatcaagcggctcgaggacctgaagaacgtgttcccacctgaggtggccgtgttcgagcctagcgaggccgagatcagccacacccagaaagccaccctcgtgtgcctggctaccggcttctaccccgaccatgtggaactgtcttggtgggtcaacggcaaagaggtgcacagcggcgtgtctaccgacccccagccactgaaagaacagcccgccctgaacgacagccggtactgcctgagcagcagactgagagtgtccgccaccttctggcagaacccccggaaccacttcagatgccaggtgcagttctacggcctgagcgagaacgacgagtggacccaggacagagccaagcccgtgacccagatcgtgtctgccgaagcctggggcagagccgattgcggatcccagagcttcggcctgctggaccccaagctgtgctacctgctggatggcatcctgttcatctacggcgtgatcctgaccgccctgttcctgagagtgaagttcagcagaagcgccgacgcccctgcctaccagcagggacagaaccaactgtacaacgagctgaacctgggcagacgggaagagtacgacgtgctggacaagcggagaggcagggaccctgagatgggcggaaagccccagcggagaaagaacccccaggaaggactgtataacgaactccagaaagacaagatggccgaagcctacagcgagatcggcatgaagggcgagcggagaagaggcaagggccacgatggcctgtaccagggcctgagcaccgccaccaaggacacctatgacgccctgcacatgcaggccctgcctccaagaagggccaagcgatctggatctggagcaacaaacttctcactactcaaacaagcaggtgacgtggaggagaatcccgggcctactagtatggactggatttggcgcatccttttccttgtcggcgctgctaccggcgcgcattccttcgaagaggtgcagctggttgaatctggcggaggactggttcagcctggcggatctctgagactgtcttgtgccgccagcggcttcaccttcaccacctattggatgcactgggtccgacaggcccctggcaaaggacttgagtgggtcggatatatcaggcccagcaccggctacacagagtacaaccagaagttcaaggaccgcttcaccatcagcgccgacaccagcaagaataccgcctacctccagatgaacagcctgagagccgaggacaccgccgtgtactactgtgccagatccagatggctgctggactattggggccagggcacactggttacagtttctacgcgtatccagaaccctgatcctgccgtgtaccagctgcgggatagcaagagcagcgacaagagcgtgtgtctgttcaccgacttcgacagccagaccaacgtgtcccagagcaaggactccgacgtgtacatcaccgataagaccgtgctggacatgcggagcatggacttcaagagcaactccgccgtggcctggtccaacaagtccgatttcgcctgcgccaacgccttcaacaacagcattatccccgaggacacattcttcccaagccccgagagcagctgcggtacccagagttttgggttgttggaccctaaattgtgctatctgttggacggaatcctgttcatttacggagtgatcctgaccgcattgttcctgcgggttaagttttccagatccgcagacgcacccgcttaccaacaagggcagaaccaactctacaatgaacttaatttggggcggagggaagagtacgacgttctggacaaaaggaggggacgagatcccgagatgggcggaaagcctcagcgaaggaagaatccgcaagaggggctttataacgaactccagaaagataaaatggcagaagcctatagtgagattgggatgaagggagaaaggaggaggggtaaaggtcacgatgggttgtaccaaggattgagcacagccactaaagatacctatgatgcgctccacatgcaggccctgccgccaaga

SEQ ID NO: 10435 - DNA, 2346 bp, Artificial Sequence
  Synthetic Polynucloetide
atggccttaccagtgaccgccttgctcctgccgctggccttgctgctccacgccgccaggccggaagtgcagctggttgaatctggcggaggactggttcagcctggcggatctctgagactgtcttgtgccgccagcggcttcagcttcagcgacttttggatgagctgggtccgacaggcccctggcaaaggacttgaatgggtcgccacaatcagccaggccggcagcgagaaggactacgtggactctgtgaagggcagattcaccatcagccgggacaacgccaagaagtccctgtacctccagatgaacagcctgagagccgaggacaccgccgtgtactattgtgcctctggcgtgtacagcttcgactacagaggccagggcaccctggtcacagtctcttctggtaccggcggaggcggatctggcggcggaggtagcggtggcggaggatctgaattcgacattcagatgacacagagccctagcagcctgagcgcctctgtgggagacagagtgaccatcacatgcaagagcagccagagcgtgctgtactccagcaatcagaagaactacctggcctggttccagcagaagcctggcaaggctcctaagctgctgatctactgggccagcaccagagaaagcggcgtgccaagcagattttctggcagcggctctggcaccgacttcaccctgacaatatccagcctccagcctgaggacttcgccacctacttttgccaccagtacctgagcagctacacattcggacagggcaccaaggtggaaatcaagcggctcgagggacagcctaaggccaatcctaccgtgacactgttccctccaagcagcgaagaactccaggccaacaaggccacacttgtgtgcctgatctccgacttctaccctggggctgtgacagtggcttggaaggccgatggatctcctgtgaaagccggcgtggaaaccaccaagccatccaagcagagcaacaacaaatacgccgccagctcctacctgagcctgacacctgagcagtggaagtcccacagatcctacagctgccaagtgacccacgaaggcagcaccgtggaaaagacagtggcccctacagagtgcagccccatcaagaccgatgtgattacaatggaccccaaggacaactgctccaaggacgccaacgataccctgctgctccagctgaccaacaccagcgcctactacatgtacttgttgctgctgctgaagtccgtggtgtacttcgccatcatcacatgctgcctgctgcggagaaccgccttctgctgcaacggcgagaagtctagggccaagcgatctggatctggagcaacaaacttctcactactcaaacaagcaggtgacgtggaggagaatcccgggcctactagtatggactggatttggcgcatccttttccttgtcggcgctgctaccggcgcgcattccttcgaagaggtgcagctggttgaatctggcggaggactggttcagcctggcggatctctgagactgtcttgtgccgccagcggcttcaccttcaccacctattggatgcactgggtccgacaggcccctggcaaaggacttgagtgggtcggatatatcaggcccagcaccggctacacagagtacaaccagaagttcaaggaccgcttcaccatcagcgccgacaccagcaagaataccgcctacctccagatgaacagcctgagagccgaggacaccgccgtgtactactgtgccagatccagatggctgctggactattggggccagggcacactggttacagtttctacgcgtgcctctacaaagggaccctccgtgtttcctctggctcccagcagcaagtctacaagcggaggaacagccgctctgggctgcctggtcaaggattactttcccgagcctgtgaccgtgtcctggaatagcggagcactgacaagcggcgtgcacacctttccagccgtgctgcaaagcagcggcctgtactctctgagcagcgtggtcacagtgcctagctctagcctgggcacccagacctacatctgcaatgtgaaccacaagcctagcaacaccaaggtggacaagagagtggaacccaagagctgtgaagtgaaaaccgactccaccgaccacgtgaagcccaaagagacagagaacaccaagcagcccagcaagagctgccacaagcccaaggccatcgtgcacaccgagaaagtgaacatgatgagcctgaccgtgctgggcctgcggatgctgttcgccaaaaccgtggccgtgaacttcctgctgaccgccaagctgttcttcctc

SEQ ID NO: 10436 - DNA, 2289 bp, Artificial Sequence
  Synthetic Polynucloetide
atggccttaccagtgaccgccttgctcctgccgctggccttgctgctccacgccgccaggccggaagtgcagctggttgaatctggcggaggactggttcagcctggcggatctctgagactgtcttgtgccgccagcggcttcagcttcagcgacttttggatgagctgggtccgacaggcccctggcaaaggacttgaatgggtcgccacaatcagccaggccggcagcgagaaggactacgtggactctgtgaagggcagattcaccatcagccgggacaacgccaagaagtccctgtacctccagatgaacagcctgagagccgaggacaccgccgtgtactattgtgcctctggcgtgtacagcttcgactacagaggccagggcaccctggtcacagtctcttctggtaccggcggaggcggatctggcggcggaggtagcggtggcggaggatctgaattcgacattcagatgacacagagccctagcagcctgagcgcctctgtgggagacagagtgaccatcacatgcaagagcagccagagcgtgctgtactccagcaatcagaagaactacctggcctggttccagcagaagcctggcaaggctcctaagctgctgatctactgggccagcaccagagaaagcggcgtgccaagcagattttctggcagcggctctggcaccgacttcaccctgacaatatccagcctccagcctgaggacttcgccacctacttttgccaccagtacctgagcagctacacattcggacagggcaccaaggtggaaatcaagcggctcgagggacagcctaaggccaatcctaccgtgacactgttccctccaagcagcgaagaactccaggccaacaaggccacacttgtgtgcctgatctccgacttctaccctggggctgtgacagtggcttggaaggccgatggatctcctgtgaaagccggcgtggaaaccaccaagccatccaagcagagcaacaacaaatacgccgccagctcctacctgagcctgacacctgagcagtggaagtcccacagatcctacagctgccaagtgacccacgaaggcagcaccgtggaaaagacagtggcccctacagagtgcagcggcagagccgattgcggctttaccagcgagagctaccagcagggcgtgctgagcgccaccatcctgtacgagatcctgctgggcaaggccaccctgtacgccgtgctggtgtctgccctggtgctgatggctatggtcaagcggaaggacagccggggacgcgccaagagaagcggatctggcgtgaagcagaccctgaatttcgacctgctgaagctggctggcgacgtggaatccaacccaggccctactagtatggactggatttggcgcatccttttccttgtcggcgctgctaccggcgcgcattccttcgaagaggtgcagctggttgaatctggcggaggactggttcagcctggcggatctctgagactgtcttgtgccgccagcggcttcaccttcaccacctattggatgcactgggtccgacaggcccctggcaaaggacttgagtgggtcggatatatcaggcccagcaccggctacacagagtacaaccagaagttcaaggaccgcttcaccatcagcgccgacaccagcaagaataccgcctacctccagatgaacagcctgagagccgaggacaccgccgtgtactactgtgccagatccagatggctgctggactattggggccagggcacactggttacagtttctacgcgtgcctctacaaagggaccctccgtgtttcctctggctcccagcagcaagtctacaagcggaggaacagccgctctgggctgcctggtcaaggattactttcccgagcctgtgaccgtgtcctggaatagcggagcactgacaagcggcgtgcacacctttccagccgtgctgcaaagcagcggcctgtactctctgagcagcgtggtcacagtgcctagctctagcctgggcacccagacctacatctgcaatgtgaaccacaagcctagcaacaccaaggtggacaagagagtggaacccaagagctgtatccccgaggacacattcttcccaagccccgagagcagctgcgacgtgaagctggtggaaaagagcttcgagacagacaccaacctgaacttccagaacctgagcgtgatcggcttcagaatcctgctgctgaaagtggccggctttaacctgctgatgaccctgcggctgtggtccagc

SEQ ID NO: 10437 - DNA, 2691 bp, Artificial Sequence
  Synthetic Polynucloetide
atggccttaccagtgaccgccttgctcctgccgctggccttgctgctccacgccgccaggccggaagtgcagctggttgaatctggcggaggactggttcagcctggcggatctctgagactgtcttgtgccgccagcggcttcagcttcagcgacttttggatgagctgggtccgacaggcccctggcaaaggacttgaatgggtcgccacaatcagccaggccggcagcgagaaggactacgtggactctgtgaagggcagattcaccatcagccgggacaacgccaagaagtccctgtacctccagatgaacagcctgagagccgaggacaccgccgtgtactattgtgcctctggcgtgtacagcttcgactacagaggccagggcaccctggtcacagtctcttctggtaccggcggaggcggatctggcggcggaggtagcggtggcggaggatctgaattcgacattcagatgacacagagccctagcagcctgagcgcctctgtgggagacagagtgaccatcacatgcaagagcagccagagcgtgctgtactccagcaatcagaagaactacctggcctggttccagcagaagcctggcaaggctcctaagctgctgatctactgggccagcaccagagaaagcggcgtgccaagcagattttctggcagcggctctggcaccgacttcaccctgacaatatccagcctccagcctgaggacttcgccacctacttttgccaccagtacctgagcagctacacattcggacagggcaccaaggtggaaatcaagcggctcgagatccagaaccctgatcctgccgtgtaccagctgcgggatagcaagagcagcgacaagagcgtgtgtctgttcaccgacttcgacagccagaccaacgtgtcccagagcaaggactccgacgtgtacatcaccgataagtgcgtgctggacatgcggagcatggacttcaagagcaactccgccgtggcctggtccaacaagtccgatttcgcctgcgccaacgccttcaacaacagcattatccccgaggacacattcttcccaagccccgagagcagctgcgacgtgaagctggtggaaaagagcttcgagacagacaccaacctgaacttccagaacctgagcgtgatcggcttcagaatcctgctgctgaaagtggccggctttaacctgctgatgaccctgcggctgtggtccagccgcgccaagagaagcggatctggcgtgaagcagaccctgaatttcgacctgctgaagctggctggcgacgtggaatccaacccaggccctactagtatggactggatttggcgcatccttttccttgtcggcgctgctaccggcgcgcattccgggccccagctccagctgcaagagtctggacctggcctggtcaagcctagcgagacactgagcctgacctgtaccgtgtccggcgatagcatcagcagcggcgattactactggggctggatcagacagcctcctggcaaaggactggaatggatcggccacatctactacagcggcgtgacctactacaaccccagcctgaagtccagagtgaccatcagcgtggacaccagccggaaccagttctccctgaagctgtctagcgtgacagccgccgataccgccgtgtactactgcaccagagaggacagcagcaactggcggagtagaggccagggaacactggtcacagttagctctggatccggcggaggcggaagtggaggcggaggatctggcggcggaggctctttcgaagaggtgcagctggttgaatctggcggaggactggttcagcctggcggatctctgagactgtcttgtgccgccagcggcttcaccttcaccacctattggatgcactgggtccgacaggcccctggcaaaggacttgagtgggtcggatatatcaggcccagcaccggctacacagagtacaaccagaagttcaaggaccgcttcaccatcagcgccgacaccagcaagaataccgcctacctccagatgaacagcctgagagccgaggacaccgccgtgtactactgtgccagatccagatggctgctggactattggggccagggcacactggttacagtttctacgcgtgaggacctgaagaacgtgttcccacctgaggtggccgtgttcgagcctagcgaggccgagatcagccacacccagaaagccaccctcgtgtgcctggctaccggcttctaccccgaccatgtggaactgtcttggtgggtcaacggcaaagaggtgcacagcggcgtgtgtaccgacccccagccactgaaagaacagcccgccctgaacgacagccggtactgcctgagcagcagactgagagtgtccgccaccttctggcagaacccccggaaccacttcagatgccaggtgcagttctacggcctgagcgagaacgacgagtggacccaggacagagccaagcccgtgacccagatcgtgtctgccgaagcctggggcagagccgattgcggctttaccagcgagagctaccagcagggcgtgctgagcgccaccatcctgtacgagatcctgctgggcaaggccaccctgtacgccgtgctggtgtctgccctggtgctgatggctatggtcaagcggaaggacagccgggga

SEQ ID NO: 10438 - DNA, 3267 bp, Artificial Sequence
  Synthetic Polynucloetide
atggccttaccagtgaccgccttgctcctgccgctggccttgctgctccacgccgccaggccggaagtgcagctggttgaatctggcggaggactggttcagcctggcggatctctgagactgtcttgtgccgccagcggcttcagcttcagcgacttttggatgagctgggtccgacaggcccctggcaaaggacttgaatgggtcgccacaatcagccaggccggcagcgagaaggactacgtggactctgtgaagggcagattcaccatcagccgggacaacgccaagaagtccctgtacctccagatgaacagcctgagagccgaggacaccgccgtgtactattgtgcctctggcgtgtacagcttcgactacagaggccagggcaccctggtcacagtctcttctggtaccggcggaggcggatctggcggcggaggtagcggtggcggaggatctgaattcgacattcagatgacacagagccctagcagcctgagcgcctctgtgggagacagagtgaccatcacatgcaagagcagccagagcgtgctgtactccagcaatcagaagaactacctggcctggttccagcagaagcctggcaaggctcctaagctgctgatctactgggccagcaccagagaaagcggcgtgccaagcagattttctggcagcggctctggcaccgacttcaccctgacaatatccagcctccagcctgaggacttcgccacctacttttgccaccagtacctgagcagctacacattcggacagggcaccaaggtggaaatcaagcggctcgaggacctgaagaacgtgttcccacctgaggtggccgtgttcgagcctagcgaggccgagatcagccacacccagaaagccaccctcgtgtgcctggctaccggcttctaccccgaccatgtggaactgtcttggtgggtcaacggcaaagaggtgcacagcggcgtgtctaccgacccccagccactgaaagaacagcccgccctgaacgacagccggtactgcctgagcagcagactgagagtgtccgccaccttctggcagaacccccggaaccacttcagatgccaggtgcagttctacggcctgagcgagaacgacgagtggacccaggacagagccaagcccgtgacccagatcgtgtctgccgaagcctggggcagagccgattgcggatcccagagcttcggcctgctggaccccaagctgtgctacctgctggatggcatcctgttcatctacggcgtgatcctgaccgccctgttcctgagagtgaagttcagcagaagcgccgacgcccctgcctaccagcagggacagaaccaactgtacaacgagctgaacctgggcagacgggaagagtacgacgtgctggacaagcggagaggcagggaccctgagatgggcggaaagccccagcggagaaagaacccccaggaaggactgtataacgaactccagaaagacaagatggccgaagcctacagcgagatcggcatgaagggcgagcggagaagaggcaagggccacgatggcctgtaccagggcctgagcaccgccaccaaggacacctatgacgccctgcacatgcaggccctgcctccaagaagggccaagcgatctggatctggagcaacaaacttctcactactcaaacaagcaggtgacgtggaggagaatcccgggcctactagtatggactggatttggcgcatccttttccttgtcggcgctgctaccggcgcgcattccgggccccagctccagctgcaagagtctggacctggcctggtcaagcctagcgagacactgagcctgacctgtaccgtgtccggcgatagcatcagcagcggcgattactactggggctggatcagacagcctcctggcaaaggactggaatggatcggccacatctactacagcggcgtgacctactacaaccccagcctgaagtccagagtgaccatcagcgtggacaccagccggaaccagttctccctgaagctgtctagcgtgacagccgccgataccgccgtgtactactgcaccagagaggacagcagcaactggcggagtagaggccagggaacactggtcacagttagctctggatccggcggaggcggaagtggaggcggaggatctggcggcggaggctctttcgaagaggtgcagctggttgaatctggcggaggactggttcagcctggcggatctctgagactgtcttgtgccgccagcggcttcaccttcaccacctattggatgcactgggtccgacaggcccctggcaaaggacttgagtgggtcggatatatcaggcccagcaccggctacacagagtacaaccagaagttcaaggaccgcttcaccatcagcgccgacaccagcaagaataccgcctacctccagatgaacagcctgagagccgaggacaccgccgtgtactactgtgccagatccagatggctgctggactattggggccagggcacactggttacagtttctacgcgtatccagaaccctgatcctgccgtgtaccagctgcgggatagcaagagcagcgacaagagcgtgtgtctgttcaccgacttcgacagccagaccaacgtgtcccagagcaaggactccgacgtgtacatcaccgataagaccgtgctggacatgcggagcatggacttcaagagcaactccgccgtggcctggtccaacaagtccgatttcgcctgcgccaacgccttcaacaacagcattatccccgaggacacattcttcccaagccccgagagcagctgcggtacccagagttttgggttgttggaccctaaattgtgctatctgttggacggaatcctgttcatttacggagtgatcctgaccgcattgttcctgcgggttaagttttccagatccgcagacgcacccgcttaccaacaagggcagaaccaactctacaatgaacttaatttggggcggagggaagagtacgacgttctggacaaaaggaggggacgagatcccgagatgggcggaaagcctcagcgaaggaagaatccgcaagaggggctttataacgaactccagaaagataaaatggcagaagcctatagtgagattgggatgaagggagaaaggaggaggggtaaaggtcacgatgggttgtaccaaggattgagcacagccactaaagatacctatgatgcgctccacatgcaggccctgccgccaaga

SEQ ID NO: 10439 - DNA, 2757 bp, Artificial Sequence
  Synthetic Polynucloetide
atggccttaccagtgaccgccttgctcctgccgctggccttgctgctccacgccgccaggccggaagtgcagctggttgaatctggcggaggactggttcagcctggcggatctctgagactgtcttgtgccgccagcggcttcagcttcagcgacttttggatgagctgggtccgacaggcccctggcaaaggacttgaatgggtcgccacaatcagccaggccggcagcgagaaggactacgtggactctgtgaagggcagattcaccatcagccgggacaacgccaagaagtccctgtacctccagatgaacagcctgagagccgaggacaccgccgtgtactattgtgcctctggcgtgtacagcttcgactacagaggccagggcaccctggtcacagtctcttctggtaccggcggaggcggatctggcggcggaggtagcggtggcggaggatctgaattcgacattcagatgacacagagccctagcagcctgagcgcctctgtgggagacagagtgaccatcacatgcaagagcagccagagcgtgctgtactccagcaatcagaagaactacctggcctggttccagcagaagcctggcaaggctcctaagctgctgatctactgggccagcaccagagaaagcggcgtgccaagcagattttctggcagcggctctggcaccgacttcaccctgacaatatccagcctccagcctgaggacttcgccacctacttttgccaccagtacctgagcagctacacattcggacagggcaccaaggtggaaatcaagcggctcgagggacagcctaaggccaatcctaccgtgacactgttccctccaagcagcgaagaactccaggccaacaaggccacacttgtgtgcctgatctccgacttctaccctggggctgtgacagtggcttggaaggccgatggatctcctgtgaaagccggcgtggaaaccaccaagccatccaagcagagcaacaacaaatacgccgccagctcctacctgagcctgacacctgagcagtggaagtcccacagatcctacagctgccaagtgacccacgaaggcagcaccgtggaaaagacagtggcccctacagagtgcagccccatcaagaccgatgtgattacaatggaccccaaggacaactgctccaaggacgccaacgataccctgctgctccagctgaccaacaccagcgcctactacatgtacttgttgctgctgctgaagtccgtggtgtacttcgccatcatcacatgctgcctgctgcggagaaccgccttctgctgcaacggcgagaagtctagggccaagcgatctggatctggagcaacaaacttctcactactcaaacaagcaggtgacgtggaggagaatcccgggcctactagtatggactggatttggcgcatccttttccttgtcggcgctgctaccggcgcgcattccgggccccagctccagctgcaagagtctggacctggcctggtcaagcctagcgagacactgagcctgacctgtaccgtgtccggcgatagcatcagcagcggcgattactactggggctggatcagacagcctcctggcaaaggactggaatggatcggccacatctactacagcggcgtgacctactacaaccccagcctgaagtccagagtgaccatcagcgtggacaccagccggaaccagttctccctgaagctgtctagcgtgacagccgccgataccgccgtgtactactgcaccagagaggacagcagcaactggcggagtagaggccagggaacactggtcacagttagctctggatccggcggaggcggaagtggaggcggaggatctggcggcggaggctctttcgaagaggtgcagctggttgaatctggcggaggactggttcagcctggcggatctctgagactgtcttgtgccgccagcggcttcaccttcaccacctattggatgcactgggtccgacaggcccctggcaaaggacttgagtgggtcggatatatcaggcccagcaccggctacacagagtacaaccagaagttcaaggaccgcttcaccatcagcgccgacaccagcaagaataccgcctacctccagatgaacagcctgagagccgaggacaccgccgtgtactactgtgccagatccagatggctgctggactattggggccagggcacactggttacagtttctacgcgtgcctctacaaagggaccctccgtgtttcctctggctcccagcagcaagtctacaagcggaggaacagccgctctgggctgcctggtcaaggattactttcccgagcctgtgaccgtgtcctggaatagcggagcactgacaagcggcgtgcacacctttccagccgtgctgcaaagcagcggcctgtactctctgagcagcgtggtcacagtgcctagctctagcctgggcacccagacctacatctgcaatgtgaaccacaagcctagcaacaccaaggtggacaagagagtggaacccaagagctgtgaagtgaaaaccgactccaccgaccacgtgaagcccaaagagacagagaacaccaagcagcccagcaagagctgccacaagcccaaggccatcgtgcacaccgagaaagtgaacatgatgagcctgaccgtgctgggcctgcggatgctgttcgccaaaaccgtggccgtgaacttcctgctgaccgccaagctgttcttcctc

SEQ ID NO: 10440 - DNA, 2700 bp, Artificial Sequence
  Synthetic Polynucloetide
atggccttaccagtgaccgccttgctcctgccgctggccttgctgctccacgccgccaggccggaagtgcagctggttgaatctggcggaggactggttcagcctggcggatctctgagactgtcttgtgccgccagcggcttcagcttcagcgacttttggatgagctgggtccgacaggcccctggcaaaggacttgaatgggtcgccacaatcagccaggccggcagcgagaaggactacgtggactctgtgaagggcagattcaccatcagccgggacaacgccaagaagtccctgtacctccagatgaacagcctgagagccgaggacaccgccgtgtactattgtgcctctggcgtgtacagcttcgactacagaggccagggcaccctggtcacagtctcttctggtaccggcggaggcggatctggcggcggaggtagcggtggcggaggatctgaattcgacattcagatgacacagagccctagcagcctgagcgcctctgtgggagacagagtgaccatcacatgcaagagcagccagagcgtgctgtactccagcaatcagaagaactacctggcctggttccagcagaagcctggcaaggctcctaagctgctgatctactgggccagcaccagagaaagcggcgtgccaagcagattttctggcagcggctctggcaccgacttcaccctgacaatatccagcctccagcctgaggacttcgccacctacttttgccaccagtacctgagcagctacacattcggacagggcaccaaggtggaaatcaagcggctcgagggacagcctaaggccaatcctaccgtgacactgttccctccaagcagcgaagaactccaggccaacaaggccacacttgtgtgcctgatctccgacttctaccctggggctgtgacagtggcttggaaggccgatggatctcctgtgaaagccggcgtggaaaccaccaagccatccaagcagagcaacaacaaatacgccgccagctcctacctgagcctgacacctgagcagtggaagtcccacagatcctacagctgccaagtgacccacgaaggcagcaccgtggaaaagacagtggcccctacagagtgcagcggcagagccgattgcggctttaccagcgagagctaccagcagggcgtgctgagcgccaccatcctgtacgagatcctgctgggcaaggccaccctgtacgccgtgctggtgtctgccctggtgctgatggctatggtcaagcggaaggacagccggggacgcgccaagagaagcggatctggcgtgaagcagaccctgaatttcgacctgctgaagctggctggcgacgtggaatccaacccaggccctactagtatggactggatttggcgcatccttttccttgtcggcgctgctaccggcgcgcattccgggccccagctccagctgcaagagtctggacctggcctggtcaagcctagcgagacactgagcctgacctgtaccgtgtccggcgatagcatcagcagcggcgattactactggggctggatcagacagcctcctggcaaaggactggaatggatcggccacatctactacagcggcgtgacctactacaaccccagcctgaagtccagagtgaccatcagcgtggacaccagccggaaccagttctccctgaagctgtctagcgtgacagccgccgataccgccgtgtactactgcaccagagaggacagcagcaactggcggagtagaggccagggaacactggtcacagttagctctggatccggcggaggcggaagtggaggcggaggatctggcggcggaggctctttcgaagaggtgcagctggttgaatctggcggaggactggttcagcctggcggatctctgagactgtcttgtgccgccagcggcttcaccttcaccacctattggatgcactgggtccgacaggcccctggcaaaggacttgagtgggtcggatatatcaggcccagcaccggctacacagagtacaaccagaagttcaaggaccgcttcaccatcagcgccgacaccagcaagaataccgcctacctccagatgaacagcctgagagccgaggacaccgccgtgtactactgtgccagatccagatggctgctggactattggggccagggcacactggttacagtttctacgcgtgcctctacaaagggaccctccgtgtttcctctggctcccagcagcaagtctacaagcggaggaacagccgctctgggctgcctggtcaaggattactttcccgagcctgtgaccgtgtcctggaatagcggagcactgacaagcggcgtgcacacctttccagccgtgctgcaaagcagcggcctgtactctctgagcagcgtggtcacagtgcctagctctagcctgggcacccagacctacatctgcaatgtgaaccacaagcctagcaacaccaaggtggacaagagagtggaacccaagagctgtatccccgaggacacattcttcccaagccccgagagcagctgcgacgtgaagctggtggaaaagagcttcgagacagacaccaacctgaacttccagaacctgagcgtgatcggcttcagaatcctgctgctgaaagtggccggctttaacctgctgatgaccctgcggctgtggtccagc

SEQ ID NO: 10441 - DNA, 2271 bp, Artificial Sequence
  Synthetic Polynucloetide
atggccttaccagtgaccgccttgctcctgccgctggccttgctgctccacgccgccaggccggaagtgcaggttttggagtctggcggaggactggttcagcctggcggatctctgagactgtcttgtgccgccagcggcttcaccttcagcaactttgccatgagctgggtccgacaggcccctggcaaaggacttgaatgggtgtccacaatcagcggcagcgccggcacaacagattacgccgattctgtgaagggcagattcaccatcagccgggacaacagcaagaaaaccctgtacctccagatgaacagcctgcgcgtggaagataccgccgtgtactactgtgccgatggcagaggccccttcttcgattatcgcggccagggcacactggtcaccgtttcttctggtaccggcggaggcggatctggcggcggaggtagcggtggcggaggatctgaattcgacattcagatgacacagagccctagcagcctgagcgcctctgtgggagacagagtgaccatcacatgcaagagcagccagagcgtgctgtactccagcaatcagaagaactacctggcctggttccagcagaagcctggcaaggctcctaagctgctgatctactgggccagcaccagagaaagcggcgtgccaagcagattttctggcagcggctctggcaccgacttcaccctgacaatatccagcctccagcctgaggacttcgccacctacttttgccaccagtacctgagcagctacacattcggacagggcaccaaggtggaaatcaagcggctcgaggacctgaagaacgtgttcccacctgaggtggccgtgttcgagcctagcgaggccgagatcagccacacccagaaagccaccctcgtgtgcctggctaccggcttctaccccgaccatgtggaactgtcttggtgggtcaacggcaaagaggtgcacagcggcgtgtgtaccgacccccagccactgaaagaacagcccgccctgaacgacagccggtactgcctgagcagcagactgagagtgtccgccaccttctggcagaacccccggaaccacttcagatgccaggtgcagttctacggcctgagcgagaacgacgagtggacccaggacagagccaagcccgtgacccagatcgtgtctgccgaagcctggggcagagccgattgcggctttaccagcgagagctaccagcagggcgtgctgagcgccaccatcctgtacgagatcctgctgggcaaggccaccctgtacgccgtgctggtgtctgccctggtgctgatggctatggtcaagcggaaggacagccggggaagggccaagcgatctggatctggagcaacaaacttctcactactcaaacaagcaggtgacgtggaggagaatcccgggcctactagtatggactggatttggcgcatccttttccttgtcggcgctgctaccggcgcgcattccttcgaagaggtgcagctggttgaatctggcggaggactggttcagcctggcggatctctgagactgtcttgtgccgccagcggcttcaccttcaccacctattggatgcactgggtccgacaggcccctggcaaaggacttgagtgggtcggatatatcaggcccagcaccggctacacagagtacaaccagaagttcaaggaccgcttcaccatcagcgccgacaccagcaagaataccgcctacctccagatgaacagcctgagagccgaggacaccgccgtgtactactgtgccagatccagatggctgctggactattggggccagggcacactggttacagtttctacgcgtatccagaaccctgatcctgccgtgtaccagctgcgggatagcaagagcagcgacaagagcgtgtgtctgttcaccgacttcgacagccagaccaacgtgtcccagagcaaggactccgacgtgtacatcaccgataagtgcgtgctggacatgcggagcatggacttcaagagcaactccgccgtggcctggtccaacaagtccgatttcgcctgcgccaacgccttcaacaacagcattatccccgaggacacattcttcccaagccccgagagcagctgcgacgtgaagctggtggaaaagagcttcgagacagacaccaacctgaacttccagaacctgagcgtgatcggcttcagaatcctgctgctgaaagtggccggctttaacctgctgatgaccctgcggctgtggtccagc

SEQ ID NO: 10442 - DNA, 2274 bp, Artificial Sequence
  Synthetic Polynucloetide
atggccttaccagtgaccgccttgctcctgccgctggccttgctgctccacgccgccaggccggacattcagatgacacagagccctagcagcctgagcgcctctgtgggagacagagtgaccatcacatgcaagagcagccagagcgtgctgtactccagcaatcagaagaactacctggcctggttccagcagaagcctggcaaggctcctaagctgctgatctactgggccagcaccagagaaagcggcgtgccaagcagattttctggcagcggctctggcaccgacttcaccctgacaatatccagcctccagcctgaggacttcgccacctacttttgccaccagtacctgagcagctacacattcggacagggcaccaaggtggaaatcaagcggctcgaggacctgaagaacgtgttcccacctgaggtggccgtgttcgagcctagcgaggccgagatcagccacacccagaaagccaccctcgtgtgcctggctaccggcttctaccccgaccatgtggaactgtcttggtgggtcaacggcaaagaggtgcacagcggcgtgtgtaccgacccccagccactgaaagaacagcccgccctgaacgacagccggtactgcctgagcagcagactgagagtgtccgccaccttctggcagaacccccggaaccacttcagatgccaggtgcagttctacggcctgagcgagaacgacgagtggacccaggacagagccaagcccgtgacccagatcgtgtctgccgaagcctggggcagagccgattgcggctttaccagcgagagctaccagcagggcgtgctgagcgccaccatcctgtacgagatcctgctgggcaaggccaccctgtacgccgtgctggtgtctgccctggtgctgatggctatggtcaagcggaaggacagccggggaagggccaagcgatctggatctggagcaacaaacttctcactactcaaacaagcaggtgacgtggaggagaatcccgggcctactagtatggactggatttggcgcatccttttccttgtcggcgctgctaccggcgcccattccgggcccgaagtgcagctggttgaatctggcggaggactggttcaggctggcggatctctgagactgtcttgtgccgccagcggcagaacctttagcatgggctggtttagacaggcccctggcaaagagagagagttcgtcgccgccatcacatactctggcggcagcccttactacgccgactctgtgaagggcagattcaccatcagccgggacaacgccaagaacaccgtgtacctccagatgaacagcctgaagcctgaggacaccgccgtgtactactgcgccgccaatccaacatacggcagcgactggaacgccgagaattggggccagggaacccaagtgacagtgtctagcggatccggcggcggaggatctggcggaggcggatctgggggcggaggctctttcgaagaggtgcagctggttgaatctggcggaggactggttcagcctggcggatctctgagactgtcttgtgccgccagcggcttcaccttcaccacctattggatgcactgggtccgacaggcccctggcaaaggacttgagtgggtcggatatatcaggcccagcaccggctacacagagtacaaccagaagttcaaggaccgcttcaccatcagcgccgacaccagcaagaataccgcctacctccagatgaacagcctgagagccgaggacaccgccgtgtactactgtgccagatccagatggctgctggactattggggccagggcacactggttacagtttctacgcgtatccagaaccctgatcctgccgtgtaccagctgcgggatagcaagagcagcgacaagagcgtgtgtctgttcaccgacttcgacagccagaccaacgtgtcccagagcaaggactccgacgtgtacatcaccgataagtgcgtgctggacatgcggagcatggacttcaagagcaactccgccgtggcctggtccaacaagtccgatttcgcctgcgccaacgccttcaacaacagcattatccccgaggacacattcttcccaagccccgagagcagctgcgacgtgaagctggtggaaaagagcttcgagacagacaccaacctgaacttccagaacctgagcgtgatcggcttcagaatcctgctgctgaaagtggccggctttaacctgctgatgaccctgcggctgtggtccagc

SEQ ID NO: 10443 - DNA, 2655 bp, Artificial Sequence
  Synthetic Polynucloetide
atggccttaccagtgaccgccttgctcctgccgctggccttgctgctccacgccgccaggccggacattcagatgacacagagccctagcagcctgagcgcctctgtgggagacagagtgaccatcacatgcaagagcagccagagcgtgctgtactccagcaatcagaagaactacctggcctggttccagcagaagcctggcaaggctcctaagctgctgatctactgggccagcaccagagaaagcggcgtgccaagcagattttctggcagcggctctggcaccgacttcaccctgacaatatccagcctccagcctgaggacttcgccacctacttttgccaccagtacctgagcagctacacattcggacagggcaccaaggtggaaatcaagcggctcgaggacctgaagaacgtgttcccacctgaggtggccgtgttcgagcctagcgaggccgagatcagccacacccagaaagccaccctcgtgtgcctggctaccggcttctaccccgaccatgtggaactgtcttggtgggtcaacggcaaagaggtgcacagcggcgtgtgtaccgacccccagccactgaaagaacagcccgccctgaacgacagccggtactgcctgagcagcagactgagagtgtccgccaccttctggcagaacccccggaaccacttcagatgccaggtgcagttctacggcctgagcgagaacgacgagtggacccaggacagagccaagcccgtgacccagatcgtgtctgccgaagcctggggcagagccgattgcggctttaccagcgagagctaccagcagggcgtgctgagcgccaccatcctgtacgagatcctgctgggcaaggccaccctgtacgccgtgctggtgtctgccctggtgctgatggctatggtcaagcggaaggacagccggggaagggccaagcgatctggatctggagcaacaaacttctcactactcaaacaagcaggtgacgtggaggagaatcccgggcctactagtatggactggatttggcgcatccttttccttgtcggcgctgctaccggcgcccattcccaactgcaactgcaagagtctggccctggcctggtcaagccttctgaaaccctgagcctgacctgtaccgtgtccggcggctctatcagcagcggcgattactactggggctggatcagacagcctccaggcaagggactcgaatggatcggcagcatcagctacagcggctccacctactacaacccaagcctgaagtccagagtgaccatcagcgtggacaccagcagaaaccagttctccctgaagctgagcagcgtgacagccgccgatacagccgtgtattattgcaccagagaggacagcagcaactggcggagtagaggacagggcacactggtcacagtgtcctcttctggaggcggtggaagcggtggaggaggatctgaagtgcagctggttgaatctggcggaggactggttcaggctggcggatctctgagactgtcttgtgccgccagcggcagaacctttagcatgggctggtttagacaggcccctggcaaagagagagagttcgtcgccgccatcacatactctggcggcagcccttactacgccgactctgtgaagggcagattcaccatcagccgggacaacgccaagaacaccgtgtacctccagatgaacagcctgaagcctgaggacaccgccgtgtactactgcgccgccaatccaacatacggcagcgactggaacgccgagaattggggccagggaacccaagtgacagtgtctagcggatccggcggcggaggatctggcggaggcggatctgggggcggaggctctttcgaagaggtgcagctggttgaatctggcggaggactggttcagcctggcggatctctgagactgtcttgtgccgccagcggcttcaccttcaccacctattggatgcactgggtccgacaggcccctggcaaaggacttgagtgggtcggatatatcaggcccagcaccggctacacagagtacaaccagaagttcaaggaccgcttcaccatcagcgccgacaccagcaagaataccgcctacctccagatgaacagcctgagagccgaggacaccgccgtgtactactgtgccagatccagatggctgctggactattggggccagggcacactggttacagtttctacgcgtatccagaaccctgatcctgccgtgtaccagctgcgggatagcaagagcagcgacaagagcgtgtgtctgttcaccgacttcgacagccagaccaacgtgtcccagagcaaggactccgacgtgtacatcaccgataagtgcgtgctggacatgcggagcatggacttcaagagcaactccgccgtggcctggtccaacaagtccgatttcgcctgcgccaacgccttcaacaacagcattatccccgaggacacattcttcccaagccccgagagcagctgcgacgtgaagctggtggaaaagagcttcgagacagacaccaacctgaacttccagaacctgagcgtgatcggcttcagaatcctgctgctgaaagtggccggctttaacctgctgatgaccctgcggctgtggtccagc

SEQ ID NO: 10444 - DNA, 2682 bp, Artificial Sequence
  Synthetic Polynucloetide
atggccttaccagtgaccgccttgctcctgccgctggccttgctgctccacgccgccaggccggaagtgcaggttttggagtctggcggaggactggttcagcctggcggatctctgagactgtcttgtgccgccagcggcttcaccttcagcaactttgccatgagctgggtccgacaggcccctggcaaaggacttgaatgggtgtccacaatcagcggcagcgccggcacaacagattacgccgattctgtgaagggcagattcaccatcagccgggacaacagcaagaaaaccctgtacctccagatgaacagcctgcgcgtggaagataccgccgtgtactactgtgccgatggcagaggccccttcttcgattatcgcggccagggcacactggtcaccgtttcttctggtaccggcggaggcggatctggcggcggaggtagcggtggcggaggatctgaattcgacattcagatgacacagagccctagcagcctgagcgcctctgtgggagacagagtgaccatcacatgcaagagcagccagagcgtgctgtactccagcaatcagaagaactacctggcctggttccagcagaagcctggcaaggctcctaagctgctgatctactgggccagcaccagagaaagcggcgtgccaagcagattttctggcagcggctctggcaccgacttcaccctgacaatatccagcctccagcctgaggacttcgccacctacttttgccaccagtacctgagcagctacacattcggacagggcaccaaggtggaaatcaagcggctcgaggacctgaagaacgtgttcccacctgaggtggccgtgttcgagcctagcgaggccgagatcagccacacccagaaagccaccctcgtgtgcctggctaccggcttctaccccgaccatgtggaactgtcttggtgggtcaacggcaaagaggtgcacagcggcgtgtgtaccgacccccagccactgaaagaacagcccgccctgaacgacagccggtactgcctgagcagcagactgagagtgtccgccaccttctggcagaacccccggaaccacttcagatgccaggtgcagttctacggcctgagcgagaacgacgagtggacccaggacagagccaagcccgtgacccagatcgtgtctgccgaagcctggggcagagccgattgcggctttaccagcgagagctaccagcagggcgtgctgagcgccaccatcctgtacgagatcctgctgggcaaggccaccctgtacgccgtgctggtgtctgccctggtgctgatggctatggtcaagcggaaggacagccggggaagggccaagcgatctggatctggagcaacaaacttctcactactcaaacaagcaggtgacgtggaggagaatcccgggcctactagtatggactggatttggcgcatccttttccttgtcggcgctgctaccggcgcccattccgggcccgaagtgcagctggttgaatctggcggaggactggttcaggctggcggatctctgagactgtcttgtgccgccagcggcagaacctttagcatgggctggtttagacaggcccctggcaaagagagagagttcgtcgccgccatcacatacagcggcggcagcccttactacgcctcttctgtcagaggccggttcaccatcagccgggacaacgccaagaacaccgtgtacctccagatgaacagcctgaagccagaggacaccgccgtgtactactgtgccgccaatccaacctacggcagcgactggaatgccgagaattggggccagggcacccaagtgacagtgtctagtggatccggcggcggaggatctggcggaggcggatctgggggcggaggctctttcgaagaggtgcagctggttgaatctggcggaggactggttcagcctggcggatctctgagactgtcttgtgccgccagcggcttcaccttcaccacctattggatgcactgggtccgacaggcccctggcaaaggacttgagtgggtcggatatatcaggcccagcaccggctacacagagtacaaccagaagttcaaggaccgcttcaccatcagcgccgacaccagcaagaataccgcctacctccagatgaacagcctgagagccgaggacaccgccgtgtactactgtgccagatccagatggctgctggactattggggccagggcacactggttacagtttctacgcgtatccagaaccctgatcctgccgtgtaccagctgcgggatagcaagagcagcgacaagagcgtgtgtctgttcaccgacttcgacagccagaccaacgtgtcccagagcaaggactccgacgtgtacatcaccgataagtgcgtgctggacatgcggagcatggacttcaagagcaactccgccgtggcctggtccaacaagtccgatttcgcctgcgccaacgccttcaacaacagcattatccccgaggacacattcttcccaagccccgagagcagctgcgacgtgaagctggtggaaaagagcttcgagacagacaccaacctgaacttccagaacctgagcgtgatcggcttcagaatcctgctgctgaaagtggccggctttaacctgctgatgaccctgcggctgtggtccagc

SEQ ID NO: 10445 - DNA, 2178 bp, Artificial Sequence
  Synthetic Polynucloetide
atggccttaccagtgaccgccttgctcctgccgctggccttgctgctccacgccgccaggccggaggtgcagctggttgaatctggcggaggactggttcagcctggcggatctctgagactgtcttgtgccgccagcggctacaccttcaccacctattggatgcactgggtccgacaggcccctggcaaaggacttgagtgggtcggatatatcaggcccagcaccggctacacagagtacaaccagaagttcaaggaccgcttcaccatcagcgccgacaccagcaagaataccgcctacctccagatgaacagcctgagagccgaggacaccgccgtgtactactgtgccagatccagatggctgctggactattggggccagggcacactggttacagtttctggcggaggcggaagtggaggcggaggatctggcggcggaggctctgacattcagatgacacagagccctagcagcctgagcgcctctgtgggagacagagtgaccatcacatgcaagagcagccagagcctgctgtactccagcaatcagaagaactacctggcctggttccagcagaagcctggcaaggctcctaagctgctgatctactgggccagcaccagagaaagcggcgtgccaagcagattttctggcagcggctctggcaccgacttcaccctgacaatatccagcctccagcctgaggacttcgccacctacttttgccaccagtacctgagcagctacacattcggacagggcaccaaggtggaaatcaagcggacgcgtgagcagaaactgatctcggaagaggatctggcgaagcccaccacgacgccagcgccgcgaccaccaacaccggcgcccaccatcgcgtcgcagcccctgtccctgcgcccagaggcgtgccggccagcggcggggggcgcagtgcacacgagggggctggacttcgcctgtgacatctacatctgggcgcccttggccgggacttgtggggtccttctcctgtcactggttatcaccctttactgcaaacggggcagaaagaaactcctgtatatattcaaacaaccatttatgagaccagtacaaactactcaagaggaagatggctgtagctgccgatttccagaagaagaagaaggaggatgtgaactgagagtgaagttcagcaggagcgcagacgcccccgcgtaccagcagggccagaaccagctctataacgagctgaatctaggacgaagagaggagtacgatgttttggacaagagacgtggccgggaccctgagatggggggaaagccgagaaggaagaaccctcaggaaggcctgtacaatgaactgcagaaagataagatggcggaggcctacagtgagattgggatgaaaggcgagcgccggaggggcaaggggcacgatggcctttaccagggtctcagtacagccaccaaggacacctacgacgcccttcacatgcaggccctgccccctcgctctagtggctccggcgagggcagaggaagtctactaacctgcggagatgtggaagaaaatcctggcccacatatgaccgagtacaagcccacggtgcgcctcgccacccgcgacgacgtccccagggccgtacgcaccctcgccgccgcgttcgccgactaccccgccacgcgccacaccgtcgatccggaccgccacatcgagcgggtcaccgagctgcaagaactcttcctcacgcgcgtcgggctcgacatcggcaaggtgtgggtcgcggacgacggcgccgcggtggcggtctggaccacgccggagagcgtcgaagcgggggcggtgttcgccgagatcggcccgcgcatggccgagttgagcggttcccggctggccgcgcagcaacagatggaaggcctcctggcgccgcaccggcccaaggagcccgcgtggttcctggccaccgtcggcgtctcgcccgaccaccagggcaagggtctgggcagcgccgtcgtgctccccggagtggaggcggccgagcgcgccggggtgcccgccttcctggagacctccgcgccccgcaacctccccttctacgagcggctcggcttcaccgtcaccgccgacgtcgaggtgcccgaaggaccgcgcacctggtgcatgacccgcaagcccggtgcctga

SEQ ID NO: 10446 - DNA, 2160 bp, Artificial Sequence
  Synthetic Polynucloetide
atggccttaccagtgaccgccttgctcctgccgctggccttgctgctccacgccgccaggccggaggtgcagctggttgaatctggcggaggactggttcagcctggcggatctctgagactgtcttgtgccgccagcggctacaccttcaccacctattggatgcactgggtccgacaggcccctggcaaaggacttgagtgggtcggatatatcaggcccagcaccggctacacagagtacaaccagaagttcaaggaccgcttcaccatcagcgccgacaccagcaagaataccgcctacctccagatgaacagcctgagagccgaggacaccgccgtgtactactgtgccagatccagatggctgctggactattggggccagggcacactggttacagtttctggcggaggcggaagtggaggcggaggatctggcggcggaggctctgacattcagatgacacagagccctagcagcctgagcgcctctgtgggagacagagtgaccatcacatgcaagagcagccagagcctgctgtactccagcaatcagaagaactacctggcctggttccagcagaagcctggcaaggctcctaagctgctgatctactgggccagcaccagagaaagcggcgtgccaagcagattttctggcagcggctctggcaccgacttcaccctgacaatatccagcctccagcctgaggacttcgccacctacttttgccaccagtacctgagcagctacacattcggacagggcaccaaggtggaaatcaagcggacgcgtgagcagaaactgatctcggaagaggatctgaaaattgaagttatgtatcctcctccttacctagacaatgagaagagcaatggaaccattatccatgtgaaagggaaacacctttgtccaagtcccctatttcccggaccttctaagcccttttgggtgctggtggtggttgggggagtcctggcttgctatagcttgctagtaacagtggcctttattattttctgggtgaggagtaagaggagcaggctcctgcacagtgactacatgaacatgactccacgccgccccggacccacccgcaagcattaccagccctatgccccaccacgcgacttcgcagcctatcgctccagagtgaagttcagcaggagcgcagacgcccccgcgtaccagcagggccagaaccagctctataacgagctcaatctaggacgaagagaggagtacgatgttttggacaagagacgtggccgggaccctgagatggggggaaagccgagaaggaagaaccctcaggaaggcctgtacaatgaactgcagaaagataagatggcggaggcctacagtgagattgggatgaaaggcgagcgccggaggggcaaggggcacgatggcctttaccagggtctcagtacagccaccaaggacacctacgacgcccttcacatgcaggccctgccccctcgctctagtggctccggcgagggcagaggaagtctactaacctgcggagatgtggaagaaaatcctggcccacatatgaccgagtacaagcccacggtgcgcctcgccacccgcgacgacgtccccagggccgtacgcaccctcgccgccgcgttcgccgactaccccgccacgcgccacaccgtcgatccggaccgccacatcgagcgggtcaccgagctgcaagaactcttcctcacgcgcgtcgggctcgacatcggcaaggtgtgggtcgcggacgacggcgccgcggtggcggtctggaccacgccggagagcgtcgaagcgggggcggtgttcgccgagatcggcccgcgcatggccgagttgagcggttcccggctggccgcgcagcaacagatggaaggcctcctggcgccgcaccggcccaaggagcccgcgtggttcctggccaccgtcggcgtctcgcccgaccaccagggcaagggtctgggcagcgccgtcgtgctccccggagtggaggcggccgagcgcgccggggtgcccgccttcctggagacctccgcgccccgcaacctccccttctacgagcggctcggcttcaccgtcaccgccgacgtcgaggtgcccgaaggaccgcgcacctggtgcatgacccgcaagcccggtgcctga

SEQ ID NO: 10447 - DNA, 1488 bp, Artificial Sequence
  Synthetic Polynucloetide
atggccttaccagtgaccgccttgctcctgccgctggccttgctgctccacgccgccaggccggaggtgcagctggttgaatctggcggaggactggttcagcctggcggatctctgagactgtcttgtgccgccagcggctacaccttcaccacctattggatgcactgggtccgacaggcccctggcaaaggacttgagtgggtcggatatatcaggcccagcaccggctacacagagtacaaccagaagttcaaggaccgcttcaccatcagcgccgacaccagcaagaataccgcctacctccagatgaacagcctgagagccgaggacaccgccgtgtactactgtgccagatccagatggctgctggactattggggccagggcacactggttacagtttctggcggaggcggaagtggaggcggaggatctggcggcggaggctctgacattcagatgacacagagccctagcagcctgagcgcctctgtgggagacagagtgaccatcacatgcaagagcagccagagcctgctgtactccagcaatcagaagaactacctggcctggttccagcagaagcctggcaaggctcctaagctgctgatctactgggccagcaccagagaaagcggcgtgccaagcagattttctggcagcggctctggcaccgacttcaccctgacaatatccagcctccagcctgaggacttcgccacctacttttgccaccagtacctgagcagctacacattcggacagggcaccaaggtggaaatcaagcggacgcgtgagcagaaactgatctcggaagaggatctgaaaattgaagttatgtatcctcctccttacctagacaatgagaagagcaatggaaccattatccatgtgaaagggaaacacctttgtccaagtcccctatttcccggaccttctaagcccttttgggtgctggtggtggttgggggagtcctggcttgctatagcttgctagtaacagtggcctttattattttctgggtgaggagtaagaggagcaggctcctgcacagtgactacatgaacatgactccacgccgccccggacccacccgcaagcattaccagccctatgccccaccacgcgacttcgcagcctatcgctccagagtgaagttcagcaggagcgcagacgcccccgcgtaccagcagggccagaaccagctctataacgagctcaatctaggacgaagagaggagtacgatgttttggacaagagacgtggccgggaccctgagatggggggaaagccgagaaggaagaaccctcaggaaggcctgtacaatgaactgcagaaagataagatggcggaggcctacagtgagattgggatgaaaggcgagcgccggaggggcaaggggcacgatggcctttaccagggtctcagtacagccaccaaggacacctacgacgcccttcacatgcaggccctgccccctcgc

SEQ ID NO: 10448 - DNA, 1509 bp, Artificial Sequence
  Synthetic Polynucloetide
atggccttaccagtgaccgccttgctcctgccgctggccttgctgctccacgccgccaggccggaggtgcagctggttgaatctggcggaggactggttcagcctggcggatctctgagactgtcttgtgccgccagcggctacaccttcaccacctattggatgcactgggtccgacaggcccctggcaaaggacttgagtgggtcggatatatcaggcccagcaccggctacacagagtacaaccagaagttcaaggaccgcttcaccatcagcgccgacaccagcaagaataccgcctacctccagatgaacagcctgagagccgaggacaccgccgtgtactactgtgccagatccagatggctgctggactattggggccagggcacactggttacagtttctggcggaggcggaagtggaggcggaggatctggcggcggaggctctgacattcagatgacacagagccctagcagcctgagcgcctctgtgggagacagagtgaccatcacatgcaagagcagccagagcctgctgtactccagcaatcagaagaactacctggcctggttccagcagaagcctggcaaggctcctaagctgctgatctactgggccagcaccagagaaagcggcgtgccaagcagattttctggcagcggctctggcaccgacttcaccctgacaatatccagcctccagcctgaggacttcgccacctacttttgccaccagtacctgagcagctacacattcggacagggcaccaaggtggaaatcaagcggacgcgtgagcagaaactgatctcggaagaggatctggcgaagcccaccacgacgccagcgccgcgaccaccaacaccggcgcccaccatcgcgtcgcagcccctgtccctgcgcccagaggcgtgccggccagcggcggggggcgcagtgcacacgagggggctggacttcgcctgtgacatctacatctgggcgcccttggccgggacttgtggggtccttctcctgtcactggttatcaccctttactgcaaacggggcagaaagaaactcctgtatatattcaaacaaccatttatgagaccagtacaaactactcaagaggaagatggctgtagctgccgatttccagaagaagaagaaggaggatgtgaactgagagtgaagttcagcaggagcgcagacgcccccgcgtaccagcagggccagaaccagctctataacgagctgaatctaggacgaagagaggagtacgatgttttggacaagagacgtggccgggaccctgagatggggggaaagccgagaaggaagaaccctcaggaaggcctgtacaatgaactgcagaaagataagatggcggaggcctacagtgagattgggatgaaaggcgagcgccggaggggcaaggggcacgatggcctttaccagggtctcagtacagccaccaaggacacctacgacgcccttcacatgcaggccctgccccctcgctga

SEQ ID NO: 10449 - DNA, 1509 bp, Artificial Sequence
  Synthetic Polynucloetide
atggccttaccagtgaccgccttgctcctgccgctggccttgctgctccacgccgccaggccggacattcagatgacacagagccctagcagcctgagcgcctctgtgggagacagagtgaccatcacatgcaagagcagccagagcctgctgtactccagcaatcagaagaactacctggcctggttccagcagaagcctggcaaggctcctaagctgctgatctactgggccagcaccagagaaagcggcgtgccaagcagattttctggcagcggctctggcaccgacttcaccctgacaatatccagcctccagcctgaggacttcgccacctacttttgccaccagtacctgagcagctacacattcggacagggcaccaaggtggaaatcaagcggggcggaggcggaagtggaggcggaggatctggcggcggaggctctgaggtgcagctggttgaatctggcggaggactggttcagcctggcggatctctgagactgtcttgtgccgccagcggctacaccttcaccacctattggatgcactgggtccgacaggcccctggcaaaggacttgagtgggtcggatatatcaggcccagcaccggctacacagagtacaaccagaagttcaaggaccgcttcaccatcagcgccgacaccagcaagaataccgcctacctccagatgaacagcctgagagccgaggacaccgccgtgtactactgtgccagatccagatggctgctggactattggggccagggcacactggttacagtttctacgcgtgagcagaaactgatctcggaagaggatctggcgaagcccaccacgacgccagcgccgcgaccaccaacaccggcgcccaccatcgcgtcgcagcccctgtccctgcgcccagaggcgtgccggccagcggcggggggcgcagtgcacacgagggggctggacttcgcctgtgacatctacatctgggcgcccttggccgggacttgtggggtccttctcctgtcactggttatcaccctttactgcaaacggggcagaaagaaactcctgtatatattcaaacaaccatttatgagaccagtacaaactactcaagaggaagatggctgtagctgccgatttccagaagaagaagaaggaggatgtgaactgagagtgaagttcagcaggagcgcagacgcccccgcgtaccagcagggccagaaccagctctataacgagctgaatctaggacgaagagaggagtacgatgttttggacaagagacgtggccgggaccctgagatggggggaaagccgagaaggaagaaccctcaggaaggcctgtacaatgaactgcagaaagataagatggcggaggcctacagtgagattgggatgaaaggcgagcgccggaggggcaaggggcacgatggcctttaccagggtctcagtacagccaccaaggacacctacgacgcccttcacatgcaggccctgccccctcgctga

SEQ ID NO: 10450 - DNA, 2748 bp, Artificial Sequence
  Synthetic Polynucloetide
atggccttaccagtgaccgccttgctcctgccgctggccttgctgctccacgccgccaggccggaggtgcagctggttgaatctggcggaggactggttcagcctggcggatctctgagactgtcttgtgccgccagcggctacaccttcaccacctattggatgcactgggtccgacaggcccctggcaaaggacttgagtgggtcggatatatcaggcccagcaccggctacacagagtacaaccagaagttcaaggaccgcttcaccatcagcgccgacaccagcaagaataccgcctacctccagatgaacagcctgagagccgaggacaccgccgtgtactactgtgccagatccagatggctgctggactattggggccagggcacactggttacagtttctggcggaggcggaagtggaggcggaggatctggcggcggaggctctgacattcagatgacacagagccctagcagcctgagcgcctctgtgggagacagagtgaccatcacatgcaagagcagccagagcctgctgtactccagcaatcagaagaactacctggcctggttccagcagaagcctggcaaggctcctaagctgctgatctactgggccagcaccagagaaagcggcgtgccaagcagattttctggcagcggctctggcaccgacttcaccctgacaatatccagcctccagcctgaggacttcgccacctacttttgccaccagtacctgagcagctacacattcggacagggcaccaaggtggaaatcaagcggacgcgtgagcagaaactgatctcggaagaggatctggcgaagcccaccacgacgccagcgccgcgaccaccaacaccggcgcccaccatcgcgtcgcagcccctgtccctgcgcccagaggcgtgccggccagcggcggggggcgcagtgcacacgagggggctggacttcgcctgtgacatctacatctgggcgcccttggccgggacttgtggggtccttctcctgtcactggttatcaccctttactgcgggcgcgccagagtgaagttcagcaggagcgcagacgcccccgcgtaccagcagggccagaaccagctctataacgagctgaatctaggacgaagagaggagtacgatgttttggacaagagacgtggccgggaccctgagatggggggaaagccgagaaggaagaaccctcaggaaggcctgtacaatgaactgcagaaagataagatggcggaggcctacagtgagattgggatgaaaggcgagcgccggaggggcaaggggcacgatggcctttaccagggtctcagtacagccaccaaggacacctacgacgcccttcacatgcaggccctgccccctcgctctagaggatctggagcaacaaacttctcactactcaaacaagcaggtgacgtggaggagaatcccgggcctgggatccacatggccacttacgaggttctctgtgaggtggcgcggaaactgggcacggatgacagggaagtggtattgttcctcctaaacgtgttcatacctcaacccacactggcccaattaattggagctcttagagctttaaaggaggagggcaggttaacgtttcccctgttagcggaatgtctgtttcgtgcaggtcgcagagacctcttgcgcgacctgcttcacttagacccgcgttttttagagcgccacctagcgggcacaatgagttatttcagcccttatcagctcactgttctccacgtagacggggagctgtgtgcgagggatattaggtctttgatatttttaagcaaggacactatagggtctcgcagcacaccacagacattcttacactgggtgtactgtatggaaaacttagacctactgggtcccactgacgtggatgccctaatgtcaatgcttagatctttgtcaagagtagacctacagcgccaagtgcaaaccctaatgggccttcacctttccggcccatcacactcccaacactatcgccatacaccactcgagaccgatttctacgactacaaggacgacgatgacaagactagtggctccggcgagggcagaggaagtctactaacctgcggagatgtggaagaaaatcctggcccacatatgaccgagtacaagcccacggtgcgcctcgccacccgcgacgacgtccccagggccgtacgcaccctcgccgccgcgttcgccgactaccccgccacgcgccacaccgtcgatccggaccgccacatcgagcgggtcaccgagctgcaagaactcttcctcacgcgcgtcgggctcgacatcggcaaggtgtgggtcgcggacgacggcgccgcggtggcggtctggaccacgccggagagcgtcgaagcgggggcggtgttcgccgagatcggcccgcgcatggccgagttgagcggttcccggctggccgcgcagcaacagatggaaggcctcctggcgccgcaccggcccaaggagcccgcgtggttcctggccaccgtcggcgtctcgcccgaccaccagggcaagggtctgggcagcgccgtcgtgctccccggagtggaggcggccgagcgcgccggggtgcccgccttcctggagacctccgcgccccgcaacctccccttctacgagcggctcggcttcaccgtcaccgccgacgtcgaggtgcccgaaggaccgcgcacctggtgcatgacccgcaagcccggtgcctga

SEQ ID NO: 10451 - DNA, 2568 bp, Artificial Sequence
  Synthetic Polynucloetide
atggccttaccagtgaccgccttgctcctgccgctggccttgctgctccacgccgccaggccggaggtgcagctggttgaatctggcggaggactggttcagcctggcggatctctgagactgtcttgtgccgccagcggctacaccttcaccacctattggatgcactgggtccgacaggcccctggcaaaggacttgagtgggtcggatatatcaggcccagcaccggctacacagagtacaaccagaagttcaaggaccgcttcaccatcagcgccgacaccagcaagaataccgcctacctccagatgaacagcctgagagccgaggacaccgccgtgtactactgtgccagatccagatggctgctggactattggggccagggcacactggttacagtttctctcgagatccagaaccctgatcctgccgtgtaccagctgcgggatagcaagagcagcgacaagagcgtgtgtctgttcaccgacttcgacagccagaccaacgtgtcccagagcaaggactccgacgtgtacatcaccgataagtgcgtgctggacatgcggagcatggacttcaagagcaactccgccgtggcctggtccaacaagtccgatttcgcctgcgccaacgccttcaacaacagcattatccccgaggacacattcttcccaagcagcgacgtgccctgcgacgtgaagctggtggaaaagagcttcgagacagacaccaacctgaacttccagaacctgagcgtgatcggcttcagaatcctgctgctgaaagtggccggctttaacctgctgatgaccctgcggctgtggtccagccgcgccaagagaagcggatctggcgtgaagcagaccctgaatttcgacctgctgaagctggctggcgacgtggaatccaacccaggccctactagtatggactggatttggcgcatccttttccttgtcggcgctgctaccggcgcgcattccttcgaagacattcagatgacacagagccctagcagcctgagcgcctctgtgggagacagagtgaccatcacatgcaagagcagccagagcctgctgtactccagcaatcagaagaactacctggcctggttccagcagaagcctggcaaggctcctaagctgctgatctactgggccagcaccagagaaagcggcgtgccaagcagattttctggcagcggctctggcaccgacttcaccctgacaatatccagcctccagcctgaggacttcgccacctacttttgccaccagtacctgagcagctacacattcggacagggcaccaaggtggaaatcaagcggacgcgtgaggacctgaagaacgtgttcccacctgaggtggccgtgttcgagcctagcaaggccgagatcgcccacacccagaaagccaccctcgtgtgcctggctaccggcttctaccccgaccatgtggaactgtcttggtgggtcaacggcaaagaggtgcacagcggcgtgtgtaccgacccccagccactgaaagaacagcccgccctgaacgacagccggtactgcctgagcagcagactgagagtgtccgccaccttctggcagaacccccggaaccacttcagatgccaggtgcagttctacggcctgagcgagaacgacgagtggacccaggacagagccaagcccgtgacccagatcgtgtctgccgaagcctggggcagagccgattgcggcatcaccagcgccagctaccaccagggcgtgctgagcgccaccatcctgtacgagatcctgctgggcaaggccaccctgtacgccgtgctggtgtctgccctggtgctgatggctatggtcaagcggaaggacagccggggaagggccaagcgatctggatctggagcaacaaacttctcactactcaaacaagcaggtgacgtggaggagaatcccgggccttctagaggccatatgaccgagtacaagcccacggtgcgcctcgccacccgcgacgacgtccccagggccgtacgcaccctcgccgccgcgttcgccgactaccccgccacgcgccacaccgtcgatccggaccgccacatcgagcgggtcaccgagctgcaagaactcttcctcacgcgcgtcgggctcgacatcggcaaggtgtgggtcgcggacgacggcgccgcggtggcggtctggaccacgccggagagcgtcgaagcgggggcggtgttcgccgagatcggcccgcgcatggccgagttgagcggttcccggctggccgcgcagcaacagatggaaggcctcctggcgccgcaccggcccaaggagcccgcgtggttcctggccaccgtcggcgtctcgcccgaccaccagggcaagggtctgggcagcgccgtcgtgctccccggagtggaggcggccgagcgcgccggggtgcccgccttcctggagacctccgcgccccgcaacctccccttctacgagcggctcggcttcaccgtcaccgccgacgtcgaggtgcccgaaggaccgcgcacctggtgcatgacccgcaagcccggtgcctga

SEQ ID NO: 10452 - DNA, 2565 bp, Artificial Sequence
  Synthetic Polynucloetide
atggccttaccagtgaccgccttgctcctgccgctggccttgctgctccacgccgccaggccggaggtgcagctggttgaatctggcggaggactggttcagcctggcggatctctgagactgtcttgtgccgccagcggctacaccttcaccacctattggatgcactgggtccgacaggcccctggcaaaggacttgagtgggtcggatatatcaggcccagcaccggctacacagagtacaaccagaagttcaaggaccgcttcaccatcagcgccgacaccagcaagaataccgcctacctccagatgaacagcctgagagccgaggacaccgccgtgtactactgtgccagatccagatggctgctggactattggggccagggcacactggttacagtttctctcgaggacctgaagaacgtgttcccacctgaggtggccgtgttcgagcctagcaaggccgagatcgcccacacccagaaagccaccctcgtgtgcctggctaccggcttctaccccgaccatgtggaactgtcttggtgggtcaacggcaaagaggtgcacagcggcgtgtgtaccgacccccagccactgaaagaacagcccgccctgaacgacagccggtactgcctgagcagcagactgagagtgtccgccaccttctggcagaacccccggaaccacttcagatgccaggtgcagttctacggcctgagcgagaacgacgagtggacccaggacagagccaagcccgtgacccagatcgtgtctgccgaagcctggggcagagccgattgcggcatcaccagcgccagctaccaccagggcgtgctgagcgccaccatcctgtacgagatcctgctgggcaaggccaccctgtacgccgtgctggtgtctgccctggtgctgatggctatggtcaagcggaaggacagccggggaagggccaagcgatctggatctggagcaacaaacttctcactactcaaacaagcaggtgacgtggaggagaatcccgggcctactagtatggactggatttggcgcatccttttccttgtcggcgctgctaccggcgcgcattccttcgaagacattcagatgacacagagccctagcagcctgagcgcctctgtgggagacagagtgaccatcacatgcaagagcagccagagcctgctgtactccagcaatcagaagaactacctggcctggttccagcagaagcctggcaaggctcctaagctgctgatctactgggccagcaccagagaaagcggcgtgccaagcagattttctggcagcggctctggcaccgacttcaccctgacaatatccagcctccagcctgaggacttcgccacctacttttgccaccagtacctgagcagctacacattcggacagggcaccaaggtggaaatcaagcggacgcgtatccagaaccctgatcctgccgtgtaccagctgcgggatagcaagagcagcgacaagagcgtgtgtctgttcaccgacttcgacagccagaccaacgtgtcccagagcaaggactccgacgtgtacatcaccgataagtgcgtgctggacatgcggagcatggacttcaagagcaactccgccgtggcctggtccaacaagtccgatttcgcctgcgccaacgccttcaacaacagcattatccccgaggacacattcttcccaagcagcgacgtgccctgcgacgtgaagctggtggaaaagagcttcgagacagacaccaacctgaacttccagaacctgagcgtgatcggcttcagaatcctgctgctgaaagtggccggctttaacctgctgatgaccctgcggctgtggtccagccgcgccaagagaagcggatctggcgtgaagcagaccctgaatttcgacctgctgaagctggctggcgacgtggaatccaacccaggcccttctagaggccatatgaccgagtacaagcccacggtgcgcctcgccacccgcgacgacgtccccagggccgtacgcaccctcgccgccgcgttcgccgactaccccgccacgcgccacaccgtcgatccggaccgccacatcgagcgggtcaccgagctgcaagaactcttcctcacgcgcgtcgggctcgacatcggcaaggtgtgggtcgcggacgacggcgccgcggtggcggtctggaccacgccggagagcgtcgaagcgggggcggtgttcgccgagatcggcccgcgcatggccgagttgagcggttcccggctggccgcgcagcaacagatggaaggcctcctggcgccgcaccggcccaaggagcccgcgtggttcctggccaccgtcggcgtctcgcccgaccaccagggcaagggtctgggcagcgccgtcgtgctccccggagtggaggcggccgagcgcgccggggtgcccgccttcctggagacctccgcgccccgcaacctccccttctacgagcggctcggcttcaccgtcaccgccgacgtcgaggtgcccgaaggaccgcgcacctggtgcatgacccgcaagcccggtgcctga

SEQ ID NO: 10453 - DNA, 1863 bp, Artificial Sequence
  Synthetic Polynucloetide
atggccttaccagtgaccgccttgctcctgccgctggccttgctgctccacgccgccaggccggaggtgcagctggttgaatctggcggaggactggttcagcctggcggatctctgagactgtcttgtgccgccagcggctacaccttcaccacctattggatgcactgggtccgacaggcccctggcaaaggacttgagtgggtcggatatatcaggcccagcaccggctacacagagtacaaccagaagttcaaggaccgcttcaccatcagcgccgacaccagcaagaataccgcctacctccagatgaacagcctgagagccgaggacaccgccgtgtactactgtgccagatccagatggctgctggactattggggccagggcacactggttacagtttctctcgaggacctgaagaacgtgttcccacctgaggtggccgtgttcgagcctagcgaggccgagatcagccacacccagaaagccaccctcgtgtgcctggctaccggcttctaccccgaccatgtggaactgtcttggtgggtcaacggcaaagaggtgcacagcggcgtgtgtaccgacccccagccactgaaagaacagcccgccctgaacgacagccggtactgcctgagcagcagactgagagtgtccgccaccttctggcagaacccccggaaccacttcagatgccaggtgcagttctacggcctgagcgagaacgacgagtggacccaggacagagccaagcccgtgacccagatcgtgtctgccgaagcctggggcagagccgattgcggctttaccagcgagagctaccagcagggcgtgctgagcgccaccatcctgtacgagatcctgctgggcaaggccaccctgtacgccgtgctggtgtctgccctggtgctgatggctatggtcaagcggaaggacagccggggaagggccaagcgatctggatctggagcaacaaacttctcactactcaaacaagcaggtgacgtggaggagaatcccgggcctactagtatggactggatttggcgcatccttttccttgtcggcgctgctaccggcgcgcattccttcgaagacattcagatgacacagagccctagcagcctgagcgcctctgtgggagacagagtgaccatcacatgcaagagcagccagagcctgctgtactccagcaatcagaagaactacctggcctggttccagcagaagcctggcaaggctcctaagctgctgatctactgggccagcaccagagaaagcggcgtgccaagcagattttctggcagcggctctggcaccgacttcaccctgacaatatccagcctccagcctgaggacttcgccacctacttttgccaccagtacctgagcagctacacattcggacagggcaccaaggtggaaatcaagcggacgcgtatccagaaccctgatcctgccgtgtaccagctgcgggatagcaagagcagcgacaagagcgtgtgtctgttcaccgacttcgacagccagaccaacgtgtcccagagcaaggactccgacgtgtacatcaccgataagtgcgtgctggacatgcggagcatggacttcaagagcaactccgccgtggcctggtccaacaagtccgatttcgcctgcgccaacgccttcaacaacagcattatccccgaggacacattcttcccaagccccgagagcagctgcgacgtgaagctggtggaaaagagcttcgagacagacaccaacctgaacttccagaacctgagcgtgatcggcttcagaatcctgctgctgaaagtggccggctttaacctgctgatgaccctgcggctgtggtccagc

SEQ ID NO: 10454 - DNA, 2538 bp, Artificial Sequence
  Synthetic Polynucloetide
atggccttaccagtgaccgccttgctcctgccgctggccttgctgctccacgccgccaggccggaggtgcagctggttgaatctggcggaggactggttcagcctggcggatctctgagactgtcttgtgccgccagcggctacaccttcaccacctattggatgcactgggtccgacaggcccctggcaaaggacttgagtgggtcggatatatcaggcccagcaccggctacacagagtacaaccagaagttcaaggaccgcttcaccatcagcgccgacaccagcaagaataccgcctacctccagatgaacagcctgagagccgaggacaccgccgtgtactactgtgccagatccagatggctgctggactattggggccagggcacactggttacagtttctctcgaggacctgaagaacgtgttcccacctgaggtggccgtgttcgagcctagcgaggccgagatcagccacacccagaaagccaccctcgtgtgcctggctaccggcttctaccccgaccatgtggaactgtcttggtgggtcaacggcaaagaggtgcacagcggcgtgtgtaccgacccccagccactgaaagaacagcccgccctgaacgacagccggtactgcctgagcagcagactgagagtgtccgccaccttctggcagaacccccggaaccacttcagatgccaggtgcagttctacggcctgagcgagaacgacgagtggacccaggacagagccaagcccgtgacccagatcgtgtctgccgaagcctggggcagagccgattgcggctttaccagcgagagctaccagcagggcgtgctgagcgccaccatcctgtacgagatcctgctgggcaaggccaccctgtacgccgtgctggtgtctgccctggtgctgatggctatggtcaagcggaaggacagccggggaagggccaagcgatctggatctggagcaacaaacttctcactactcaaacaagcaggtgacgtggaggagaatcccgggcctactagtatggactggatttggcgcatccttttccttgtcggcgctgctaccggcgcgcattccttcgaagacattcagatgacacagagccctagcagcctgagcgcctctgtgggagacagagtgaccatcacatgcaagagcagccagagcctgctgtactccagcaatcagaagaactacctggcctggttccagcagaagcctggcaaggctcctaagctgctgatctactgggccagcaccagagaaagcggcgtgccaagcagattttctggcagcggctctggcaccgacttcaccctgacaatatccagcctccagcctgaggacttcgccacctacttttgccaccagtacctgagcagctacacattcggacagggcaccaaggtggaaatcaagcggacgcgtatccagaaccctgatcctgccgtgtaccagctgcgggatagcaagagcagcgacaagagcgtgtgtctgttcaccgacttcgacagccagaccaacgtgtcccagagcaaggactccgacgtgtacatcaccgataagtgcgtgctggacatgcggagcatggacttcaagagcaactccgccgtggcctggtccaacaagtccgatttcgcctgcgccaacgccttcaacaacagcattatccccgaggacacattcttcccaagccccgagagcagctgcgacgtgaagctggtggaaaagagcttcgagacagacaccaacctgaacttccagaacctgagcgtgatcggcttcagaatcctgctgctgaaagtggccggctttaacctgctgatgaccctgcggctgtggtccagccgcgccaagagaagcggatctggcgtgaagcagaccctgaatttcgacctgctgaagctggctggcgacgtggaatccaacccaggcccttctagaggcgggatccacaccatggctacctacgaggtgctgtgcgaggtggcaagaaagctgggcaccgacgacagagaagtggtgctgttcctgctgaacgtgttcatccctcagcctacactggcccagctgatcggtgcactgagagccctgaaagaggaaggccggctgacctttcctctgctggccgaatgcctgttcagagccggaagaagggatctgctgcgggacctgctgcatctggaccccagatttctggaaagacacctggccggcaccatgagctacttcagcccttaccagctgaccgtgctgcacgttgacggcgaactgtgcgccagagatattcggagcctgatcttcctgagcaaggacaccatcggcagccggtctacccctcagacatttctgcactgggtgtactgcatggaaaacctggacctgctcggccccacagatgtggatgccctgatgtccatgctgagaagcctgagcagagtggacctccagagacaggtgcagacactgatgggactgcacctgagcggacctagccacagccagcactacagacacacccct

SEQ ID NO: 10455 - DNA, 1875 bp, Artificial Sequence
  Synthetic Polynucloetide
atggccttaccagtgaccgccttgctcctgccgctggccttgctgctccacgccgccaggccggaggtgcagctggttgaatctggcggaggactggttcagcctggcggatctctgagactgtcttgtgccgccagcggctacaccttcaccacctattggatgcactgggtccgacaggcccctggcaaaggacttgagtgggtcggatatatcaggcccagcaccggctacacagagtacaaccagaagttcaaggaccgcttcaccatcagcgccgacaccagcaagaataccgcctacctccagatgaacagcctgagagccgaggacaccgccgtgtactactgtgccagatccagatggctgctggactattggggccagggcacactggttacagtttctctcgagatccagaaccctgatcctgccgtgtaccagctgcgggatagcaagagcagcgacaagagcgtgtgtctgttcaccgacttcgacagccagaccaacgtgtcccagagcaaggactccgacgtgtacatcaccgataagtgcgtgctggacatgcggagcatggacttcaagagcaactccgccgtggcctggtccaacaagtccgatttcgcctgcgccaacgccttcaacaacagcattatccccgaggacacattcttcccaagccccgagagcagctgcgacgtgaagctggtggaaaagagcttcgagacagacaccaacctgaacttccagaacctgagcgtgatcggcttcagaatcctgctgctgaaagtggccggctttaacctgctgatgaccctgcggctgtggtccagccgcgccaagagaagcggatctggcgtgaagcagaccctgaatttcgacctgctgaagctggctggcgacgtggaatccaacccaggccctactagtatggactggatttggcgcatccttttccttgtcggcgctgctaccggcgcgcattccttcgaagacattcagatgacacagagccctagcagcctgagcgcctctgtgggagacagagtgaccatcacatgcaagagcagccagagcctgctgtactccagcaatcagaagaactacctggcctggttccagcagaagcctggcaaggctcctaagctgctgatctactgggccagcaccagagaaagcggcgtgccaagcagattttctggcagcggctctggcaccgacttcaccctgacaatatccagcctccagcctgaggacttcgccacctacttttgccaccagtacctgagcagctacacattcggacagggcaccaaggtggaaatcaagcggacgcgtgaggacctgaagaacgtgttcccacctgaggtggccgtgttcgagcctagcgaggccgagatcagccacacccagaaagccaccctcgtgtgcctggctaccggcttctaccccgaccatgtggaactgtcttggtgggtcaacggcaaagaggtgcacagcggcgtgtgtaccgacccccagccactgaaagaacagcccgccctgaacgacagccggtactgcctgagcagcagactgagagtgtccgccaccttctggcagaacccccggaaccacttcagatgccaggtgcagttctacggcctgagcgagaacgacgagtggacccaggacagagccaagcccgtgacccagatcgtgtctgccgaagcctggggcagagccgattgcggctttaccagcgagagctaccagcagggcgtgctgagcgccaccatcctgtacgagatcctgctgggcaaggccaccctgtacgccgtgctggtgtctgccctggtgctgatggctatggtcaagcggaaggacagccgggga

SEQ ID NO: 10456 - DNA, 2541 bp, Artificial Sequence
  Synthetic Polynucloetide
atggccttaccagtgaccgccttgctcctgccgctggccttgctgctccacgccgccaggccggaggtgcagctggttgaatctggcggaggactggttcagcctggcggatctctgagactgtcttgtgccgccagcggctacaccttcaccacctattggatgcactgggtccgacaggcccctggcaaaggacttgagtgggtcggatatatcaggcccagcaccggctacacagagtacaaccagaagttcaaggaccgcttcaccatcagcgccgacaccagcaagaataccgcctacctccagatgaacagcctgagagccgaggacaccgccgtgtactactgtgccagatccagatggctgctggactattggggccagggcacactggttacagtttctctcgagatccagaaccctgatcctgccgtgtaccagctgcgggatagcaagagcagcgacaagagcgtgtgtctgttcaccgacttcgacagccagaccaacgtgtcccagagcaaggactccgacgtgtacatcaccgataagtgcgtgctggacatgcggagcatggacttcaagagcaactccgccgtggcctggtccaacaagtccgatttcgcctgcgccaacgccttcaacaacagcattatccccgaggacacattcttcccaagccccgagagcagctgcgacgtgaagctggtggaaaagagcttcgagacagacaccaacctgaacttccagaacctgagcgtgatcggcttcagaatcctgctgctgaaagtggccggctttaacctgctgatgaccctgcggctgtggtccagccgcgccaagagaagcggatctggcgtgaagcagaccctgaatttcgacctgctgaagctggctggcgacgtggaatccaacccaggccctactagtatggactggatttggcgcatccttttccttgtcggcgctgctaccggcgcgcattccttcgaagacattcagatgacacagagccctagcagcctgagcgcctctgtgggagacagagtgaccatcacatgcaagagcagccagagcctgctgtactccagcaatcagaagaactacctggcctggttccagcagaagcctggcaaggctcctaagctgctgatctactgggccagcaccagagaaagcggcgtgccaagcagattttctggcagcggctctggcaccgacttcaccctgacaatatccagcctccagcctgaggacttcgccacctacttttgccaccagtacctgagcagctacacattcggacagggcaccaaggtggaaatcaagcggacgcgtgaggacctgaagaacgtgttcccacctgaggtggccgtgttcgagcctagcgaggccgagatcagccacacccagaaagccaccctcgtgtgcctggctaccggcttctaccccgaccatgtggaactgtcttggtgggtcaacggcaaagaggtgcacagcggcgtgtgtaccgacccccagccactgaaagaacagcccgccctgaacgacagccggtactgcctgagcagcagactgagagtgtccgccaccttctggcagaacccccggaaccacttcagatgccaggtgcagttctacggcctgagcgagaacgacgagtggacccaggacagagccaagcccgtgacccagatcgtgtctgccgaagcctggggcagagccgattgcggctttaccagcgagagctaccagcagggcgtgctgagcgccaccatcctgtacgagatcctgctgggcaaggccaccctgtacgccgtgctggtgtctgccctggtgctgatggctatggtcaagcggaaggacagccggggaagggccaagcgatctggatctggagcaacaaacttctcactactcaaacaagcaggtgacgtggaggagaatcccgggccttctagaggcgggatccacaccatggctacctacgaggtgctgtgcgaggtggcaagaaagctgggcaccgacgacagagaagtggtgctgttcctgctgaacgtgttcatccctcagcctacactggcccagctgatcggtgcactgagagccctgaaagaggaaggccggctgacctttcctctgctggccgaatgcctgttcagagccggaagaagggatctgctgcgggacctgctgcatctggaccccagatttctggaaagacacctggccggcaccatgagctacttcagcccttaccagctgaccgtgctgcacgttgacggcgaactgtgcgccagagatattcggagcctgatcttcctgagcaaggacaccatcggcagccggtctacccctcagacatttctgcactgggtgtactgcatggaaaacctggacctgctcggccccacagatgtggatgccctgatgtccatgctgagaagcctgagcagagtggacctccagagacaggtgcagacactgatgggactgcacctgagcggacctagccacagccagcactacagacacacccct

SEQ ID NO: 10457 - DNA, 2700 bp, Artificial Sequence
  Synthetic Polynucloetide
atggccttaccagtgaccgccttgctcctgccgctggccttgctgctccacgccgccaggccgctcgaggggaaaccaattcccaaccctcttctgggactggattcaaccggcagcggcgaggacctgaagaacgtgttcccacctgaggtggccgtgttcgagcctagcaaggccgagatcgcccacacccagaaagccaccctcgtgtgcctggctaccggcttctaccccgaccatgtggaactgtcttggtgggtcaacggcaaagaggtgcacagcggcgtgtgtaccgacccccagccactgaaagaacagcccgccctgaacgacagccggtactgcctgagcagcagactgagagtgtccgccaccttctggcagaacccccggaaccacttcagatgccaggtgcagttctacggcctgagcgagaacgacgagtggacccaggacagagccaagcccgtgacccagatcgtgtctgccgaagcctggggcagagccgattgcggcatcaccagcgccagctaccaccagggcgtgctgagcgccaccatcctgtacgagatcctgctgggcaaggccaccctgtacgccgtgctggtgtctgccctggtgctgatggctatggtcaagcggaaggacagccggggaagggccaagcgatctggatctggagcaacaaacttctcactactcaaacaagcaggtgacgtggaggagaatcccgggcctactagcatggccttaccagtgaccgccttgctcctgccgctggccttgctgctccacgccgccaggccggaggtgcagctggttgaatctggcggaggactggttcagcctggcggatctctgagactgtcttgtgccgccagcggctacaccttcaccacctattggatgcactgggtccgacaggcccctggcaaaggacttgagtgggtcggatatatcaggcccagcaccggctacacagagtacaaccagaagttcaaggaccgcttcaccatcagcgccgacaccagcaagaataccgcctacctccagatgaacagcctgagagccgaggacaccgccgtgtactactgtgccagatccagatggctgctggactattggggccagggcacactggttacagtttctggcggaggcggaagtggaggcggaggatctggcggcggaggctctgacattcagatgacacagagccctagcagcctgagcgcctctgtgggagacagagtgaccatcacatgcaagagcagccagagcctgctgtactccagcaatcagaagaactacctggcctggttccagcagaagcctggcaaggctcctaagctgctgatctactgggccagcaccagagaaagcggcgtgccaagcagattttctggcagcggctctggcaccgacttcaccctgacaatatccagcctccagcctgaggacttcgccacctacttttgccaccagtacctgagcagctacacattcggacagggcaccaaggtggaaatcaagcggacgcgtgagcagaaactgatctcggaagaggatgggagcggcatccagaaccctgatcctgccgtgtaccagctgcgggatagcaagagcagcgacaagagcgtgtgtctgttcaccgacttcgacagccagaccaacgtgtcccagagcaaggactccgacgtgtacatcaccgataagtgcgtgctggacatgcggagcatggacttcaagagcaactccgccgtggcctggtccaacaagtccgatttcgcctgcgccaacgccttcaacaacagcattatccccgaggacacattcttcccaagcagcgacgtgccctgcgacgtgaagctggtggaaaagagcttcgagacagacaccaacctgaacttccagaacctgagcgtgatcggcttcagaatcctgctgctgaaagtggccggctttaacctgctgatgaccctgcggctgtggtccagccgcgccaagagaagcggatctggcgtgaagcagaccctgaatttcgacctgctgaagctggctggcgacgtggaatccaacccaggcccttctagaggccatatgaccgagtacaagcccacggtgcgcctcgccacccgcgacgacgtccccagggccgtacgcaccctcgccgccgcgttcgccgactaccccgccacgcgccacaccgtcgatccggaccgccacatcgagcgggtcaccgagctgcaagaactcttcctcacgcgcgtcgggctcgacatcggcaaggtgtgggtcgcggacgacggcgccgcggtggcggtctggaccacgccggagagcgtcgaagcgggggcggtgttcgccgagatcggcccgcgcatggccgagttgagcggttcccggctggccgcgcagcaacagatggaaggcctcctggcgccgcaccggcccaaggagcccgcgtggttcctggccaccgtcggcgtctcgcccgaccaccagggcaagggtctgggcagcgccgtcgtgctccccggagtggaggcggccgagcgcgccggggtgcccgccttcctggagacctccgcgccccgcaacctccccttctacgagcggctcggcttcaccgtcaccgccgacgtcgaggtgcccgaaggaccgcgcacctggtgcatgacccgcaagcccggtgcctga

SEQ ID NO: 10458 - DNA, 2703 bp, Artificial Sequence
  Synthetic Polynucloetide
atggccttaccagtgaccgccttgctcctgccgctggccttgctgctccacgccgccaggccgctcgagcagaaactgatctcggaagaggatctgggctccggcgatcgccctgatcctgccgtgtaccagctgcgggatagcaagagcagcgacaagagcgtgtgtctgttcaccgacttcgacagccagaccaacgtgtcccagagcaaggactccgacgtgtacatcaccgataagtgcgtgctggacatgcggagcatggacttcaagagcaactccgccgtggcctggtccaacaagtccgatttcgcctgcgccaacgccttcaacaacagcattatccccgaggacacattcttcccaagccccgagagcagctgcgacgtgaagctggtggaaaagagcttcgagacagacaccaacctgaacttccagaacctgagcgtgatcggcttcagaatcctgctgctgaaagtggccggctttaacctgctgatgaccctgcggctgtggtccagctctagtcgcgccaagagaagcggatctggcgtgaagcagaccctgaatttcgacctgctgaagctggctggcgacgtggaatccaacccaggccccactagcatggccttaccagtgaccgccttgctcctgccgctggccttgctgctccacgccgccaggccggaggtgcagctggttgaatctggcggaggactggttcagcctggcggatctctgagactgtcttgtgccgccagcggctacaccttcaccacctattggatgcactgggtccgacaggcccctggcaaaggacttgagtgggtcggatatatcaggcccagcaccggctacacagagtacaaccagaagttcaaggaccgcttcaccatcagcgccgacaccagcaagaataccgcctacctccagatgaacagcctgagagccgaggacaccgccgtgtactactgtgccagatccagatggctgctggactattggggccagggcacactggttacagtttctggcggaggcggaagtggaggcggaggatctggcggcggaggctctgacattcagatgacacagagccctagcagcctgagcgcctctgtgggagacagagtgaccatcacatgcaagagcagccagagcctgctgtactccagcaatcagaagaactacctggcctggttccagcagaagcctggcaaggctcctaagctgctgatctactgggccagcaccagagaaagcggcgtgccaagcagattttctggcagcggctctggcaccgacttcaccctgacaatatccagcctccagcctgaggacttcgccacctacttttgccaccagtacctgagcagctacacattcggacagggcaccaaggtggaaatcaagcggacgcgtgggaaaccaattcccaaccctcttctgggactggattcaaccggcagcggcgaggacctgaagaacgtgttcccacctgaggtggccgtgttcgagcctagcgaggccgagatcagccacacccagaaagccaccctcgtgtgcctggctaccggcttctaccccgaccatgtggaactgtcttggtgggtcaacggcaaagaggtgcacagcggcgtgtgtaccgacccccagccactgaaagaacagcccgccctgaacgacagccggtactgcctgagcagcagactgagagtgtccgccaccttctggcagaacccccggaaccacttcagatgccaggtgcagttctacggcctgagcgagaacgacgagtggacccaggacagagccaagcccgtgacccagatcgtgtctgccgaagcctggggcagagccgattgcggctttaccagcgagagctaccagcagggcgtgctgagcgccaccatcctgtacgagatcctgctgggcaaggccaccctgtacgccgtgctggtgtctgccctggtgctgatggctatggtcaagcggaaggacagccggggaagggccaagcgatctggatctggagcaacaaacttctcactactcaaacaagcaggtgacgtggaggagaatcccgggccttctagaggccatatgaccgagtacaagcccacggtgcgcctcgccacccgcgacgacgtccccagggccgtacgcaccctcgccgccgcgttcgccgactaccccgccacgcgccacaccgtcgatccggaccgccacatcgagcgggtcaccgagctgcaagaactcttcctcacgcgcgtcgggctcgacatcggcaaggtgtgggtcgcggacgacggcgccgcggtggcggtctggaccacgccggagagcgtcgaagcgggggcggtgttcgccgagatcggcccgcgcatggccgagttgagcggttcccggctggccgcgcagcaacagatggaaggcctcctggcgccgcaccggcccaaggagcccgcgtggttcctggccaccgtcggcgtctcgcccgaccaccagggcaagggtctgggcagcgccgtcgtgctccccggagtggaggcggccgagcgcgccggggtgcccgccttcctggagacctccgcgccccgcaacctccccttctacgagcggctcggcttcaccgtcaccgccgacgtcgaggtgcccgaaggaccgcgcacctggtgcatgacccgcaagcccggtgcctga

SEQ ID NO: 10459 - DNA, 2565 bp, Artificial Sequence
  Synthetic Polynucloetide
atggccttaccagtgaccgccttgctcctgccgctggccttgctgctccacgccgccaggccggaggtgcagctggttgaatctggcggaggactggttcagcctggcggatctctgagactgtcttgtgccgccagcggctacaccttcaccacctattggatgcactgggtccgacaggcccctggcaaaggacttgagtgggtcggatatatcaggcccagcaccggctacacagagtacaaccagaagttcaaggaccgcttcaccatcagcgccgacaccagcaagaataccgcctacctccagatgaacagcctgagagccgaggacaccgccgtgtactactgtgccagatccagatggctgctggactattggggccagggcacactggttacagtttctctcgaggacctgaagaacgtgttcccacctgaggtggccgtgttcgagcctagcgaggccgagatcagccacacccagaaagccaccctcgtgtgcctggctaccggcttctaccccgaccatgtggaactgtcttggtgggtcaacggcaaagaggtgcacagcggcgtgtctaccgacccccagccactgaaagaacagcccgccctgaacgacagccggtactgcctgagcagcagactgagagtgtccgccaccttctggcagaacccccggaaccacttcagatgccaggtgcagttctacggcctgagcgagaacgacgagtggacccaggacagagccaagcccgtgacccagatcgtgtctgccgaagcctggggcagagccgattgcggctttaccagcgagagctaccagcagggcgtgctgagcgccaccatcctgtacgagatcctgctgggcaaggccaccctgtacgccgtgctggtgtctgccctggtgctgatggctatggtcaagcggaaggacagccggggaagggccaagcgatctggatctggagcaacaaacttctcactactcaaacaagcaggtgacgtggaggagaatcccgggcctactagtatggactggatttggcgcatccttttccttgtcggcgctgctaccggcgcgcattccttcgaagacattcagatgacacagagccctagcagcctgagcgcctctgtgggagacagagtgaccatcacatgcaagagcagccagagcctgctgtactccagcaatcagaagaactacctggcctggttccagcagaagcctggcaaggctcctaagctgctgatctactgggccagcaccagagaaagcggcgtgccaagcagattttctggcagcggctctggcaccgacttcaccctgacaatatccagcctccagcctgaggacttcgccacctacttttgccaccagtacctgagcagctacacattcggacagggcaccaaggtggaaatcaagcggacgcgtatccagaaccctgatcctgccgtgtaccagctgcgggatagcaagagcagcgacaagagcgtgtgtctgttcaccgacttcgacagccagaccaacgtgtcccagagcaaggactccgacgtgtacatcaccgataagaccgtgctggacatgcggagcatggacttcaagagcaactccgccgtggcctggtccaacaagtccgatttcgcctgcgccaacgccttcaacaacagcattatccccgaggacacattcttcccaagccccgagagcagctgcgacgtgaagctggtggaaaagagcttcgagacagacaccaacctgaacttccagaacctgagcgtgatcggcttcagaatcctgctgctgaaagtggccggctttaacctgctgatgaccctgcggctgtggtccagccgcgccaagagaagcggatctggcgtgaagcagaccctgaatttcgacctgctgaagctggctggcgacgtggaatccaacccaggcccttctagaggccatatgaccgagtacaagcccacggtgcgcctcgccacccgcgacgacgtccccagggccgtacgcaccctcgccgccgcgttcgccgactaccccgccacgcgccacaccgtcgatccggaccgccacatcgagcgggtcaccgagctgcaagaactcttcctcacgcgcgtcgggctcgacatcggcaaggtgtgggtcgcggacgacggcgccgcggtggcggtctggaccacgccggagagcgtcgaagcgggggcggtgttcgccgagatcggcccgcgcatggccgagttgagcggttcccggctggccgcgcagcaacagatggaaggcctcctggcgccgcaccggcccaaggagcccgcgtggttcctggccaccgtcggcgtctcgcccgaccaccagggcaagggtctgggcagcgccgtcgtgctccccggagtggaggcggccgagcgcgccggggtgcccgccttcctggagacctccgcgccccgcaacctccccttctacgagcggctcggcttcaccgtcaccgccgacgtcgaggtgcccgaaggaccgcgcacctggtgcatgacccgcaagcccggtgcctga

SEQ ID NO: 10460 - DNA, 2811 bp, Artificial Sequence
  Synthetic Polynucloetide
atggccttaccagtgaccgccttgctcctgccgctggccttgctgctccacgccgccaggccggaggtgcagctggttgaatctggcggaggactggttcagcctggcggatctctgagactgtcttgtgccgccagcggctacaccttcaccacctattggatgcactgggtccgacaggcccctggcaaaggacttgagtgggtcggatatatcaggcccagcaccggctacacagagtacaaccagaagttcaaggaccgcttcaccatcagcgccgacaccagcaagaataccgcctacctccagatgaacagcctgagagccgaggacaccgccgtgtactactgtgccagatccagatggctgctggactattggggccagggcacactggttacagtttctctcgaggacctgaagaacgtgttcccacctgaggtggccgtgttcgagcctagcgaggccgagatcagccacacccagaaagccaccctcgtgtgcctggctaccggcttctaccccgaccatgtggaactgtcttggtgggtcaacggcaaagaggtgcacagcggcgtgtctaccgacccccagccactgaaagaacagcccgccctgaacgacagccggtactgcctgagcagcagactgagagtgtccgccaccttctggcagaacccccggaaccacttcagatgccaggtgcagttctacggcctgagcgagaacgacgagtggacccaggacagagccaagcccgtgacccagatcgtgtctgccgaagcctggggcagagccgattgcggctttaccagcgagagctaccagcagggcgtgctgagcgccaccatcctgtacgagatcctgctgggcaaggccaccctgtacgccgtgctggtgtctgccctggtgctgatggctatggtcaagcggaaggacagccggggaagggccaagcgatctggatctggagcaacaaacttctcactactcaaacaagcaggtgacgtggaggagaatcccgggcctactagtatggactggatttggcgcatccttttccttgtcggcgctgctaccggcgcgcattccttcgaagacattcagatgacacagagccctagcagcctgagcgcctctgtgggagacagagtgaccatcacatgcaagagcagccagagcctgctgtactccagcaatcagaagaactacctggcctggttccagcagaagcctggcaaggctcctaagctgctgatctactgggccagcaccagagaaagcggcgtgccaagcagattttctggcagcggctctggcaccgacttcaccctgacaatatccagcctccagcctgaggacttcgccacctacttttgccaccagtacctgagcagctacacattcggacagggcaccaaggtggaaatcaagcggacgcgtgagcagaaactgatctcggaagaggatgggagcggcaccccattcccttctctggcccctcccatcatgctgctggtggacggcaagcagcagatggtggtcgtgtgcctggtgctggatgtggccccacctggactggacagccccatctggtttagcgccggcaatggctctgccctggacgcctttacctacggcccaagccctgccaccgatggcacctggacaaatctggcccacctgagcctgcccagcgaggaactggcttcttgggagcctctcgtgtgccacacaggacctggcgctgagggacacagcagatccacccagcctatgcacctgtctggcgaggccagcaccgccagaacctgtcctcaggaacctctgagaggcacccctggcggagcactgtggctgggagtgctgagactgctgctgttcaagctgctgctgtttgacctgctgctgacctgctcctgtctgtgcgatcctgccggccctctgccttctcctgccaccaccacaagactgagagccctgggcagccacagactgcaccctgccacagagacaggcggcagagaggccacaagcagccctagaccccagcccagagacagaagatggggcgataccccccctggcagaaagcctggatctccagtccgcgccaagagaagcggatctggcgtgaagcagaccctgaatttcgacctgctgaagctggctggcgacgtggaatccaacccaggcccttctagaggccatatgaccgagtacaagcccacggtgcgcctcgccacccgcgacgacgtccccagggccgtacgcaccctcgccgccgcgttcgccgactaccccgccacgcgccacaccgtcgatccggaccgccacatcgagcgggtcaccgagctgcaagaactcttcctcacgcgcgtcgggctcgacatcggcaaggtgtgggtcgcggacgacggcgccgcggtggcggtctggaccacgccggagagcgtcgaagcgggggcggtgttcgccgagatcggcccgcgcatggccgagttgagcggttcccggctggccgcgcagcaacagatggaaggcctcctggcgccgcaccggcccaaggagcccgcgtggttcctggccaccgtcggcgtctcgcccgaccaccagggcaagggtctgggcagcgccgtcgtgctccccggagtggaggcggccgagcgcgccggggtgcccgccttcctggagacctccgcgccccgcaacctccccttctacgagcggctcggcttcaccgtcaccgccgacgtcgaggtgcccgaaggaccgcgcacctggtgcatgacccgcaagcccggtgcctga

SEQ ID NO: 10461 - DNA, 2865 bp, Artificial Sequence
  Synthetic Polynucloetide
atggccttaccagtgaccgccttgctcctgccgctggccttgctgctccacgccgccaggccgctcgaggacctgaagaacgtgttcccacctgaggtggccgtgttcgagcctagcgaggccgagatcagccacacccagaaagccaccctcgtgtgcctggctaccggcttctaccccgaccatgtggaactgtcttggtgggtcaacggcaaagaggtgcacagcggcgtgtctaccgacccccagccactgaaagaacagcccgccctgaacgacagccggtactgcctgagcagcagactgagagtgtccgccaccttctggcagaacccccggaaccacttcagatgccaggtgcagttctacggcctgagcgagaacgacgagtggacccaggacagagccaagcccgtgacccagatcgtgtctgccgaagcctggggcagagccgattgcggctttaccagcgagagctaccagcagggcgtgctgagcgccaccatcctgtacgagatcctgctgggcaaggccaccctgtacgccgtgctggtgtctgccctggtgctgatggctatggtcaagcggaaggacagccggggaagggccaagcgatctggatctggagcaacaaacttctcactactcaaacaagcaggtgacgtggaggagaatcccgggcctactagcatggccttaccagtgaccgccttgctcctgccgctggccttgctgctccacgccgccaggccggaggtgcagctggttgaatctggcggaggactggttcagcctggcggatctctgagactgtcttgtgccgccagcggctacaccttcaccacctattggatgcactgggtccgacaggcccctggcaaaggacttgagtgggtcggatatatcaggcccagcaccggctacacagagtacaaccagaagttcaaggaccgcttcaccatcagcgccgacaccagcaagaataccgcctacctccagatgaacagcctgagagccgaggacaccgccgtgtactactgtgccagatccagatggctgctggactattggggccagggcacactggttacagtttctggcggaggcggaagtggaggcggaggatctggcggcggaggctctgacattcagatgacacagagccctagcagcctgagcgcctctgtgggagacagagtgaccatcacatgcaagagcagccagagcctgctgtactccagcaatcagaagaactacctggcctggttccagcagaagcctggcaaggctcctaagctgctgatctactgggccagcaccagagaaagcggcgtgccaagcagattttctggcagcggctctggcaccgacttcaccctgacaatatccagcctccagcctgaggacttcgccacctacttttgccaccagtacctgagcagctacacattcggacagggcaccaaggtggaaatcaagcggacgcgtgagcagaaactgatctcggaagaggatctggggagcggcaccccattcccttctctggcccctcccatcatgctgctggtggacggcaagcagcagatggtggtcgtgtgcctggtgctggatgtggccccacctggactggacagccccatctggtttagcgccggcaatggctctgccctggacgcctttacctacggcccaagccctgccaccgatggcacctggacaaatctggcccacctgagcctgcccagcgaggaactggcttcttgggagcctctcgtgtgccacacaggacctggcgctgagggacacagcagatccacccagcctatgcacctgtctggcgaggccagcaccgccagaacctgtcctcaggaacctctgagaggcacccctggcggagcactgtggctgggagtgctgagactgctgctgttcaagctgctgctgtttgacctgctgctgacctgctcctgtctgtgcgatcctgccggccctctgccttctcctgccaccaccacaagactgagagccctgggcagccacagactgcaccctgccacagagacaggcggcagagaggccacaagcagccctagaccccagcccagagacagaagatggggcgataccccccctggcagaaagcctggatctccagtccgcgccaagagaagcggatctggcgtgaagcagaccctgaatttcgacctgctgaagctggctggcgacgtggaatccaacccaggcccttctagatctagaggccatatgaccgagtacaagcccacggtgcgcctcgccacccgcgacgacgtccccagggccgtacgcaccctcgccgccgcgttcgccgactaccccgccacgcgccacaccgtcgatccggaccgccacatcgagcgggtcaccgagctgcaagaactcttcctcacgcgcgtcgggctcgacatcggcaaggtgtgggtcgcggacgacggcgccgcggtggcggtctggaccacgccggagagcgtcgaagcgggggcggtgttcgccgagatcggcccgcgcatggccgagttgagcggttcccggctggccgcgcagcaacagatggaaggcctcctggcgccgcaccggcccaaggagcccgcgtggttcctggccaccgtcggcgtctcgcccgaccaccagggcaagggtctgggcagcgccgtcgtgctccccggagtggaggcggccgagcgcgccggggtgcccgccttcctggagacctccgcgccccgcaacctccccttctacgagcggctcggcttcaccgtcaccgccgacgtcgaggtgcccgaaggaccgcgcacctggtgcatgacccgcaagcccggtgcctga

SEQ ID NO: 10462 - DNA, 2676 bp, Artificial Sequence
  Synthetic Polynucloetide
atggccttaccagtgaccgccttgctcctgccgctggccttgctgctccacgccgccaggccggaggtgcagctggttgaatctggcggaggactggttcagcctggcggatctctgagactgtcttgtgccgccagcggctacaccttcaccacctattggatgcactgggtccgacaggcccctggcaaaggacttgagtgggtcggatatatcaggcccagcaccggctacacagagtacaaccagaagttcaaggaccgcttcaccatcagcgccgacaccagcaagaataccgcctacctccagatgaacagcctgagagccgaggacaccgccgtgtactactgtgccagatccagatggctgctggactattggggccagggcacactggttacagtttctctcgaggggaaaccaattcccaaccctcttctgggactggattcaaccggcagcggcgacaagcagctggacgccgacgtgtcccccaagcctaccatcttcctgccctctatcgccgagacaaagctccagaaggccggcacctacctgtgcctgctggaaaagttcttcccagatgtgattaagatccactggcaggaaaagaagtccaacaccatcctgggcagccaggaaggcaacaccatgaagaccaacgacacctacatgaagttcagctggctgaccgtgcccgagaagtccctggacaaagaacacagatgcatcgtgcggcacgaaaacaacaagaacggcgtggaccaggaaatcatcttcccacccatcaagaccgatgtgattacaatggaccccaaggacaactgctccaaggacgccaacgataccctgctgctccagctgaccaacaccagcgcctactacatgtacttgttgctgctgctgaagtccgtggtgtacttcgccatcatcacatgctgcctgctgcggagaaccgccttctgctgcaacggcgagaagtctagggccaagcgatctggatctggagcaacaaacttctcactactcaaacaagcaggtgacgtggaggagaatcccgggcctactagtatggactggatttggcgcatccttttccttgtcggcgctgctaccggcgcgcattccttcgaagacattcagatgacacagagccctagcagcctgagcgcctctgtgggagacagagtgaccatcacatgcaagagcagccagagcctgctgtactccagcaatcagaagaactacctggcctggttccagcagaagcctggcaaggctcctaagctgctgatctactgggccagcaccagagaaagcggcgtgccaagcagattttctggcagcggctctggcaccgacttcaccctgacaatatccagcctccagcctgaggacttcgccacctacttttgccaccagtacctgagcagctacacattcggacagggcaccaaggtggaaatcaagcggacgcgtgagcagaaactgatctcggaagaggatgggagcggcagccagcctcacaccaagcccagcgtgttcgtgatgaagaacggcaccaacgtggcctgcctcgtgaaagagttctaccccaaggacatcaggatcaacctggtgtccagcaagaagatcaccgagttcgaccccgccatcgtgatctcccccagcggcaagtacaacgccgtgaagctggggaagtacgaggacagcaacagcgtgacctgctccgtgcagcacgacaacaagaccgtgcacagcaccgactttgaagtgaaaaccgactccaccgaccacgtgaagcccaaagagacagagaacaccaagcagcccagcaagagctgccacaagcccaaggccatcgtgcacaccgagaaagtgaacatgatgagcctgaccgtgctgggcctgcggatgctgttcgccaaaaccgtggccgtgaacttcctgctgaccgccaagctgttcttcctccgcgccaagagaagcggatctggcgtgaagcagaccctgaatttcgacctgctgaagctggctggcgacgtggaatccaacccaggcccttctagaggccatatgaccgagtacaagcccacggtgcgcctcgccacccgcgacgacgtccccagggccgtacgcaccctcgccgccgcgttcgccgactaccccgccacgcgccacaccgtcgatccggaccgccacatcgagcgggtcaccgagctgcaagaactcttcctcacgcgcgtcgggctcgacatcggcaaggtgtgggtcgcggacgacggcgccgcggtggcggtctggaccacgccggagagcgtcgaagcgggggcggtgttcgccgagatcggcccgcgcatggccgagttgagcggttcccggctggccgcgcagcaacagatggaaggcctcctggcgccgcaccggcccaaggagcccgcgtggttcctggccaccgtcggcgtctcgcccgaccaccagggcaagggtctgggcagcgccgtcgtgctccccggagtggaggcggccgagcgcgccggggtgcccgccttcctggagacctccgcgccccgcaacctccccttctacgagcggctcggcttcaccgtcaccgccgacgtcgaggtgcccgaaggaccgcgcacctggtgcatgacccgcaagcccggtgcctga

SEQ ID NO: 10463 - DNA, 1887 bp, Artificial Sequence
  Synthetic Polynucloetide
atggccttaccagtgaccgccttgctcctgccgctggccttgctgctccacgccgccaggccggaggtgcagctggttgaatctggcggaggactggttcagcctggcggatctctgagactgtcttgtgccgccagcggctacaccttcaccacctattggatgcactgggtccgacaggcccctggcaaaggacttgagtgggtcggatatatcaggcccagcaccggctacacagagtacaaccagaagttcaaggaccgcttcaccatcagcgccgacaccagcaagaataccgcctacctccagatgaacagcctgagagccgaggacaccgccgtgtactactgtgccagatccagatggctgctggactattggggccagggcacactggttacagtttctctcgagagccagcctcacaccaagcccagcgtgttcgtgatgaagaacggcaccaacgtggcctgcctcgtgaaagagttctaccccaaggacatcaggatcaacctggtgtccagcaagaagatcaccgagttcgaccccgccatcgtgatctcccccagcggcaagtacaacgccgtgaagctggggaagtacgaggacagcaacagcgtgacctgctccgtgcagcacgacaacaagaccgtgcacagcaccgactttgaagtgaaaaccgactccaccgaccacgtgaagcccaaagagacagagaacaccaagcagcccagcaagagctgccacaagcccaaggccatcgtgcacaccgagaaagtgaacatgatgagcctgaccgtgctgggcctgcggatgctgttcgccaaaaccgtggccgtgaacttcctgctgaccgccaagctgttcttcctcagggccaagcgatctggatctggagcaacaaacttctcactactcaaacaagcaggtgacgtggaggagaatcccgggcctactagtatggactggatttggcgcatccttttccttgtcggcgctgctaccggcgcgcattccttcgaagacattcagatgacacagagccctagcagcctgagcgcctctgtgggagacagagtgaccatcacatgcaagagcagccagagcctgctgtactccagcaatcagaagaactacctggcctggttccagcagaagcctggcaaggctcctaagctgctgatctactgggccagcaccagagaaagcggcgtgccaagcagattttctggcagcggctctggcaccgacttcaccctgacaatatccagcctccagcctgaggacttcgccacctacttttgccaccagtacctgagcagctacacattcggacagggcaccaaggtggaaatcaagcggacgcgtgacaagcagctggacgccgacgtgtcccccaagcctaccatcttcctgccctctatcgccgagacaaagctccagaaggccggcacctacctgtgcctgctggaaaagttcttcccagatgtgattaagatccactggcaggaaaagaagtccaacaccatcctgggcagccaggaaggcaacaccatgaagaccaacgacacctacatgaagttcagctggctgaccgtgcccgagaagtccctggacaaagaacacagatgcatcgtgcggcacgaaaacaacaagaacggcgtggaccaggaaatcatcttcccacccatcaagaccgatgtgattacaatggaccccaaggacaactgctccaaggacgccaacgataccctgctgctccagctgaccaacaccagcgcctactacatgtacttgttgctgctgctgaagtccgtggtgtacttcgccatcatcacatgctgcctgctgcggagaaccgccttctgctgcaacggcgagaagtct

SEQ ID NO: 10464 - DNA, 2721 bp, Artificial Sequence
  Synthetic Polynucloetide
atggccttaccagtgaccgccttgctcctgccgctggccttgctgctccacgccgccaggccgctcgaggggaaaccaattcccaaccctcttctgggactggattcaaccggcagcggcgacaagcagctggacgccgacgtgtcccccaagcctaccatcttcctgccctctatcgccgagacaaagctccagaaggccggcacctacctgtgcctgctggaaaagttcttcccagatgtgattaagatccactggcaggaaaagaagtccaacaccatcctgggcagccaggaaggcaacaccatgaagaccaacgacacctacatgaagttcagctggctgaccgtgcccgagaagtccctggacaaagaacacagatgcatcgtgcggcacgaaaacaacaagaacggcgtggaccaggaaatcatcttcccacccatcaagaccgatgtgattacaatggaccccaaggacaactgctccaaggacgccaacgataccctgctgctccagctgaccaacaccagcgcctactacatgtacttgttgctgctgctgaagtccgtggtgtacttcgccatcatcacatgctgcctgctgcggagaaccgccttctgctgcaacggcgagaagtctagggccaagcgatctggatctggagcaacaaacttctcactactcaaacaagcaggtgacgtggaggagaatcccgggcctactagcatggccttaccagtgaccgccttgctcctgccgctggccttgctgctccacgccgccaggccggaggtgcagctggttgaatctggcggaggactggttcagcctggcggatctctgagactgtcttgtgccgccagcggctacaccttcaccacctattggatgcactgggtccgacaggcccctggcaaaggacttgagtgggtcggatatatcaggcccagcaccggctacacagagtacaaccagaagttcaaggaccgcttcaccatcagcgccgacaccagcaagaataccgcctacctccagatgaacagcctgagagccgaggacaccgccgtgtactactgtgccagatccagatggctgctggactattggggccagggcacactggttacagtttctggcggaggcggaagtggaggcggaggatctggcggcggaggctctgacattcagatgacacagagccctagcagcctgagcgcctctgtgggagacagagtgaccatcacatgcaagagcagccagagcctgctgtactccagcaatcagaagaactacctggcctggttccagcagaagcctggcaaggctcctaagctgctgatctactgggccagcaccagagaaagcggcgtgccaagcagattttctggcagcggctctggcaccgacttcaccctgacaatatccagcctccagcctgaggacttcgccacctacttttgccaccagtacctgagcagctacacattcggacagggcaccaaggtggaaatcaagcggacgcgtgagcagaaactgatctcggaagaggatgggagcggcagccagcctcacaccaagcccagcgtgttcgtgatgaagaacggcaccaacgtggcctgcctcgtgaaagagttctaccccaaggacatcaggatcaacctggtgtccagcaagaagatcaccgagttcgaccccgccatcgtgatctcccccagcggcaagtacaacgccgtgaagctggggaagtacgaggacagcaacagcgtgacctgctccgtgcagcacgacaacaagaccgtgcacagcaccgactttgaagtgaaaaccgactccaccgaccacgtgaagcccaaagagacagagaacaccaagcagcccagcaagagctgccacaagcccaaggccatcgtgcacaccgagaaagtgaacatgatgagcctgaccgtgctgggcctgcggatgctgttcgccaaaaccgtggccgtgaacttcctgctgaccgccaagctgttcttcctccgcgccaagagaagcggatctggcgtgaagcagaccctgaatttcgacctgctgaagctggctggcgacgtggaatccaacccaggcccttctagaggccatatgaccgagtacaagcccacggtgcgcctcgccacccgcgacgacgtccccagggccgtacgcaccctcgccgccgcgttcgccgactaccccgccacgcgccacaccgtcgatccggaccgccacatcgagcgggtcaccgagctgcaagaactcttcctcacgcgcgtcgggctcgacatcggcaaggtgtgggtcgcggacgacggcgccgcggtggcggtctggaccacgccggagagcgtcgaagcgggggcggtgttcgccgagatcggcccgcgcatggccgagttgagcggttcccggctggccgcgcagcaacagatggaaggcctcctggcgccgcaccggcccaaggagcccgcgtggttcctggccaccgtcggcgtctcgcccgaccaccagggcaagggtctgggcagcgccgtcgtgctccccggagtggaggcggccgagcgcgccggggtgcccgccttcctggagacctccgcgccccgcaacctccccttctacgagcggctcggcttcaccgtcaccgccgacgtcgaggtgcccgaaggaccgcgcacctggtgcatgacccgcaagcccggtgcctga

SEQ ID NO: 10465 - DNA, 3096 bp, Artificial Sequence
  Synthetic Polynucloetide
atggccttaccagtgaccgccttgctcctgccgctggccttgctgctccacgccgccaggccggaggtgcagctggttgaatctggcggaggactggttcagcctggcggatctctgagactgtcttgtgccgccagcggctacaccttcaccacctattggatgcactgggtccgacaggcccctggcaaaggacttgagtgggtcggatatatcaggcccagcaccggctacacagagtacaaccagaagttcaaggaccgcttcaccatcagcgccgacaccagcaagaataccgcctacctccagatgaacagcctgagagccgaggacaccgccgtgtactactgtgccagatccagatggctgctggactattggggccagggcacactggttacagtttctggacagcctaaggccaatcctaccgtgacactgttccctccaagcagcgaagaactccaggccaacaaggccacacttgtgtgcctgatctccgacttctaccctggggctgtgacagtggcttggaaggccgatggatctcctgtgaaagccggcgtggaaaccaccaagccatccaagcagagcaacaacaaatacgccgccagctcctacctgagcctgacacctgagcagtggaagtcccacagatcctacagctgccaagtgacccacgaaggcagcaccgtggaaaagacagtggcccctacagagtgcagcggatcccagagcttcggcctgctggaccccaagctgtgctacctgctggatggcatcctgttcatctacggcgtgatcctgaccgccctgttcctgagagtgaagttcagcagaagcgccgacgcccctgcctaccagcagggacagaaccaactgtacaacgagctgaacctgggcagacgggaagagtacgacgtgctggacaagcggagaggcagggaccctgagatgggcggaaagccccagcggagaaagaacccccaggaaggactgtataacgaactccagaaagacaagatggccgaagcctacagcgagatcggcatgaagggcgagcggagaagaggcaagggccacgatggcctgtaccagggcctgagcaccgccaccaaggacacctatgacgccctgcacatgcaggccctgcctccaagaagggccaagcgatctggatctggagcaacaaacttctcactactcaaacaagcaggtgacgtggaggagaatcccgggcctactagtatggactggatttggcgcatccttttccttgtcggcgctgctaccggcgcgcattccttcgaagacattcagatgacacagagccctagcagcctgagcgcctctgtgggagacagagtgaccatcacatgcaagagcagccagagcctgctgtactccagcaatcagaagaactacctggcctggttccagcagaagcctggcaaggctcctaagctgctgatctactgggccagcaccagagaaagcggcgtgccaagcagattttctggcagcggctctggcaccgacttcaccctgacaatatccagcctccagcctgaggacttcgccacctacttttgccaccagtacctgagcagctacacattcggacagggcaccaaggtggaaatcaagcgggcctctacaaagggaccctccgtgtttcctctggctcccagcagcaagtctacaagcggaggaacagccgctctgggctgcctggtcaaggattactttcccgagcctgtgaccgtgtcctggaatagcggagcactgacaagcggcgtgcacacctttccagccgtgctgcaaagcagcggcctgtactctctgagcagcgtggtcacagtgcctagctctagcctgggcacccagacctacatctgcaatgtgaaccacaagcctagcaacaccaaggtggacaagagagtggaacccaagagctgtggtacccagagttttgggttgttggaccctaaattgtgctatctgttggacggaatcctgttcatttacggagtgatcctgaccgcattgttcctgcgggttaagttttccagatccgcagacgcacccgcttaccaacaagggcagaaccaactctacaatgaacttaatttggggcggagggaagagtacgacgttctggacaaaaggaggggacgagatcccgagatgggcggaaagcctcagcgaaggaagaatccgcaagaggggctttataacgaactccagaaagataaaatggcagaagcctatagtgagattgggatgaagggagaaaggaggaggggtaaaggtcacgatgggttgtaccaaggattgagcacagccactaaagatacctatgatgcgctccacatgcaggccctgccgccaagacgcgccaagagaagcggatctggcgtgaagcagaccctgaatttcgacctgctgaagctggctggcgacgtggaatccaacccaggcccttctagaggccatatgaccgagtacaagcccacggtgcgcctcgccacccgcgacgacgtccccagggccgtacgcaccctcgccgccgcgttcgccgactaccccgccacgcgccacaccgtcgatccggaccgccacatcgagcgggtcaccgagctgcaagaactcttcctcacgcgcgtcgggctcgacatcggcaaggtgtgggtcgcggacgacggcgccgcggtggcggtctggaccacgccggagagcgtcgaagcgggggcggtgttcgccgagatcggcccgcgcatggccgagttgagcggttcccggctggccgcgcagcaacagatggaaggcctcctggcgccgcaccggcccaaggagcccgcgtggttcctggccaccgtcggcgtctcgcccgaccaccagggcaagggtctgggcagcgccgtcgtgctccccggagtggaggcggccgagcgcgccggggtgcccgccttcctggagacctccgcgccccgcaacctccccttctacgagcggctcggcttcaccgtcaccgccgacgtcgaggtgcccgaaggaccgcgcacctggtgcatgacccgcaagcccggtgcctga

SEQ ID NO: 10466 - DNA, 2451 bp, Artificial Sequence
  Synthetic Polynucloetide
atggccttaccagtgaccgccttgctcctgccgctggccttgctgctccacgccgccaggccggaggtgcagctggttgaatctggcggaggactggttcagcctggcggatctctgagactgtcttgtgccgccagcggctacaccttcaccacctattggatgcactgggtccgacaggcccctggcaaaggacttgagtgggtcggatatatcaggcccagcaccggctacacagagtacaaccagaagttcaaggaccgcttcaccatcagcgccgacaccagcaagaataccgcctacctccagatgaacagcctgagagccgaggacaccgccgtgtactactgtgccagatccagatggctgctggactattggggccagggcacactggttacagtttctctcgaggacctgaagaacgtgttcccacctgaggtggccgtgttcgagcctagcgaggccgagatcagccacacccagaaagccaccctcgtgtgcctggctaccggcttctaccccgaccatgtggaactgtcttggtgggtcaacggcaaagaggtgcacagcggcgtgtctaccgacccccagccactgaaagaacagcccgccctgaacgacagccggtactgcctgagcagcagactgagagtgtccgccaccttctggcagaacccccggaaccacttcagatgccaggtgcagttctacggcctgagcgagaacgacgagtggacccaggacagagccaagcccgtgacccagatcgtgtctgccgaagcctggggcagagccgattgcggatcccagagcttcggcctgctggaccccaagctgtgctacctgctggatggcatcctgttcatctacggcgtgatcctgaccgccctgttcctgagagtgaagttcagcagaagcgccgacgcccctgcctaccagcagggacagaaccaactgtacaacgagctgaacctgggcagacgggaagagtacgacgtgctggacaagcggagaggcagggaccctgagatgggcggaaagccccagcggagaaagaacccccaggaaggactgtataacgaactccagaaagacaagatggccgaagcctacagcgagatcggcatgaagggcgagcggagaagaggcaagggccacgatggcctgtaccagggcctgagcaccgccaccaaggacacctatgacgccctgcacatgcaggccctgcctccaagaagggccaagcgatctggatctggagcaacaaacttctcactactcaaacaagcaggtgacgtggaggagaatcccgggcctactagtatggactggatttggcgcatccttttccttgtcggcgctgctaccggcgcgcattccttcgaagacattcagatgacacagagccctagcagcctgagcgcctctgtgggagacagagtgaccatcacatgcaagagcagccagagcctgctgtactccagcaatcagaagaactacctggcctggttccagcagaagcctggcaaggctcctaagctgctgatctactgggccagcaccagagaaagcggcgtgccaagcagattttctggcagcggctctggcaccgacttcaccctgacaatatccagcctccagcctgaggacttcgccacctacttttgccaccagtacctgagcagctacacattcggacagggcaccaaggtggaaatcaagcggacgcgtatccagaaccctgatcctgccgtgtaccagctgcgggatagcaagagcagcgacaagagcgtgtgtctgttcaccgacttcgacagccagaccaacgtgtcccagagcaaggactccgacgtgtacatcaccgataagaccgtgctggacatgcggagcatggacttcaagagcaactccgccgtggcctggtccaacaagtccgatttcgcctgcgccaacgccttcaacaacagcattatccccgaggacacattcttcccaagccccgagagcagctgcggtacccagagttttgggttgttggaccctaaattgtgctatctgttggacggaatcctgttcatttacggagtgatcctgaccgcattgttcctgcgggttaagttttccagatccgcagacgcacccgcttaccaacaagggcagaaccaactctacaatgaacttaatttggggcggagggaagagtacgacgttctggacaaaaggaggggacgagatcccgagatgggcggaaagcctcagcgaaggaagaatccgcaagaggggctttataacgaactccagaaagataaaatggcagaagcctatagtgagattgggatgaagggagaaaggaggaggggtaaaggtcacgatgggttgtaccaaggattgagcacagccactaaagatacctatgatgcgctccacatgcaggccctgccgccaaga

SEQ ID NO: 10467 - DNA, 2451 bp, Artificial Sequence
  Synthetic Polynucloetide
atggccttaccagtgaccgccttgctcctgccgctggccttgctgctccacgccgccaggccggaggtgcagctggttgaatctggcggaggactggttcagcctggcggatctctgagactgtcttgtgccgccagcggctacaccttcaccacctattggatgcactgggtccgacaggcccctggcaaaggacttgagtgggtcggatatatcaggcccagcaccggctacacagagtacaaccagaagttcaaggaccgcttcaccatcagcgccgacaccagcaagaataccgcctacctccagatgaacagcctgagagccgaggacaccgccgtgtactactgtgccagatccagatggctgctggactattggggccagggcacactggttacagtttctctcgaggacctgaagaacgtgttcccacctgaggtggccgtgttcgagcctagcaaggccgagatcgcccacacccagaaagccaccctcgtgtgcctggctaccggcttctaccccgaccatgtggaactgtcttggtgggtcaacggcaaagaggtgcacagcggcgtgtgtaccgacccccagccactgaaagaacagcccgccctgaacgacagccggtactgcctgagcagcagactgagagtgtccgccaccttctggcagaacccccggaaccacttcagatgccaggtgcagttctacggcctgagcgagaacgacgagtggacccaggacagagccaagcccgtgacccagatcgtgtctgccgaagcctggggcagagccgattgcggatcccagagcttcggcctgctggaccccaagctgtgctacctgctggatggcatcctgttcatctacggcgtgatcctgaccgccctgttcctgagagtgaagttcagcagaagcgccgacgcccctgcctaccagcagggacagaaccaactgtacaacgagctgaacctgggcagacgggaagagtacgacgtgctggacaagcggagaggcagggaccctgagatgggcggaaagccccagcggagaaagaacccccaggaaggactgtataacgaactccagaaagacaagatggccgaagcctacagcgagatcggcatgaagggcgagcggagaagaggcaagggccacgatggcctgtaccagggcctgagcaccgccaccaaggacacctatgacgccctgcacatgcaggccctgcctccaagaagggccaagcgatctggatctggagcaacaaacttctcactactcaaacaagcaggtgacgtggaggagaatcccgggcctactagtatggactggatttggcgcatccttttccttgtcggcgctgctaccggcgcgcattccttcgaagacattcagatgacacagagccctagcagcctgagcgcctctgtgggagacagagtgaccatcacatgcaagagcagccagagcctgctgtactccagcaatcagaagaactacctggcctggttccagcagaagcctggcaaggctcctaagctgctgatctactgggccagcaccagagaaagcggcgtgccaagcagattttctggcagcggctctggcaccgacttcaccctgacaatatccagcctccagcctgaggacttcgccacctacttttgccaccagtacctgagcagctacacattcggacagggcaccaaggtggaaatcaagcggacgcgtatccagaaccctgatcctgccgtgtaccagctgcgggatagcaagagcagcgacaagagcgtgtgtctgttcaccgacttcgacagccagaccaacgtgtcccagagcaaggactccgacgtgtacatcaccgataagtgcgtgctggacatgcggagcatggacttcaagagcaactccgccgtggcctggtccaacaagtccgatttcgcctgcgccaacgccttcaacaacagcattatccccgaggacacattcttcccaagcagcgacgtgccctgcggtacccagagttttgggttgttggaccctaaattgtgctatctgttggacggaatcctgttcatttacggagtgatcctgaccgcattgttcctgcgggttaagttttccagatccgcagacgcacccgcttaccaacaagggcagaaccaactctacaatgaacttaatttggggcggagggaagagtacgacgttctggacaaaaggaggggacgagatcccgagatgggcggaaagcctcagcgaaggaagaatccgcaagaggggctttataacgaactccagaaagataaaatggcagaagcctatagtgagattgggatgaagggagaaaggaggaggggtaaaggtcacgatgggttgtaccaaggattgagcacagccactaaagatacctatgatgcgctccacatgcaggccctgccgccaaga

SEQ ID NO: 10468 - DNA, 2664 bp, Artificial Sequence
  Synthetic Polynucloetide
atggccttaccagtgaccgccttgctcctgccgctggccttgctgctccacgccgccaggccggaggtgcagctggttgaatctggcggaggactggttcagcctggcggatctctgagactgtcttgtgccgccagcggctacaccttcaccacctattggatgcactgggtccgacaggcccctggcaaaggacttgagtgggtcggatatatcaggcccagcaccggctacacagagtacaaccagaagttcaaggaccgcttcaccatcagcgccgacaccagcaagaataccgcctacctccagatgaacagcctgagagccgaggacaccgccgtgtactactgtgccagatccagatggctgctggactattggggccagggcacactggttacagtttctctcgaggggaaaccaattcccaaccctcttctgggactggattcaaccggcagcggcgaggacctgaagaacgtgttcccacctgaggtggccgtgttcgagcctagcgaggccgagatcagccacacccagaaagccaccctcgtgtgcctggctaccggcttctaccccgaccatgtggaactgtcttggtgggtcaacggcaaagaggtgcacagcggcgtgtctaccgacccccagccactgaaagaacagcccgccctgaacgacagccggtactgcctgagcagcagactgagagtgtccgccaccttctggcagaacccccggaaccacttcagatgccaggtgcagttctacggcctgagcgagaacgacgagtggacccaggacagagccaagcccgtgacccagatcgtgtctgccgaagcctggggcagagccgattgcggatcccagagcttcggcctgctggaccccaagctgtgctacctgctggatggcatcctgttcatctacggcgtgatcctgaccgccctgttcctgagagtgaagttcagcagaagcgccgacgcccctgcctaccagcagggacagaaccaactgtacaacgagctgaacctgggcagacgggaagagtacgacgtgctggacaagcggagaggcagggaccctgagatgggcggaaagccccagcggagaaagaacccccaggaaggactgtataacgaactccagaaagacaagatggccgaagcctacagcgagatcggcatgaagggcgagcggagaagaggcaagggccacgatggcctgtaccagggcctgagcaccgccaccaaggacacctatgacgccctgcacatgcaggccctgcctccaagaagggccaagcgatctggatctggagcaacaaacttctcactactcaaacaagcaggtgacgtggaggagaatcccgggcctactagtatggactggatttggcgcatccttttccttgtcggcgctgctaccggcgcgcattccttcgaagacattcagatgacacagagccctagcagcctgagcgcctctgtgggagacagagtgaccatcacatgcaagagcagccagagcctgctgtactccagcaatcagaagaactacctggcctggttccagcagaagcctggcaaggctcctaagctgctgatctactgggccagcaccagagaaagcggcgtgccaagcagattttctggcagcggctctggcaccgacttcaccctgacaatatccagcctccagcctgaggacttcgccacctacttttgccaccagtacctgagcagctacacattcggacagggcaccaaggtggaaatcaagcggacgcgtgagcagaaactgatctcggaagaggatgggagcggcatccagaaccctgatcctgccgtgtaccagctgcgggatagcaagagcagcgacaagagcgtgtgtctgttcaccgacttcgacagccagaccaacgtgtcccagagcaaggactccgacgtgtacatcaccgataagaccgtgctggacatgcggagcatggacttcaagagcaactccgccgtggcctggtccaacaagtccgatttcgcctgcgccaacgccttcaacaacagcattatccccgaggacacattcttcccaagccccgagagcagctgcggtacccagagttttgggttgttggaccctaaattgtgctatctgttggacggaatcctgttcatttacggagtgatcctgaccgcattgttcctgaggagcaagcggtcacggctgctccacagcgattacatgaatatgacaccacgaagaccgggtcctactcgcaaacactaccaaccctacgcacctccccgcgactttgcagcgtaccgatctcgggttaagttttccagatccgcagacgcacccgcttaccaacaagggcagaaccaactctacaatgaacttaatttggggcggagggaagagtacgacgttctggacaaaaggaggggacgagatcccgagatgggcggaaagcctcagcgaaggaagaatccgcaagaggggctttataacgaactccagaaagataaaatggcagaagcctatagtgagattgggatgaagggagaaaggaggaggggtaaaggtcacgatgggttgtaccaaggattgagcacagccactaaagatacctatgatgcgctccacatgcaggccctgccgccaaga

SEQ ID NO: 10469 - DNA, 2787 bp, Artificial Sequence
  Synthetic Polynucloetide
atggccttaccagtgaccgccttgctcctgccgctggccttgctgctccacgccgccaggccggaggtgcagctggttgaatctggcggaggactggttcagcctggcggatctctgagactgtcttgtgccgccagcggctacaccttcaccacctattggatgcactgggtccgacaggcccctggcaaaggacttgagtgggtcggatatatcaggcccagcaccggctacacagagtacaaccagaagttcaaggaccgcttcaccatcagcgccgacaccagcaagaataccgcctacctccagatgaacagcctgagagccgaggacaccgccgtgtactactgtgccagatccagatggctgctggactattggggccagggcacactggttacagtttctctcgaggggaaaccaattcccaaccctcttctgggactggattcaaccggcagcggcgaggacctgaagaacgtgttcccacctgaggtggccgtgttcgagcctagcgaggccgagatcagccacacccagaaagccaccctcgtgtgcctggctaccggcttctaccccgaccatgtggaactgtcttggtgggtcaacggcaaagaggtgcacagcggcgtgtctaccgacccccagccactgaaagaacagcccgccctgaacgacagccggtactgcctgagcagcagactgagagtgtccgccaccttctggcagaacccccggaaccacttcagatgccaggtgcagttctacggcctgagcgagaacgacgagtggacccaggacagagccaagcccgtgacccagatcgtgtctgccgaagcctggggcagagccgattgcggatcccagagcttcggcctgctggaccccaagctgtgctacctgctggatggcatcctgttcatctacggcgtgatcctgaccgccctgttcctgaggagtaagaggagcaggctcctgcacagtgactacatgaacatgactccacgccgccccggacccacccgcaagcattaccagccctatgccccaccacgcgacttcgcagcctatcgctccagagtgaagttcagcagaagcgccgacgcccctgcctaccagcagggacagaaccaactgtacaacgagctgaacctgggcagacgggaagagtacgacgtgctggacaagcggagaggcagggaccctgagatgggcggaaagccccagcggagaaagaacccccaggaaggactgtataacgaactccagaaagacaagatggccgaagcctacagcgagatcggcatgaagggcgagcggagaagaggcaagggccacgatggcctgtaccagggcctgagcaccgccaccaaggacacctatgacgccctgcacatgcaggccctgcctccaagaagggccaagcgatctggatctggagcaacaaacttctcactactcaaacaagcaggtgacgtggaggagaatcccgggcctactagtatggactggatttggcgcatccttttccttgtcggcgctgctaccggcgcgcattccttcgaagacattcagatgacacagagccctagcagcctgagcgcctctgtgggagacagagtgaccatcacatgcaagagcagccagagcctgctgtactccagcaatcagaagaactacctggcctggttccagcagaagcctggcaaggctcctaagctgctgatctactgggccagcaccagagaaagcggcgtgccaagcagattttctggcagcggctctggcaccgacttcaccctgacaatatccagcctccagcctgaggacttcgccacctacttttgccaccagtacctgagcagctacacattcggacagggcaccaaggtggaaatcaagcggacgcgtgagcagaaactgatctcggaagaggatgggagcggcatccagaaccctgatcctgccgtgtaccagctgcgggatagcaagagcagcgacaagagcgtgtgtctgttcaccgacttcgacagccagaccaacgtgtcccagagcaaggactccgacgtgtacatcaccgataagaccgtgctggacatgcggagcatggacttcaagagcaactccgccgtggcctggtccaacaagtccgatttcgcctgcgccaacgccttcaacaacagcattatccccgaggacacattcttcccaagccccgagagcagctgcggtacccagagttttgggttgttggaccctaaattgtgctatctgttggacggaatcctgttcatttacggagtgatcctgaccgcattgttcctgaggagcaagcggtcacggctgctccacagcgattacatgaatatgacaccacgaagaccgggtcctactcgcaaacactaccaaccctacgcacctccccgcgactttgcagcgtaccgatctcgggttaagttttccagatccgcagacgcacccgcttaccaacaagggcagaaccaactctacaatgaacttaatttggggcggagggaagagtacgacgttctggacaaaaggaggggacgagatcccgagatgggcggaaagcctcagcgaaggaagaatccgcaagaggggctttataacgaactccagaaagataaaatggcagaagcctatagtgagattgggatgaagggagaaaggaggaggggtaaaggtcacgatgggttgtaccaaggattgagcacagccactaaagatacctatgatgcgctccacatgcaggccctgccgccaaga

SEQ ID NO: 10470 - DNA, 2670 bp, Artificial Sequence
  Synthetic Polynucloetide
atggccttaccagtgaccgccttgctcctgccgctggccttgctgctccacgccgccaggccggaggtgcagctggttgaatctggcggaggactggttcagcctggcggatctctgagactgtcttgtgccgccagcggctacaccttcaccacctattggatgcactgggtccgacaggcccctggcaaaggacttgagtgggtcggatatatcaggcccagcaccggctacacagagtacaaccagaagttcaaggaccgcttcaccatcagcgccgacaccagcaagaataccgcctacctccagatgaacagcctgagagccgaggacaccgccgtgtactactgtgccagatccagatggctgctggactattggggccagggcacactggttacagtttctctcgaggggaaaccaattcccaaccctcttctgggactggattcaaccggcagcggcgaggacctgaagaacgtgttcccacctgaggtggccgtgttcgagcctagcgaggccgagatcagccacacccagaaagccaccctcgtgtgcctggctaccggcttctaccccgaccatgtggaactgtcttggtgggtcaacggcaaagaggtgcacagcggcgtgtctaccgacccccagccactgaaagaacagcccgccctgaacgacagccggtactgcctgagcagcagactgagagtgtccgccaccttctggcagaacccccggaaccacttcagatgccaggtgcagttctacggcctgagcgagaacgacgagtggacccaggacagagccaagcccgtgacccagatcgtgtctgccgaagcctggggcagagccgattgcggatcccagagcttcggcctgctggaccccaagctgtgctacctgctggatggcatcctgttcatctacggcgtgatcctgaccgccctgttcctgagagtgaagttcagcagaagcgccgacgcccctgcctaccagcagggacagaaccaactgtacaacgagctgaacctgggcagacgggaagagtacgacgtgctggacaagcggagaggcagggaccctgagatgggcggaaagccccagcggagaaagaacccccaggaaggactgtataacgaactccagaaagacaagatggccgaagcctacagcgagatcggcatgaagggcgagcggagaagaggcaagggccacgatggcctgtaccagggcctgagcaccgccaccaaggacacctatgacgccctgcacatgcaggccctgcctccaagaagggccaagcgatctggatctggagcaacaaacttctcactactcaaacaagcaggtgacgtggaggagaatcccgggcctactagtatggactggatttggcgcatccttttccttgtcggcgctgctaccggcgcgcattccttcgaagacattcagatgacacagagccctagcagcctgagcgcctctgtgggagacagagtgaccatcacatgcaagagcagccagagcctgctgtactccagcaatcagaagaactacctggcctggttccagcagaagcctggcaaggctcctaagctgctgatctactgggccagcaccagagaaagcggcgtgccaagcagattttctggcagcggctctggcaccgacttcaccctgacaatatccagcctccagcctgaggacttcgccacctacttttgccaccagtacctgagcagctacacattcggacagggcaccaaggtggaaatcaagcggacgcgtgagcagaaactgatctcggaagaggatctggggagcggcatccagaaccctgatcctgccgtgtaccagctgcgggatagcaagagcagcgacaagagcgtgtgtctgttcaccgacttcgacagccagaccaacgtgtcccagagcaaggactccgacgtgtacatcaccgataagaccgtgctggacatgcggagcatggacttcaagagcaactccgccgtggcctggtccaacaagtccgatttcgcctgcgccaacgccttcaacaacagcattatccccgaggacacattcttcccaagccccgagagcagctgcggtacccagagttttgggttgttggaccctaaattgtgctatctgttggacggaatcctgttcatttacggagtgatcctgaccgcattgttcctgaagagaggccggaagaagctgctgtacatcttcaagcagcctttcatgcggcccgtgcagaccacccaggaagaggacggctgctcctgccggttccccgaggaagaagaaggcggctgcgagctgcgggttaagttttccagatccgcagacgcacccgcttaccaacaagggcagaaccaactctacaatgaacttaatttggggcggagggaagagtacgacgttctggacaaaaggaggggacgagatcccgagatgggcggaaagcctcagcgaaggaagaatccgcaagaggggctttataacgaactccagaaagataaaatggcagaagcctatagtgagattgggatgaagggagaaaggaggaggggtaaaggtcacgatgggttgtaccaaggattgagcacagccactaaagatacctatgatgcgctccacatgcaggccctgccgccaaga

SEQ ID NO: 10471 - DNA, 2796 bp, Artificial Sequence
  Synthetic Polynucloetide
atggccttaccagtgaccgccttgctcctgccgctggccttgctgctccacgccgccaggccggaggtgcagctggttgaatctggcggaggactggttcagcctggcggatctctgagactgtcttgtgccgccagcggctacaccttcaccacctattggatgcactgggtccgacaggcccctggcaaaggacttgagtgggtcggatatatcaggcccagcaccggctacacagagtacaaccagaagttcaaggaccgcttcaccatcagcgccgacaccagcaagaataccgcctacctccagatgaacagcctgagagccgaggacaccgccgtgtactactgtgccagatccagatggctgctggactattggggccagggcacactggttacagtttctctcgaggggaaaccaattcccaaccctcttctgggactggattcaaccggcagcggcgaggacctgaagaacgtgttcccacctgaggtggccgtgttcgagcctagcgaggccgagatcagccacacccagaaagccaccctcgtgtgcctggctaccggcttctaccccgaccatgtggaactgtcttggtgggtcaacggcaaagaggtgcacagcggcgtgtctaccgacccccagccactgaaagaacagcccgccctgaacgacagccggtactgcctgagcagcagactgagagtgtccgccaccttctggcagaacccccggaaccacttcagatgccaggtgcagttctacggcctgagcgagaacgacgagtggacccaggacagagccaagcccgtgacccagatcgtgtctgccgaagcctggggcagagccgattgcggatcccagagcttcggcctgctggaccccaagctgtgctacctgctggatggcatcctgttcatctacggcgtgatcctgaccgccctgttcctgaaacggggcagaaagaaactcctgtatatattcaaacaaccatttatgagaccagtacaaactactcaagaggaagatggctgtagctgccgatttccagaagaagaagaaggaggatgtgaactgagagtgaagttcagcagaagcgccgacgcccctgcctaccagcagggacagaaccaactgtacaacgagctgaacctgggcagacgggaagagtacgacgtgctggacaagcggagaggcagggaccctgagatgggcggaaagccccagcggagaaagaacccccaggaaggactgtataacgaactccagaaagacaagatggccgaagcctacagcgagatcggcatgaagggcgagcggagaagaggcaagggccacgatggcctgtaccagggcctgagcaccgccaccaaggacacctatgacgccctgcacatgcaggccctgcctccaagaagggccaagcgatctggatctggagcaacaaacttctcactactcaaacaagcaggtgacgtggaggagaatcccgggcctactagtatggactggatttggcgcatccttttccttgtcggcgctgctaccggcgcgcattccttcgaagacattcagatgacacagagccctagcagcctgagcgcctctgtgggagacagagtgaccatcacatgcaagagcagccagagcctgctgtactccagcaatcagaagaactacctggcctggttccagcagaagcctggcaaggctcctaagctgctgatctactgggccagcaccagagaaagcggcgtgccaagcagattttctggcagcggctctggcaccgacttcaccctgacaatatccagcctccagcctgaggacttcgccacctacttttgccaccagtacctgagcagctacacattcggacagggcaccaaggtggaaatcaagcggacgcgtgagcagaaactgatctcggaagaggatctggggagcggcatccagaaccctgatcctgccgtgtaccagctgcgggatagcaagagcagcgacaagagcgtgtgtctgttcaccgacttcgacagccagaccaacgtgtcccagagcaaggactccgacgtgtacatcaccgataagaccgtgctggacatgcggagcatggacttcaagagcaactccgccgtggcctggtccaacaagtccgatttcgcctgcgccaacgccttcaacaacagcattatccccgaggacacattcttcccaagccccgagagcagctgcggtacccagagttttgggttgttggaccctaaattgtgctatctgttggacggaatcctgttcatttacggagtgatcctgaccgcattgttcctgaagagaggccggaagaagctgctgtacatcttcaagcagcctttcatgcggcccgtgcagaccacccaggaagaggacggctgctcctgccggttccccgaggaagaagaaggcggctgcgagctgcgggttaagttttccagatccgcagacgcacccgcttaccaacaagggcagaaccaactctacaatgaacttaatttggggcggagggaagagtacgacgttctggacaaaaggaggggacgagatcccgagatgggcggaaagcctcagcgaaggaagaatccgcaagaggggctttataacgaactccagaaagataaaatggcagaagcctatagtgagattgggatgaagggagaaaggaggaggggtaaaggtcacgatgggttgtaccaaggattgagcacagccactaaagatacctatgatgcgctccacatgcaggccctgccgccaaga

SEQ ID NO: 10472 - DNA, 2469 bp, Artificial Sequence
  Synthetic Polynucloetide
atggccttaccagtgaccgccttgctcctgccgctggccttgctgctccacgccgccaggccggaggtgcagctggttgaatctggcggaggactggttcagcctggcggatctctgagactgtcttgtgccgccagcggctacaccttcaccacctattggatgcactgggtccgacaggcccctggcaaaggacttgagtgggtcggatatatcaggcccagcaccggctacacagagtacaaccagaagttcaaggaccgcttcaccatcagcgccgacaccagcaagaataccgcctacctccagatgaacagcctgagagccgaggacaccgccgtgtactactgtgccagatccagatggctgctggactattggggccagggcacactggttacagtttctctcgagcagagcttcggcctgctggaccccaagctgtgctacctgctggatggcatcctgttcatctacggcgtgatcctgaccgccctgttcctgagagtgaagttcagcagaagcgccgacgcccctgcctaccagcagggacagaaccaactgtacaacgagctgaacctgggcagacgggaagagtacgacgtgctggacaagcggagaggcagggaccctgagatgggcggaaagccccagcggagaaagaacccccaggaaggactgtataacgaactccagaaagacaagatggccgaagcctacagcgagatcggcatgaagggcgagcggagaagaggcaagggccacgatggcctgtaccagggcctgagcaccgccaccaaggacacctatgacgccctgcacatgcaggccctgcctccaagaagggccaagcgatctggatctggagcaacaaacttctcactactcaaacaagcaggtgacgtggaggagaatcccgggcctactagtatggactggatttggcgcatccttttccttgtcggcgctgctaccggcgcgcattccttcgaagacattcagatgacacagagccctagcagcctgagcgcctctgtgggagacagagtgaccatcacatgcaagagcagccagagcctgctgtactccagcaatcagaagaactacctggcctggttccagcagaagcctggcaaggctcctaagctgctgatctactgggccagcaccagagaaagcggcgtgccaagcagattttctggcagcggctctggcaccgacttcaccctgacaatatccagcctccagcctgaggacttcgccacctacttttgccaccagtacctgagcagctacacattcggacagggcaccaaggtggaaatcaagcggacgcgtcagagttttgggttgttggaccctaaattgtgctatctgttggacggaatcctgttcatttacggagtgatcctgaccgcattgttcctgcgggttaagttttccagatccgcagacgcacccgcttaccaacaagggcagaaccaactctacaatgaacttaatttggggcggagggaagagtacgacgttctggacaaaaggaggggacgagatcccgagatgggcggaaagcctcagcgaaggaagaatccgcaagaggggctttataacgaactccagaaagataaaatggcagaagcctatagtgagattgggatgaagggagaaaggaggaggggtaaaggtcacgatgggttgtaccaaggattgagcacagccactaaagatacctatgatgcgctccacatgcaggccctgccgccaagacgcgccaagagaagcggatctggcgtgaagcagaccctgaatttcgacctgctgaagctggctggcgacgtggaatccaacccaggcccttctagaggccatatgaccgagtacaagcccacggtgcgcctcgccacccgcgacgacgtccccagggccgtacgcaccctcgccgccgcgttcgccgactaccccgccacgcgccacaccgtcgatccggaccgccacatcgagcgggtcaccgagctgcaagaactcttcctcacgcgcgtcgggctcgacatcggcaaggtgtgggtcgcggacgacggcgccgcggtggcggtctggaccacgccggagagcgtcgaagcgggggcggtgttcgccgagatcggcccgcgcatggccgagttgagcggttcccggctggccgcgcagcaacagatggaaggcctcctggcgccgcaccggcccaaggagcccgcgtggttcctggccaccgtcggcgtctcgcccgaccaccagggcaagggtctgggcagcgccgtcgtgctccccggagtggaggcggccgagcgcgccggggtgcccgccttcctggagacctccgcgccccgcaacctccccttctacgagcggctcggcttcaccgtcaccgccgacgtcgaggtgcccgaaggaccgcgcacctggtgcatgacccgcaagcccggtgcctga

SEQ ID NO: 10473 - DNA, 1941 bp, Artificial Sequence
  Synthetic Polynucloetide
atggccttaccagtgaccgccttgctcctgccgctggccttgctgctccacgccgccaggccggaggtgcagctggttgaatctggcggaggactggttcagcctggcggatctctgagactgtcttgtgccgccagcggctacaccttcaccacctattggatgcactgggtccgacaggcccctggcaaaggacttgagtgggtcggatatatcaggcccagcaccggctacacagagtacaaccagaagttcaaggaccgcttcaccatcagcgccgacaccagcaagaataccgcctacctccagatgaacagcctgagagccgaggacaccgccgtgtactactgtgccagatccagatggctgctggactattggggccagggcacactggttacagtttctctcgagggacagcctaaggccaatcctaccgtgacactgttccctccaagcagcgaagaactccaggccaacaaggccacacttgtgtgcctgatctccgacttctaccctggggctgtgacagtggcttggaaggccgatggatctcctgtgaaagccggcgtggaaaccaccaagccatccaagcagagcaacaacaaatacgccgccagctcctacctgagcctgacacctgagcagtggaagtcccacagatcctacagctgccaagtgacccacgaaggcagcaccgtggaaaagacagtggcccctacagagtgcagccccatcaagaccgatgtgattacaatggaccccaaggacaactgctccaaggacgccaacgataccctgctgctccagctgaccaacaccagcgcctactacatgtacttgttgctgctgctgaagtccgtggtgtacttcgccatcatcacatgctgcctgctgcggagaaccgccttctgctgcaacggcgagaagtctagggccaagcgatctggatctggagcaacaaacttctcactactcaaacaagcaggtgacgtggaggagaatcccgggcctactagtatggactggatttggcgcatccttttccttgtcggcgctgctaccggcgcgcattccttcgaagacattcagatgacacagagccctagcagcctgagcgcctctgtgggagacagagtgaccatcacatgcaagagcagccagagcctgctgtactccagcaatcagaagaactacctggcctggttccagcagaagcctggcaaggctcctaagctgctgatctactgggccagcaccagagaaagcggcgtgccaagcagattttctggcagcggctctggcaccgacttcaccctgacaatatccagcctccagcctgaggacttcgccacctacttttgccaccagtacctgagcagctacacattcggacagggcaccaaggtggaaatcaagcggacgcgtgcctctacaaagggaccctccgtgtttcctctggctcccagcagcaagtctacaagcggaggaacagccgctctgggctgcctggtcaaggattactttcccgagcctgtgaccgtgtcctggaatagcggagcactgacaagcggcgtgcacacctttccagccgtgctgcaaagcagcggcctgtactctctgagcagcgtggtcacagtgcctagctctagcctgggcacccagacctacatctgcaatgtgaaccacaagcctagcaacaccaaggtggacaagagagtggaacccaagagctgtgaagtgaaaaccgactccaccgaccacgtgaagcccaaagagacagagaacaccaagcagcccagcaagagctgccacaagcccaaggccatcgtgcacaccgagaaagtgaacatgatgagcctgaccgtgctgggcctgcggatgctgttcgccaaaaccgtggccgtgaacttcctgctgaccgccaagctgttcttcctc

SEQ ID NO: 10474 - DNA, 1875 bp, Artificial Sequence
  Synthetic Polynucloetide
atggccttaccagtgaccgccttgctcctgccgctggccttgctgctccacgccgccaggccggaggtgcagctggttgaatctggcggaggactggttcagcctggcggatctctgagactgtcttgtgccgccagcggctacaccttcaccacctattggatgcactgggtccgacaggcccctggcaaaggacttgagtgggtcggatatatcaggcccagcaccggctacacagagtacaaccagaagttcaaggaccgcttcaccatcagcgccgacaccagcaagaataccgcctacctccagatgaacagcctgagagccgaggacaccgccgtgtactactgtgccagatccagatggctgctggactattggggccagggcacactggttacagtttctctcgagggacagcctaaggccaatcctaccgtgacactgttccctccaagcagcgaagaactccaggccaacaaggccacacttgtgtgcctgatctccgacttctaccctggggctgtgacagtggcttggaaggccgatggatctcctgtgaaagccggcgtggaaaccaccaagccatccaagcagagcaacaacaaatacgccgccagctcctacctgagcctgacacctgagcagtggaagtcccacagatcctacagctgccaagtgacccacgaaggcagcaccgtggaaaagacagtggcccctacagagtgcagcggcagagccgattgcggcatcaccagcgccagctaccaccagggcgtgctgagcgccaccatcctgtacgagatcctgctgggcaaggccaccctgtacgccgtgctggtgtctgccctggtgctgatggctatggtcaagcggaaggacagccggggaagggccaagcgatctggatctggagcaacaaacttctcactactcaaacaagcaggtgacgtggaggagaatcccgggcctactagtatggactggatttggcgcatccttttccttgtcggcgctgctaccggcgcgcattccttcgaagacattcagatgacacagagccctagcagcctgagcgcctctgtgggagacagagtgaccatcacatgcaagagcagccagagcctgctgtactccagcaatcagaagaactacctggcctggttccagcagaagcctggcaaggctcctaagctgctgatctactgggccagcaccagagaaagcggcgtgccaagcagattttctggcagcggctctggcaccgacttcaccctgacaatatccagcctccagcctgaggacttcgccacctacttttgccaccagtacctgagcagctacacattcggacagggcaccaaggtggaaatcaagcggacgcgtgcctctacaaagggaccctccgtgtttcctctggctcccagcagcaagtctacaagcggaggaacagccgctctgggctgcctggtcaaggattactttcccgagcctgtgaccgtgtcctggaatagcggagcactgacaagcggcgtgcacacctttccagccgtgctgcaaagcagcggcctgtactctctgagcagcgtggtcacagtgcctagctctagcctgggcacccagacctacatctgcaatgtgaaccacaagcctagcaacaccaaggtggacaagagagtggaacccaagagctgtatccccgaggacacattcttcccaagcagcgacgtgccctgcgacgtgaagctggtggaaaagagcttcgagacagacaccaacctgaacttccagaacctgagcgtgatcggcttcagaatcctgctgctgaaagtggccggctttaacctgctgatgaccctgcggctgtggtccagc

SEQ ID NO: 10475 - DNA, 1875 bp, Artificial Sequence
  Synthetic Polynucloetide
atggccttaccagtgaccgccttgctcctgccgctggccttgctgctccacgccgccaggccggaggtgcagctggttgaatctggcggaggactggttcagcctggcggatctctgagactgtcttgtgccgccagcggctacaccttcaccacctattggatgcactgggtccgacaggcccctggcaaaggacttgagtgggtcggatatatcaggcccagcaccggctacacagagtacaaccagaagttcaaggaccgcttcaccatcagcgccgacaccagcaagaataccgcctacctccagatgaacagcctgagagccgaggacaccgccgtgtactactgtgccagatccagatggctgctggactattggggccagggcacactggttacagtttctctcgagggacagcctaaggccaatcctaccgtgacactgttccctccaagcagcgaagaactccaggccaacaaggccacacttgtgtgcctgatctccgacttctaccctggggctgtgacagtggcttggaaggccgatggatctcctgtgaaagccggcgtggaaaccaccaagccatccaagcagagcaacaacaaatacgccgccagctcctacctgagcctgacacctgagcagtggaagtcccacagatcctacagctgccaagtgacccacgaaggcagcaccgtggaaaagacagtggcccctacagagtgcagcggcagagccgattgcggctttaccagcgagagctaccagcagggcgtgctgagcgccaccatcctgtacgagatcctgctgggcaaggccaccctgtacgccgtgctggtgtctgccctggtgctgatggctatggtcaagcggaaggacagccggggaagggccaagcgatctggatctggagcaacaaacttctcactactcaaacaagcaggtgacgtggaggagaatcccgggcctactagtatggactggatttggcgcatccttttccttgtcggcgctgctaccggcgcgcattccttcgaagacattcagatgacacagagccctagcagcctgagcgcctctgtgggagacagagtgaccatcacatgcaagagcagccagagcctgctgtactccagcaatcagaagaactacctggcctggttccagcagaagcctggcaaggctcctaagctgctgatctactgggccagcaccagagaaagcggcgtgccaagcagattttctggcagcggctctggcaccgacttcaccctgacaatatccagcctccagcctgaggacttcgccacctacttttgccaccagtacctgagcagctacacattcggacagggcaccaaggtggaaatcaagcggacgcgtgcctctacaaagggaccctccgtgtttcctctggctcccagcagcaagtctacaagcggaggaacagccgctctgggctgcctggtcaaggattactttcccgagcctgtgaccgtgtcctggaatagcggagcactgacaagcggcgtgcacacctttccagccgtgctgcaaagcagcggcctgtactctctgagcagcgtggtcacagtgcctagctctagcctgggcacccagacctacatctgcaatgtgaaccacaagcctagcaacaccaaggtggacaagagagtggaacccaagagctgtatccccgaggacacattcttcccaagccccgagagcagctgcgacgtgaagctggtggaaaagagcttcgagacagacaccaacctgaacttccagaacctgagcgtgatcggcttcagaatcctgctgctgaaagtggccggctttaacctgctgatgaccctgcggctgtggtccagc

SEQ ID NO: 10476 - DNA, 1353 bp, Artificial Sequence
  Synthetic Polynucloetide
atggccttaccagtgaccgccttgctcctgccgctggccttgctgctccacgccgccaggccggaggtgcagctggttgaatctggcggaggactggttcagcctggcggatctctgagactgtcttgtgccgccagcggctacaccttcaccacctattggatgcactgggtccgacaggcccctggcaaaggacttgagtgggtcggatatatcaggcccagcaccggctacacagagtacaaccagaagttcaaggaccgcttcaccatcagcgccgacaccagcaagaataccgcctacctccagatgaacagcctgagagccgaggacaccgccgtgtactactgtgccagatccagatggctgctggactattggggccagggcacactggttacagtttctggcggaggcggaagtggaggcggaggatctggcggcggaggctctgacattcagatgacacagagccctagcagcctgagcgcctctgtgggagacagagtgaccatcacatgcaagagcagccagagcctgctgtactccagcaatcagaagaactacctggcctggttccagcagaagcctggcaaggctcctaagctgctgatctactgggccagcaccagagaaagcggcgtgccaagcagattttctggcagcggctctggcaccgacttcaccctgacaatatccagcctccagcctgaggacttcgccacctacttttgccaccagtacctgagcagctacacattcggacagggcaccaaggtggaaatcaagcggacgcgtgacggtaacgaggagatgggaggaatcactcaaaccccttacaaagtctcaatttcaggaacaactgttatccttacatgtccccagtatcctggcagcgagatcctttggcagcataacgacaagaatatagggggagatgaagacgataagaatatcggatctgacgaggatcacttgagcctgaaagagttctccgagcttgaacaaagcggatattatgtgtgctatccgcgcgggtcaaagccggaagacgctaacttttacctttatctccgagccagagtgtgcgaaaattgcatggaaatggacgttatgtccgttgctacaatagttatcgtagatatatgcatcacgggtggactgcttctgctggtttattattggtccaagaatagaaaggccaaagctaaacccgtgaccagaggcgctggcgcaggcggaaggcaaaggggacaaaacaaagaacggccaccaccagtgccaaatccagattatgagcctattcggaaaggacagagggacctgtactctggcctgaatcagagaagaatc

SEQ ID NO: 10477 - DNA, 1248 bp, Artificial Sequence
  Synthetic Polynucloetide
atggccttaccagtgaccgccttgctcctgccgctggccttgctgctccacgccgccaggccggaggtgcagctggttgaatctggcggaggactggttcagcctggcggatctctgagactgtcttgtgccgccagcggctacaccttcaccacctattggatgcactgggtccgacaggcccctggcaaaggacttgagtgggtcggatatatcaggcccagcaccggctacacagagtacaaccagaagttcaaggaccgcttcaccatcagcgccgacaccagcaagaataccgcctacctccagatgaacagcctgagagccgaggacaccgccgtgtactactgtgccagatccagatggctgctggactattggggccagggcacactggttacagtttctggcggaggcggaagtggaggcggaggatctggcggcggaggctctgacattcagatgacacagagccctagcagcctgagcgcctctgtgggagacagagtgaccatcacatgcaagagcagccagagcctgctgtactccagcaatcagaagaactacctggcctggttccagcagaagcctggcaaggctcctaagctgctgatctactgggccagcaccagagaaagcggcgtgccaagcagattttctggcagcggctctggcaccgacttcaccctgacaatatccagcctccagcctgaggacttcgccacctacttttgccaccagtacctgagcagctacacattcggacagggcaccaaggtggaaatcaagcggacgcgtttcaagatccccatcgaggaactggaagatcgggtgttcgtgaactgcaacacctctatcacctgggtggaaggcaccgtgggaacactgctgagcgacatcaccagactggacctcggcaagcggattctggaccctcggggcatctacagatgcaacggcaccgacatctacaaggacaaagaaagcaccgtgcaggtccactacagaatgtgccagtcctgcgtggaactggaccctgctacagtggccggcatcatcgtgaccgatgtgatcgctactctgctgctggctctgggagtgttctgcttcgccggacacgaaacaggcagactgtctggcgctgccgatacacaggccctgctgagaaacgaccaagtgtatcagcccctgcgcgacagagatgatgcccagtattctcacctcggcggcaactgggctagaaacaag

SEQ ID NO: 10478 - DNA, 1278 bp, Artificial Sequence
  Synthetic Polynucloetide
atggccttaccagtgaccgccttgctcctgccgctggccttgctgctccacgccgccaggccggaggtgcagctggttgaatctggcggaggactggttcagcctggcggatctctgagactgtcttgtgccgccagcggctacaccttcaccacctattggatgcactgggtccgacaggcccctggcaaaggacttgagtgggtcggatatatcaggcccagcaccggctacacagagtacaaccagaagttcaaggaccgcttcaccatcagcgccgacaccagcaagaataccgcctacctccagatgaacagcctgagagccgaggacaccgccgtgtactactgtgccagatccagatggctgctggactattggggccagggcacactggttacagtttctggcggaggcggaagtggaggcggaggatctggcggcggaggctctgacattcagatgacacagagccctagcagcctgagcgcctctgtgggagacagagtgaccatcacatgcaagagcagccagagcctgctgtactccagcaatcagaagaactacctggcctggttccagcagaagcctggcaaggctcctaagctgctgatctactgggccagcaccagagaaagcggcgtgccaagcagattttctggcagcggctctggcaccgacttcaccctgacaatatccagcctccagcctgaggacttcgccacctacttttgccaccagtacctgagcagctacacattcggacagggcaccaaggtggaaatcaagcggacgcgtcagagcatcaagggcaaccacctggtcaaggtgtacgactaccaagaggacggcagcgtgctgctgacatgtgatgccgaggccaagaacatcacctggtttaaggacggcaagatgatcggcttcctgaccgaggacaagaagaagtggaacctgggcagcaacgctaaggaccccagaggcatgtatcagtgcaagggcagccagaacaagagcaagcccctccaggtgtactaccggatgtgccagaactgcatcgagctgaacgccgctaccatcagcggctttctgttcgccgagatcgtgtccatcttcgtgctggccgtgggcgtgtactttatcgctggacaggatggcgtgcggcagagcagagcttccgataagcaaaccctgctgcctaacgaccagctgtaccagcctctgaaggacagagaggacgaccagtacagccacctccagggcaatcagctgagaagaaac

SEQ ID NO: 10479 - DNA, 1227 bp, Artificial Sequence
  Synthetic Polynucloetide
atggccttaccagtgaccgccttgctcctgccgctggccttgctgctccacgccgccaggccggaggtgcagctggttgaatctggcggaggactggttcagcctggcggatctctgagactgtcttgtgccgccagcggctacaccttcaccacctattggatgcactgggtccgacaggcccctggcaaaggacttgagtgggtcggatatatcaggcccagcaccggctacacagagtacaaccagaagttcaaggaccgcttcaccatcagcgccgacaccagcaagaataccgcctacctccagatgaacagcctgagagccgaggacaccgccgtgtactactgtgccagatccagatggctgctggactattggggccagggcacactggttacagtttctggcggaggcggaagtggaggcggaggatctggcggcggaggctctgacattcagatgacacagagccctagcagcctgagcgcctctgtgggagacagagtgaccatcacatgcaagagcagccagagcctgctgtactccagcaatcagaagaactacctggcctggttccagcagaagcctggcaaggctcctaagctgctgatctactgggccagcaccagagaaagcggcgtgccaagcagattttctggcagcggctctggcaccgacttcaccctgacaatatccagcctccagcctgaggacttcgccacctacttttgccaccagtacctgagcagctacacattcggacagggcaccaaggtggaaatcaagcggacgcgtcagagttttgggttgttggaccctaaattgtgctatctgttggacggaatcctgttcatttacggagtgatcctgaccgcattgttcctgcgggttaagttttccagatccgcagacgcacccgcttaccaacaagggcagaaccaactctacaatgaacttaatttggggcggagggaagagtacgacgttctggacaaaaggaggggacgagatcccgagatgggcggaaagcctcagcgaaggaagaatccgcaagaggggctttataacgaactccagaaagataaaatggcagaagcctatagtgagattgggatgaagggagaaaggaggaggggtaaaggtcacgatgggttgtaccaaggattgagcacagccactaaagatacctatgatgcgctccacatgcaggccctgccgccaaga

SEQ ID NO: 10480 - DNA, 1353 bp, Artificial Sequence
  Synthetic Polynucloetide
atggccttaccagtgaccgccttgctcctgccgctggccttgctgctccacgccgccaggccggacattcagatgacacagagccctagcagcctgagcgcctctgtgggagacagagtgaccatcacatgcaagagcagccagagcctgctgtactccagcaatcagaagaactacctggcctggttccagcagaagcctggcaaggctcctaagctgctgatctactgggccagcaccagagaaagcggcgtgccaagcagattttctggcagcggctctggcaccgacttcaccctgacaatatccagcctccagcctgaggacttcgccacctacttttgccaccagtacctgagcagctacacattcggacagggcaccaaggtggaaatcaagcggggcggaggcggaagtggaggcggaggatctggcggcggaggctctgaggtgcagctggttgaatctggcggaggactggttcagcctggcggatctctgagactgtcttgtgccgccagcggctacaccttcaccacctattggatgcactgggtccgacaggcccctggcaaaggacttgagtgggtcggatatatcaggcccagcaccggctacacagagtacaaccagaagttcaaggaccgcttcaccatcagcgccgacaccagcaagaataccgcctacctccagatgaacagcctgagagccgaggacaccgccgtgtactactgtgccagatccagatggctgctggactattggggccagggcacactggttacagtttctacgcgtgacggtaacgaggagatgggaggaatcactcaaaccccttacaaagtctcaatttcaggaacaactgttatccttacatgtccccagtatcctggcagcgagatcctttggcagcataacgacaagaatatagggggagatgaagacgataagaatatcggatctgacgaggatcacttgagcctgaaagagttctccgagcttgaacaaagcggatattatgtgtgctatccgcgcgggtcaaagccggaagacgctaacttttacctttatctccgagccagagtgtgcgaaaattgcatggaaatggacgttatgtccgttgctacaatagttatcgtagatatatgcatcacgggtggactgcttctgctggtttattattggtccaagaatagaaaggccaaagctaaacccgtgaccagaggcgctggcgcaggcggaaggcaaaggggacaaaacaaagaacggccaccaccagtgccaaatccagattatgagcctattcggaaaggacagagggacctgtactctggcctgaatcagagaagaatc

SEQ ID NO: 10481 - DNA, 1248 bp, Artificial Sequence
  Synthetic Polynucloetide
atggccttaccagtgaccgccttgctcctgccgctggccttgctgctccacgccgccaggccggacattcagatgacacagagccctagcagcctgagcgcctctgtgggagacagagtgaccatcacatgcaagagcagccagagcctgctgtactccagcaatcagaagaactacctggcctggttccagcagaagcctggcaaggctcctaagctgctgatctactgggccagcaccagagaaagcggcgtgccaagcagattttctggcagcggctctggcaccgacttcaccctgacaatatccagcctccagcctgaggacttcgccacctacttttgccaccagtacctgagcagctacacattcggacagggcaccaaggtggaaatcaagcggggcggaggcggaagtggaggcggaggatctggcggcggaggctctgaggtgcagctggttgaatctggcggaggactggttcagcctggcggatctctgagactgtcttgtgccgccagcggctacaccttcaccacctattggatgcactgggtccgacaggcccctggcaaaggacttgagtgggtcggatatatcaggcccagcaccggctacacagagtacaaccagaagttcaaggaccgcttcaccatcagcgccgacaccagcaagaataccgcctacctccagatgaacagcctgagagccgaggacaccgccgtgtactactgtgccagatccagatggctgctggactattggggccagggcacactggttacagtttctacgcgtttcaagatccccatcgaggaactggaagatcgggtgttcgtgaactgcaacacctctatcacctgggtggaaggcaccgtgggaacactgctgagcgacatcaccagactggacctcggcaagcggattctggaccctcggggcatctacagatgcaacggcaccgacatctacaaggacaaagaaagcaccgtgcaggtccactacagaatgtgccagtcctgcgtggaactggaccctgctacagtggccggcatcatcgtgaccgatgtgatcgctactctgctgctggctctgggagtgttctgcttcgccggacacgaaacaggcagactgtctggcgctgccgatacacaggccctgctgagaaacgaccaagtgtatcagcccctgcgcgacagagatgatgcccagtattctcacctcggcggcaactgggctagaaacaag

SEQ ID NO: 10482 - DNA, 1278 bp, Artificial Sequence
  Synthetic Polynucloetide
atggccttaccagtgaccgccttgctcctgccgctggccttgctgctccacgccgccaggccggacattcagatgacacagagccctagcagcctgagcgcctctgtgggagacagagtgaccatcacatgcaagagcagccagagcctgctgtactccagcaatcagaagaactacctggcctggttccagcagaagcctggcaaggctcctaagctgctgatctactgggccagcaccagagaaagcggcgtgccaagcagattttctggcagcggctctggcaccgacttcaccctgacaatatccagcctccagcctgaggacttcgccacctacttttgccaccagtacctgagcagctacacattcggacagggcaccaaggtggaaatcaagcggggcggaggcggaagtggaggcggaggatctggcggcggaggctctgaggtgcagctggttgaatctggcggaggactggttcagcctggcggatctctgagactgtcttgtgccgccagcggctacaccttcaccacctattggatgcactgggtccgacaggcccctggcaaaggacttgagtgggtcggatatatcaggcccagcaccggctacacagagtacaaccagaagttcaaggaccgcttcaccatcagcgccgacaccagcaagaataccgcctacctccagatgaacagcctgagagccgaggacaccgccgtgtactactgtgccagatccagatggctgctggactattggggccagggcacactggttacagtttctacgcgtcagagcatcaagggcaaccacctggtcaaggtgtacgactaccaagaggacggcagcgtgctgctgacatgtgatgccgaggccaagaacatcacctggtttaaggacggcaagatgatcggcttcctgaccgaggacaagaagaagtggaacctgggcagcaacgctaaggaccccagaggcatgtatcagtgcaagggcagccagaacaagagcaagcccctccaggtgtactaccggatgtgccagaactgcatcgagctgaacgccgctaccatcagcggctttctgttcgccgagatcgtgtccatcttcgtgctggccgtgggcgtgtactttatcgctggacaggatggcgtgcggcagagcagagcttccgataagcaaaccctgctgcctaacgaccagctgtaccagcctctgaaggacagagaggacgaccagtacagccacctccagggcaatcagctgagaagaaac

SEQ ID NO: 10483 - DNA, 1227 bp, Artificial Sequence
  Synthetic Polynucloetide
atggccttaccagtgaccgccttgctcctgccgctggccttgctgctccacgccgccaggccggacattcagatgacacagagccctagcagcctgagcgcctctgtgggagacagagtgaccatcacatgcaagagcagccagagcctgctgtactccagcaatcagaagaactacctggcctggttccagcagaagcctggcaaggctcctaagctgctgatctactgggccagcaccagagaaagcggcgtgccaagcagattttctggcagcggctctggcaccgacttcaccctgacaatatccagcctccagcctgaggacttcgccacctacttttgccaccagtacctgagcagctacacattcggacagggcaccaaggtggaaatcaagcggggcggaggcggaagtggaggcggaggatctggcggcggaggctctgaggtgcagctggttgaatctggcggaggactggttcagcctggcggatctctgagactgtcttgtgccgccagcggctacaccttcaccacctattggatgcactgggtccgacaggcccctggcaaaggacttgagtgggtcggatatatcaggcccagcaccggctacacagagtacaaccagaagttcaaggaccgcttcaccatcagcgccgacaccagcaagaataccgcctacctccagatgaacagcctgagagccgaggacaccgccgtgtactactgtgccagatccagatggctgctggactattggggccagggcacactggttacagtttctacgcgtcagagttttgggttgttggaccctaaattgtgctatctgttggacggaatcctgttcatttacggagtgatcctgaccgcattgttcctgcgggttaagttttccagatccgcagacgcacccgcttaccaacaagggcagaaccaactctacaatgaacttaatttggggcggagggaagagtacgacgttctggacaaaaggaggggacgagatcccgagatgggcggaaagcctcagcgaaggaagaatccgcaagaggggctttataacgaactccagaaagataaaatggcagaagcctatagtgagattgggatgaagggagaaaggaggaggggtaaaggtcacgatgggttgtaccaaggattgagcacagccactaaagatacctatgatgcgctccacatgcaggccctgccgccaaga

SEQ ID NO: 10484 - DNA, 1929 bp, Artificial Sequence
  Synthetic Polynucloetide
atggccttaccagtgaccgccttgctcctgccgctggccttgctgctccacgccgccaggccggaggtgcagctggttgaatctggcggaggactggttcagcctggcggatctctgagactgtcttgtgccgccagcggctacaccttcaccacctattggatgcactgggtccgacaggcccctggcaaaggacttgagtgggtcggatatatcaggcccagcaccggctacacagagtacaaccagaagttcaaggaccgcttcaccatcagcgccgacaccagcaagaataccgcctacctccagatgaacagcctgagagccgaggacaccgccgtgtactactgtgccagatccagatggctgctggactattggggccagggcacactggttacagtttctggcggaggcggaagtggaggcggaggatctggcggcggaggctctgacattcagatgacacagagccctagcagcctgagcgcctctgtgggagacagagtgaccatcacatgcaagagcagccagagcctgctgtactccagcaatcagaagaactacctggcctggttccagcagaagcctggcaaggctcctaagctgctgatctactgggccagcaccagagaaagcggcgtgccaagcagattttctggcagcggctctggcaccgacttcaccctgacaatatccagcctccagcctgaggacttcgccacctacttttgccaccagtacctgagcagctacacattcggacagggcaccaaggtggaaatcaagcggacgcgtgggagcggcatccagaaccctgatcctgccgtgtaccagctgcgggatagcaagagcagcgacaagagcgtgtgtctgttcaccgacttcgacagccagaccaacgtgtcccagagcaaggactccgacgtgtacatcaccgataagaccgtgctggacatgcggagcatggacttcaagagcaactccgccgtggcctggtccaacaagtccgatttcgcctgcgccaacgccttcaacaacagcattatccccgaggacacattcttcccaagccccgagagcagctgcgacgtgaagctggtggaaaagagcttcgagacagacaccaacctgaacttccagaacctgagcgtgatcggcttcagaatcctgctgctgaaagtggccggctttaacctgctgatgaccctgcggctgtggtccagccgcgccaagagaagcggatctggcgtgaagcagaccctgaatttcgacctgctgaagctggctggcgacgtggaatccaacccaggcccttctagaggccatatgaccgagtacaagcccacggtgcgcctcgccacccgcgacgacgtccccagggccgtacgcaccctcgccgccgcgttcgccgactaccccgccacgcgccacaccgtcgatccggaccgccacatcgagcgggtcaccgagctgcaagaactcttcctcacgcgcgtcgggctcgacatcggcaaggtgtgggtcgcggacgacggcgccgcggtggcggtctggaccacgccggagagcgtcgaagcgggggcggtgttcgccgagatcggcccgcgcatggccgagttgagcggttcccggctggccgcgcagcaacagatggaaggcctcctggcgccgcaccggcccaaggagcccgcgtggttcctggccaccgtcggcgtctcgcccgaccaccagggcaagggtctgggcagcgccgtcgtgctccccggagtggaggcggccgagcgcgccggggtgcccgccttcctggagacctccgcgccccgcaacctccccttctacgagcggctcggcttcaccgtcaccgccgacgtcgaggtgcccgaaggaccgcgcacctggtgcatgacccgcaagcccggtgcctga

SEQ ID NO: 10485 - DNA, 2025 bp, Artificial Sequence
  Synthetic Polynucloetide
atggccttaccagtgaccgccttgctcctgccgctggccttgctgctccacgccgccaggccggaggtgcagctggttgaatctggcggaggactggttcagcctggcggatctctgagactgtcttgtgccgccagcggctacaccttcaccacctattggatgcactgggtccgacaggcccctggcaaaggacttgagtgggtcggatatatcaggcccagcaccggctacacagagtacaaccagaagttcaaggaccgcttcaccatcagcgccgacaccagcaagaataccgcctacctccagatgaacagcctgagagccgaggacaccgccgtgtactactgtgccagatccagatggctgctggactattggggccagggcacactggttacagtttctggcggaggcggaagtggaggcggaggatctggcggcggaggctctgacattcagatgacacagagccctagcagcctgagcgcctctgtgggagacagagtgaccatcacatgcaagagcagccagagcctgctgtactccagcaatcagaagaactacctggcctggttccagcagaagcctggcaaggctcctaagctgctgatctactgggccagcaccagagaaagcggcgtgccaagcagattttctggcagcggctctggcaccgacttcaccctgacaatatccagcctccagcctgaggacttcgccacctacttttgccaccagtacctgagcagctacacattcggacagggcaccaaggtggaaatcaagcggctcgaggacctgaagaacgtgttcccacctgaggtggccgtgttcgagcctagcgaggccgagatcagccacacccagaaagccaccctcgtgtgcctggctaccggcttctaccccgaccatgtggaactgtcttggtgggtcaacggcaaagaggtgcacagcggcgtgtctaccgacccccagccactgaaagaacagcccgccctgaacgacagccggtactgcctgagcagcagactgagagtgtccgccaccttctggcagaacccccggaaccacttcagatgccaggtgcagttctacggcctgagcgagaacgacgagtggacccaggacagagccaagcccgtgacccagatcgtgtctgccgaagcctggggcagagccgattgcggctttaccagcgagagctaccagcagggcgtgctgagcgccaccatcctgtacgagatcctgctgggcaaggccaccctgtacgccgtgctggtgtctgccctggtgctgatggctatggtcaagcggaaggacagccggggaagggccaagcgatctggatctggagcaacaaacttctcactactcaaacaagcaggtgacgtggaggagaatcccgggcctactagaggccatatgaccgagtacaagcccacggtgcgcctcgccacccgcgacgacgtccccagggccgtacgcaccctcgccgccgcgttcgccgactaccccgccacgcgccacaccgtcgatccggaccgccacatcgagcgggtcaccgagctgcaagaactcttcctcacgcgcgtcgggctcgacatcggcaaggtgtgggtcgcggacgacggcgccgcggtggcggtctggaccacgccggagagcgtcgaagcgggggcggtgttcgccgagatcggcccgcgcatggccgagttgagcggttcccggctggccgcgcagcaacagatggaaggcctcctggcgccgcaccggcccaaggagcccgcgtggttcctggccaccgtcggcgtctcgcccgaccaccagggcaagggtctgggcagcgccgtcgtgctccccggagtggaggcggccgagcgcgccggggtgcccgccttcctggagacctccgcgccccgcaacctccccttctacgagcggctcggcttcaccgtcaccgccgacgtcgaggtgcccgaaggaccgcgcacctggtgcatgacccgcaagcccggtgcctga

SEQ ID NO: 10486 - DNA, 2175 bp, Artificial Sequence
  Synthetic Polynucloetide
atggccttaccagtgaccgccttgctcctgccgctggccttgctgctccacgccgccaggccggaggtgcagctggttgaatctggcggaggactggttcagcctggcggatctctgagactgtcttgtgccgccagcggctacaccttcaccacctattggatgcactgggtccgacaggcccctggcaaaggacttgagtgggtcggatatatcaggcccagcaccggctacacagagtacaaccagaagttcaaggaccgcttcaccatcagcgccgacaccagcaagaataccgcctacctccagatgaacagcctgagagccgaggacaccgccgtgtactactgtgccagatccagatggctgctggactattggggccagggcacactggttacagtttctggcggaggcggaagtggaggcggaggatctggcggcggaggctctgacattcagatgacacagagccctagcagcctgagcgcctctgtgggagacagagtgaccatcacatgcaagagcagccagagcctgctgtactccagcaatcagaagaactacctggcctggttccagcagaagcctggcaaggctcctaagctgctgatctactgggccagcaccagagaaagcggcgtgccaagcagattttctggcagcggctctggcaccgacttcaccctgacaatatccagcctccagcctgaggacttcgccacctacttttgccaccagtacctgagcagctacacattcggacagggcaccaaggtggaaatcaagcggacgcgtgagcagaaactgatctcggaagaggatctggggagcggcaccccattcccttctctggcccctcccatcatgctgctggtggacggcaagcagcagatggtggtcgtgtgcctggtgctggatgtggccccacctggactggacagccccatctggtttagcgccggcaatggctctgccctggacgcctttacctacggcccaagccctgccaccgatggcacctggacaaatctggcccacctgagcctgcccagcgaggaactggcttcttgggagcctctcgtgtgccacacaggacctggcgctgagggacacagcagatccacccagcctatgcacctgtctggcgaggccagcaccgccagaacctgtcctcaggaacctctgagaggcacccctggcggagcactgtggctgggagtgctgagactgctgctgttcaagctgctgctgtttgacctgctgctgacctgctcctgtctgtgcgatcctgccggccctctgccttctcctgccaccaccacaagactgagagccctgggcagccacagactgcaccctgccacagagacaggcggcagagaggccacaagcagccctagaccccagcccagagacagaagatggggcgataccccccctggcagaaagcctggatctccagtccgcgccaagagaagcggatctggcgtgaagcagaccctgaatttcgacctgctgaagctggctggcgacgtggaatccaacccaggcccttctagatctagaggccatatgaccgagtacaagcccacggtgcgcctcgccacccgcgacgacgtccccagggccgtacgcaccctcgccgccgcgttcgccgactaccccgccacgcgccacaccgtcgatccggaccgccacatcgagcgggtcaccgagctgcaagaactcttcctcacgcgcgtcgggctcgacatcggcaaggtgtgggtcgcggacgacggcgccgcggtggcggtctggaccacgccggagagcgtcgaagcgggggcggtgttcgccgagatcggcccgcgcatggccgagttgagcggttcccggctggccgcgcagcaacagatggaaggcctcctggcgccgcaccggcccaaggagcccgcgtggttcctggccaccgtcggcgtctcgcccgaccaccagggcaagggtctgggcagcgccgtcgtgctccccggagtggaggcggccgagcgcgccggggtgcccgccttcctggagacctccgcgccccgcaacctccccttctacgagcggctcggcttcaccgtcaccgccgacgtcgaggtgcccgaaggaccgcgcacctggtgcatgacccgcaagcccggtgcctga

SEQ ID NO: 10487 - DNA, 1641 bp, Artificial Sequence
  Synthetic Polynucloetide
atggccttaccagtgaccgccttgctcctgccgctggccttgctgctccacgccgccaggccggaggtgcagctggttgaatctggcggaggactggttcagcctggcggatctctgagactgtcttgtgccgccagcggctacaccttcaccacctattggatgcactgggtccgacaggcccctggcaaaggacttgagtgggtcggatatatcaggcccagcaccggctacacagagtacaaccagaagttcaaggaccgcttcaccatcagcgccgacaccagcaagaataccgcctacctccagatgaacagcctgagagccgaggacaccgccgtgtactactgtgccagatccagatggctgctggactattggggccagggcacactggttacagtttctctcgaggacctgaagaacgtgttcccacctgaggtggccgtgttcgagcctagcgaggccgagatcagccacacccagaaagccaccctcgtgtgcctggctaccggcttctaccccgaccatgtggaactgtcttggtgggtcaacggcaaagaggtgcacagcggcgtgtctaccgacccccagccactgaaagaacagcccgccctgaacgacagccggtactgcctgagcagcagactgagagtgtccgccaccttctggcagaacccccggaaccacttcagatgccaggtgcagttctacggcctgagcgagaacgacgagtggacccaggacagagccaagcccgtgacccagatcgtgtctgccgaagcctggggcagagccgattgcggctttaccagcgagagctaccagcagggcgtgctgagcgccaccatcctgtacgagatcctgctgggcaaggccaccctgtacgccgtgctggtgtctgccctggtgctgatggctatggtcaagcggaaggacagccggggaagggccaagcgatctggatctggagcaacaaacttctcactactcaaacaagcaggtgacgtggaggagaatcccgggcctactagaggccatatgaccgagtacaagcccacggtgcgcctcgccacccgcgacgacgtccccagggccgtacgcaccctcgccgccgcgttcgccgactaccccgccacgcgccacaccgtcgatccggaccgccacatcgagcgggtcaccgagctgcaagaactcttcctcacgcgcgtcgggctcgacatcggcaaggtgtgggtcgcggacgacggcgccgcggtggcggtctggaccacgccggagagcgtcgaagcgggggcggtgttcgccgagatcggcccgcgcatggccgagttgagcggttcccggctggccgcgcagcaacagatggaaggcctcctggcgccgcaccggcccaaggagcccgcgtggttcctggccaccgtcggcgtctcgcccgaccaccagggcaagggtctgggcagcgccgtcgtgctccccggagtggaggcggccgagcgcgccggggtgcccgccttcctggagacctccgcgccccgcaacctccccttctacgagcggctcggcttcaccgtcaccgccgacgtcgaggtgcccgaaggaccgcgcacctggtgcatgacccgcaagcccggtgcctga

SEQ ID NO: 10488 - DNA, 948 bp, Artificial Sequence
  Synthetic Polynucloetide
atggccttaccagtgaccgccttgctcctgccgctggccttgctgctccacgccgccaggccggaggtgcagctggttgaatctggcggaggactggttcagcctggcggatctctgagactgtcttgtgccgccagcggctacaccttcaccacctattggatgcactgggtccgacaggcccctggcaaaggacttgagtgggtcggatatatcaggcccagcaccggctacacagagtacaaccagaagttcaaggaccgcttcaccatcagcgccgacaccagcaagaataccgcctacctccagatgaacagcctgagagccgaggacaccgccgtgtactactgtgccagatccagatggctgctggactattggggccagggcacactggttacagtttctctcgaggacctgaagaacgtgttcccacctgaggtggccgtgttcgagcctagcgaggccgagatcagccacacccagaaagccaccctcgtgtgcctggctaccggcttctaccccgaccatgtggaactgtcttggtgggtcaacggcaaagaggtgcacagcggcgtgtctaccgacccccagccactgaaagaacagcccgccctgaacgacagccggtactgcctgagcagcagactgagagtgtccgccaccttctggcagaacccccggaaccacttcagatgccaggtgcagttctacggcctgagcgagaacgacgagtggacccaggacagagccaagcccgtgacccagatcgtgtctgccgaagcctggggcagagccgattgcggctttaccagcgagagctaccagcagggcgtgctgagcgccaccatcctgtacgagatcctgctgggcaaggccaccctgtacgccgtgctggtgtctgccctggtgctgatggctatggtcaagcggaaggacagccgggga

SEQ ID NO: 10489 - DNA, 1329 bp, Artificial Sequence
  Synthetic Polynucloetide
atggactggatttggcgcatccttttccttgtcggcgctgctaccggcgcgcattccttcgaagacattcagatgacacagagccctagcagcctgagcgcctctgtgggagacagagtgaccatcacatgcaagagcagccagagcctgctgtactccagcaatcagaagaactacctggcctggttccagcagaagcctggcaaggctcctaagctgctgatctactgggccagcaccagagaaagcggcgtgccaagcagattttctggcagcggctctggcaccgacttcaccctgacaatatccagcctccagcctgaggacttcgccacctacttttgccaccagtacctgagcagctacacattcggacagggcaccaaggtggaaatcaagcggacgcgtatccagaaccctgatcctgccgtgtaccagctgcgggatagcaagagcagcgacaagagcgtgtgtctgttcaccgacttcgacagccagaccaacgtgtcccagagcaaggactccgacgtgtacatcaccgataagaccgtgctggacatgcggagcatggacttcaagagcaactccgccgtggcctggtccaacaagtccgatttcgcctgcgccaacgccttcaacaacagcattatccccgaggacacattcttcccaagccccgagagcagctgcgacgtgaagctggtggaaaagagcttcgagacagacaccaacctgaacttccagaacctgagcgtgatcggcttcagaatcctgctgctgaaagtggccggctttaacctgctgatgaccctgcggctgtggtccagccgcgccaagagaagcggatctggcgtgaagcagaccctgaatttcgacctgctgaagctggctggcgacgtggaatccaacccaggcccttctagaggccatatggccaagcctttgtctcaagaagaatccaccctcattgaaagagcaacggctacaatcaacagcatccccatctctgaagactacagcgtcgccagcgcagctctctctagcgacggccgcatcttcactggtgtcaatgtatatcattttactgggggaccttgtgcagaactcgtggtgctgggcactgctgctgctgcggcagctggcaacctgacttgtatcgtcgcgatcggaaatgagaacaggggcatcttgagcccctgcggacggtgccgacaggtgcttctcgatctgcatcctgggatcaaagccatagtgaaggacagtgatggacagccgacggcagttgggattcgtgaattgctgccctctggttatgtgtgggagggctga

SEQ ID NO: 10490 - DNA, 828 bp, Artificial Sequence
  Synthetic Polynucloetide
atggactggatttggcgcatccttttccttgtcggcgctgctaccggcgcgcattccttcgaagacattcagatgacacagagccctagcagcctgagcgcctctgtgggagacagagtgaccatcacatgcaagagcagccagagcctgctgtactccagcaatcagaagaactacctggcctggttccagcagaagcctggcaaggctcctaagctgctgatctactgggccagcaccagagaaagcggcgtgccaagcagattttctggcagcggctctggcaccgacttcaccctgacaatatccagcctccagcctgaggacttcgccacctacttttgccaccagtacctgagcagctacacattcggacagggcaccaaggtggaaatcaagcggacgcgtatccagaaccctgatcctgccgtgtaccagctgcgggatagcaagagcagcgacaagagcgtgtgtctgttcaccgacttcgacagccagaccaacgtgtcccagagcaaggactccgacgtgtacatcaccgataagaccgtgctggacatgcggagcatggacttcaagagcaactccgccgtggcctggtccaacaagtccgatttcgcctgcgccaacgccttcaacaacagcattatccccgaggacacattcttcccaagccccgagagcagctgcgacgtgaagctggtggaaaagagcttcgagacagacaccaacctgaacttccagaacctgagcgtgatcggcttcagaatcctgctgctgaaagtggccggctttaacctgctgatgaccctgcggctgtggtccagc

SEQ ID NO: 10491 - DNA, 1695 bp, Artificial Sequence
  Synthetic Polynucloetide
atggccttaccagtgaccgccttgctcctgccgctggccttgctgctccacgccgccaggccggaggtgcagctggttgaatctggcggaggactggttcagcctggcggatctctgagactgtcttgtgccgccagcggctacaccttcaccacctattggatgcactgggtccgacaggcccctggcaaaggacttgagtgggtcggatatatcaggcccagcaccggctacacagagtacaaccagaagttcaaggaccgcttcaccatcagcgccgacaccagcaagaataccgcctacctccagatgaacagcctgagagccgaggacaccgccgtgtactactgtgccagatccagatggctgctggactattggggccagggcacactggttacagtttctctcgaggggaaaccaattcccaaccctcttctgggactggattcaaccggcagcggcgaggacctgaagaacgtgttcccacctgaggtggccgtgttcgagcctagcgaggccgagatcagccacacccagaaagccaccctcgtgtgcctggctaccggcttctaccccgaccatgtggaactgtcttggtgggtcaacggcaaagaggtgcacagcggcgtgtgtaccgacccccagccactgaaagaacagcccgccctgaacgacagccggtactgcctgagcagcagactgagagtgtccgccaccttctggcagaacccccggaaccacttcagatgccaggtgcagttctacggcctgagcgagaacgacgagtggacccaggacagagccaagcccgtgacccagatcgtgtctgccgaagcctggggcagagccgattgcggctttaccagcgagagctaccagcagggcgtgctgagcgccaccatcctgtacgagatcctgctgggcaaggccaccctgtacgccgtgctggtgtctgccctggtgctgatggctatggtcaagcggaaggacagccggggaagggccaagcgatctggatctggagcaacaaacttctcactactcaaacaagcaggtgacgtggaggagaatcccgggcctactagaggccatatgaccgagtacaagcccacggtgcgcctcgccacccgcgacgacgtccccagggccgtacgcaccctcgccgccgcgttcgccgactaccccgccacgcgccacaccgtcgatccggaccgccacatcgagcgggtcaccgagctgcaagaactcttcctcacgcgcgtcgggctcgacatcggcaaggtgtgggtcgcggacgacggcgccgcggtggcggtctggaccacgccggagagcgtcgaagcgggggcggtgttcgccgagatcggcccgcgcatggccgagttgagcggttcccggctggccgcgcagcaacagatggaaggcctcctggcgccgcaccggcccaaggagcccgcgtggttcctggccaccgtcggcgtctcgcccgaccaccagggcaagggtctgggcagcgccgtcgtgctccccggagtggaggcggccgagcgcgccggggtgcccgccttcctggagacctccgcgccccgcaacctccccttctacgagcggctcggcttcaccgtcaccgccgacgtcgaggtgcccgaaggaccgcgcacctggtgcatgacccgcaagcccggtgcctga

SEQ ID NO: 10492 - DNA, 1005 bp, Artificial Sequence
  Synthetic Polynucloetide
atggccttaccagtgaccgccttgctcctgccgctggccttgctgctccacgccgccaggccggaggtgcagctggttgaatctggcggaggactggttcagcctggcggatctctgagactgtcttgtgccgccagcggctacaccttcaccacctattggatgcactgggtccgacaggcccctggcaaaggacttgagtgggtcggatatatcaggcccagcaccggctacacagagtacaaccagaagttcaaggaccgcttcaccatcagcgccgacaccagcaagaataccgcctacctccagatgaacagcctgagagccgaggacaccgccgtgtactactgtgccagatccagatggctgctggactattggggccagggcacactggttacagtttctctcgaggggaaaccaattcccaaccctcttctgggactggattcaaccggcagcggcgaggacctgaagaacgtgttcccacctgaggtggccgtgttcgagcctagcgaggccgagatcagccacacccagaaagccaccctcgtgtgcctggctaccggcttctaccccgaccatgtggaactgtcttggtgggtcaacggcaaagaggtgcacagcggcgtgtgtaccgacccccagccactgaaagaacagcccgccctgaacgacagccggtactgcctgagcagcagactgagagtgtccgccaccttctggcagaacccccggaaccacttcagatgccaggtgcagttctacggcctgagcgagaacgacgagtggacccaggacagagccaagcccgtgacccagatcgtgtctgccgaagcctggggcagagccgattgcggctttaccagcgagagctaccagcagggcgtgctgagcgccaccatcctgtacgagatcctgctgggcaaggccaccctgtacgccgtgctggtgtctgccctggtgctgatggctatggtcaagcggaaggacagccggggatga

SEQ ID NO: 10493 - DNA, 1365 bp, Artificial Sequence
  Synthetic Polynucloetide
atggactggatttggcgcatccttttccttgtcggcgctgctaccggcgcgcattccttcgaagacattcagatgacacagagccctagcagcctgagcgcctctgtgggagacagagtgaccatcacatgcaagagcagccagagcctgctgtactccagcaatcagaagaactacctggcctggttccagcagaagcctggcaaggctcctaagctgctgatctactgggccagcaccagagaaagcggcgtgccaagcagattttctggcagcggctctggcaccgacttcaccctgacaatatccagcctccagcctgaggacttcgccacctacttttgccaccagtacctgagcagctacacattcggacagggcaccaaggtggaaatcaagcggacgcgtgagcagaaactgatctcggaagaggatgggagcggcatccagaaccctgatcctgccgtgtaccagctgcgggatagcaagagcagcgacaagagcgtgtgtctgttcaccgacttcgacagccagaccaacgtgtcccagagcaaggactccgacgtgtacatcaccgataagtgcgtgctggacatgcggagcatggacttcaagagcaactccgccgtggcctggtccaacaagtccgatttcgcctgcgccaacgccttcaacaacagcattatccccgaggacacattcttcccaagccccgagagcagctgcgacgtgaagctggtggaaaagagcttcgagacagacaccaacctgaacttccagaacctgagcgtgatcggcttcagaatcctgctgctgaaagtggccggctttaacctgctgatgaccctgcggctgtggtccagccgcgccaagagaagcggatctggcgtgaagcagaccctgaatttcgacctgctgaagctggctggcgacgtggaatccaacccaggcccttctagaggccatatggccaagcctttgtctcaagaagaatccaccctcattgaaagagcaacggctacaatcaacagcatccccatctctgaagactacagcgtcgccagcgcagctctctctagcgacggccgcatcttcactggtgtcaatgtatatcattttactgggggaccttgtgcagaactcgtggtgctgggcactgctgctgctgcggcagctggcaacctgacttgtatcgtcgcgatcggaaatgagaacaggggcatcttgagcccctgcggacggtgccgacaggtgcttctcgatctgcatcctgggatcaaagccatagtgaaggacagtgatggacagccgacggcagttgggattcgtgaattgctgccctctggttatgtgtgggagggctga

SEQ ID NO: 10494 - DNA, 867 bp, Artificial Sequence
  Synthetic Polynucloetide
atggactggatttggcgcatccttttccttgtcggcgctgctaccggcgcgcattccttcgaagacattcagatgacacagagccctagcagcctgagcgcctctgtgggagacagagtgaccatcacatgcaagagcagccagagcctgctgtactccagcaatcagaagaactacctggcctggttccagcagaagcctggcaaggctcctaagctgctgatctactgggccagcaccagagaaagcggcgtgccaagcagattttctggcagcggctctggcaccgacttcaccctgacaatatccagcctccagcctgaggacttcgccacctacttttgccaccagtacctgagcagctacacattcggacagggcaccaaggtggaaatcaagcggacgcgtgagcagaaactgatctcggaagaggatgggagcggcatccagaaccctgatcctgccgtgtaccagctgcgggatagcaagagcagcgacaagagcgtgtgtctgttcaccgacttcgacagccagaccaacgtgtcccagagcaaggactccgacgtgtacatcaccgataagtgcgtgctggacatgcggagcatggacttcaagagcaactccgccgtggcctggtccaacaagtccgatttcgcctgcgccaacgccttcaacaacagcattatccccgaggacacattcttcccaagccccgagagcagctgcgacgtgaagctggtggaaaagagcttcgagacagacaccaacctgaacttccagaacctgagcgtgatcggcttcagaatcctgctgctgaaagtggccggctttaacctgctgatgaccctgcggctgtggtccagctga

SEQ ID NO: 10495 - DNA, 1929 bp, Artificial Sequence
  Synthetic Polynucloetide
atggccttaccagtgaccgccttgctcctgccgctggccttgctgctccacgccgccaggccggaggtgcagctggttgaatctggcggaggactggttcagcctggcggatctctgagactgtcttgtgccgccagcggctacaccttcaccacctattggatgcactgggtccgacaggcccctggcaaaggacttgagtgggtcggatatatcaggcccagcaccggctacacagagtacaaccagaagttcaaggaccgcttcaccatcagcgccgacaccagcaagaataccgcctacctccagatgaacagcctgagagccgaggacaccgccgtgtactactgtgccagatccagatggctgctggactattggggccagggcacactggttacagtttctggcggaggcggaagtggaggcggaggatctggcggcggaggctctgacattcagatgacacagagccctagcagcctgagcgcctctgtgggagacagagtgaccatcacatgcaagagcagccagagcctgctgtactccagcaatcagaagaactacctggcctggttccagcagaagcctggcaaggctcctaagctgctgatctactgggccagcaccagagaaagcggcgtgccaagcagattttctggcagcggctctggcaccgacttcaccctgacaatatccagcctccagcctgaggacttcgccacctacttttgccaccagtacctgagcagctacacattcggacagggcaccaaggtggaaatcaagcggacgcgtgggagcggcatccagaaccctgatcctgccgtgtaccagctgcgggatagcaagagcagcgacaagagcgtgtgtctgttcaccgacttcgacagccagaccaacgtgtcccagagcaaggactccgacgtgtacatcaccgataagaccgtgctggacatgcggagcatggacttcaagagcaactccgccgtggcctggtccaacaagtccgatttcgcctgcgccaacgccttcaacaacagcattatccccgaggacacattcttcccaagcagcgacgtgccctgcgacgtgaagctggtggaaaagagcttcgagacagacaccaacctgaacttccagaacctgagcgtgatcggcttcagaatcctgctgctgaaagtggccggctttaacctgctgatgaccctgcggctgtggtccagccgcgccaagagaagcggatctggcgtgaagcagaccctgaatttcgacctgctgaagctggctggcgacgtggaatccaacccaggcccttctagaggccatatgaccgagtacaagcccacggtgcgcctcgccacccgcgacgacgtccccagggccgtacgcaccctcgccgccgcgttcgccgactaccccgccacgcgccacaccgtcgatccggaccgccacatcgagcgggtcaccgagctgcaagaactcttcctcacgcgcgtcgggctcgacatcggcaaggtgtgggtcgcggacgacggcgccgcggtggcggtctggaccacgccggagagcgtcgaagcgggggcggtgttcgccgagatcggcccgcgcatggccgagttgagcggttcccggctggccgcgcagcaacagatggaaggcctcctggcgccgcaccggcccaaggagcccgcgtggttcctggccaccgtcggcgtctcgcccgaccaccagggcaagggtctgggcagcgccgtcgtgctccccggagtggaggcggccgagcgcgccggggtgcccgccttcctggagacctccgcgccccgcaacctccccttctacgagcggctcggcttcaccgtcaccgccgacgtcgaggtgcccgaaggaccgcgcacctggtgcatgacccgcaagcccggtgcctga

SEQ ID NO: 10496 - DNA, 2025 bp, Artificial Sequence
  Synthetic Polynucloetide
atggccttaccagtgaccgccttgctcctgccgctggccttgctgctccacgccgccaggccggaggtgcagctggttgaatctggcggaggactggttcagcctggcggatctctgagactgtcttgtgccgccagcggctacaccttcaccacctattggatgcactgggtccgacaggcccctggcaaaggacttgagtgggtcggatatatcaggcccagcaccggctacacagagtacaaccagaagttcaaggaccgcttcaccatcagcgccgacaccagcaagaataccgcctacctccagatgaacagcctgagagccgaggacaccgccgtgtactactgtgccagatccagatggctgctggactattggggccagggcacactggttacagtttctggcggaggcggaagtggaggcggaggatctggcggcggaggctctgacattcagatgacacagagccctagcagcctgagcgcctctgtgggagacagagtgaccatcacatgcaagagcagccagagcctgctgtactccagcaatcagaagaactacctggcctggttccagcagaagcctggcaaggctcctaagctgctgatctactgggccagcaccagagaaagcggcgtgccaagcagattttctggcagcggctctggcaccgacttcaccctgacaatatccagcctccagcctgaggacttcgccacctacttttgccaccagtacctgagcagctacacattcggacagggcaccaaggtggaaatcaagcggctcgaggacctgaagaacgtgttcccacctgaggtggccgtgttcgagcctagcaaggccgagatcgcccacacccagaaagccaccctcgtgtgcctggctaccggcttctaccccgaccatgtggaactgtcttggtgggtcaacggcaaagaggtgcacagcggcgtgtctaccgacccccagccactgaaagaacagcccgccctgaacgacagccggtactgcctgagcagcagactgagagtgtccgccaccttctggcagaacccccggaaccacttcagatgccaggtgcagttctacggcctgagcgagaacgacgagtggacccaggacagagccaagcccgtgacccagatcgtgtctgccgaagcctggggcagagccgattgcggcatcaccagcgccagctaccaccagggcgtgctgagcgccaccatcctgtacgagatcctgctgggcaaggccaccctgtacgccgtgctggtgtctgccctggtgctgatggctatggtcaagcggaaggacagccggggaagggccaagcgatctggatctggagcaacaaacttctcactactcaaacaagcaggtgacgtggaggagaatcccgggcctactagaggccatatgaccgagtacaagcccacggtgcgcctcgccacccgcgacgacgtccccagggccgtacgcaccctcgccgccgcgttcgccgactaccccgccacgcgccacaccgtcgatccggaccgccacatcgagcgggtcaccgagctgcaagaactcttcctcacgcgcgtcgggctcgacatcggcaaggtgtgggtcgcggacgacggcgccgcggtggcggtctggaccacgccggagagcgtcgaagcgggggcggtgttcgccgagatcggcccgcgcatggccgagttgagcggttcccggctggccgcgcagcaacagatggaaggcctcctggcgccgcaccggcccaaggagcccgcgtggttcctggccaccgtcggcgtctcgcccgaccaccagggcaagggtctgggcagcgccgtcgtgctccccggagtggaggcggccgagcgcgccggggtgcccgccttcctggagacctccgcgccccgcaacctccccttctacgagcggctcggcttcaccgtcaccgccgacgtcgaggtgcccgaaggaccgcgcacctggtgcatgacccgcaagcccggtgcctga

SEQ ID NO: 10497 - DNA, 2094 bp, Artificial Sequence
  Synthetic Polynucloetide
atggccttaccagtgaccgccttgctcctgccgctggccttgctgctccacgccgccaggccggaggtgcagctggttgaatctggcggaggactggttcagcctggcggatctctgagactgtcttgtgccgccagcggctacaccttcaccacctattggatgcactgggtccgacaggcccctggcaaaggacttgagtgggtcggatatatcaggcccagcaccggctacacagagtacaaccagaagttcaaggaccgcttcaccatcagcgccgacaccagcaagaataccgcctacctccagatgaacagcctgagagccgaggacaccgccgtgtactactgtgccagatccagatggctgctggactattggggccagggcacactggttacagtttctggcggaggcggaagtggaggcggaggatctggcggcggaggctctgacattcagatgacacagagccctagcagcctgagcgcctctgtgggagacagagtgaccatcacatgcaagagcagccagagcctgctgtactccagcaatcagaagaactacctggcctggttccagcagaagcctggcaaggctcctaagctgctgatctactgggccagcaccagagaaagcggcgtgccaagcagattttctggcagcggctctggcaccgacttcaccctgacaatatccagcctccagcctgaggacttcgccacctacttttgccaccagtacctgagcagctacacattcggacagggcaccaaggtggaaatcaagcggacgcgtgggtctggaggcggaggcagcggcggaggcgggagcggcgacggtaacgaggagatgggaggaatcactcaaaccccttacaaagtctcaatttcaggaacaactgttatccttacatgtccccagtatcctggcagcgagatcctttggcagcataacgacaagaatatagggggagatgaagacgataagaatatcggatctgacgaggatcacttgagcctgaaagagttctccgagcttgaacaaagcggatattatgtgtgctatccgcgcgggtcaaagccggaagacgctaacttttacctttatctccgagccagagtgtgcgaaaattgcatggaaatggacgttatgtccgttgctacaatagttatcgtagatatatgcatcacgggtggactgcttctgctggtttattattggtccaagaatagaaaggccaaagctaaacccgtgaccagaggcgctggcgcaggcggaaggcaaaggggacaaaacaaagaacggccaccaccagtgccaaatccagattatgagcctattcggaaaggacagagggacctgtactctggcctgaatcagagaagaatccgcgccaagagaagcggatctggcgtgaagcagaccctgaatttcgacctgctgaagctggctggcgacgtggaatccaacccaggcccttctagaggccatatgaccgagtacaagcccacggtgcgcctcgccacccgcgacgacgtccccagggccgtacgcaccctcgccgccgcgttcgccgactaccccgccacgcgccacaccgtcgatccggaccgccacatcgagcgggtcaccgagctgcaagaactcttcctcacgcgcgtcgggctcgacatcggcaaggtgtgggtcgcggacgacggcgccgcggtggcggtctggaccacgccggagagcgtcgaagcgggggcggtgttcgccgagatcggcccgcgcatggccgagttgagcggttcccggctggccgcgcagcaacagatggaaggcctcctggcgccgcaccggcccaaggagcccgcgtggttcctggccaccgtcggcgtctcgcccgaccaccagggcaagggtctgggcagcgccgtcgtgctccccggagtggaggcggccgagcgcgccggggtgcccgccttcctggagacctccgcgccccgcaacctccccttctacgagcggctcggcttcaccgtcaccgccgacgtcgaggtgcccgaaggaccgcgcacctggtgcatgacccgcaagcccggtgcctga

SEQ ID NO: 10498 - DNA, 1989 bp, Artificial Sequence
  Synthetic Polynucloetide
atggccttaccagtgaccgccttgctcctgccgctggccttgctgctccacgccgccaggccggaggtgcagctggttgaatctggcggaggactggttcagcctggcggatctctgagactgtcttgtgccgccagcggctacaccttcaccacctattggatgcactgggtccgacaggcccctggcaaaggacttgagtgggtcggatatatcaggcccagcaccggctacacagagtacaaccagaagttcaaggaccgcttcaccatcagcgccgacaccagcaagaataccgcctacctccagatgaacagcctgagagccgaggacaccgccgtgtactactgtgccagatccagatggctgctggactattggggccagggcacactggttacagtttctggcggaggcggaagtggaggcggaggatctggcggcggaggctctgacattcagatgacacagagccctagcagcctgagcgcctctgtgggagacagagtgaccatcacatgcaagagcagccagagcctgctgtactccagcaatcagaagaactacctggcctggttccagcagaagcctggcaaggctcctaagctgctgatctactgggccagcaccagagaaagcggcgtgccaagcagattttctggcagcggctctggcaccgacttcaccctgacaatatccagcctccagcctgaggacttcgccacctacttttgccaccagtacctgagcagctacacattcggacagggcaccaaggtggaaatcaagcggacgcgtgggtctggaggcggaggcagcggcggaggcgggagcggcttcaagatccccatcgaggaactggaagatcgggtgttcgtgaactgcaacacctctatcacctgggtggaaggcaccgtgggaacactgctgagcgacatcaccagactggacctcggcaagcggattctggaccctcggggcatctacagatgcaacggcaccgacatctacaaggacaaagaaagcaccgtgcaggtccactacagaatgtgccagtcctgcgtggaactggaccctgctacagtggccggcatcatcgtgaccgatgtgatcgctactctgctgctggctctgggagtgttctgcttcgccggacacgaaacaggcagactgtctggcgctgccgatacacaggccctgctgagaaacgaccaagtgtatcagcccctgcgcgacagagatgatgcccagtattctcacctcggcggcaactgggctagaaacaagcgcgccaagagaagcggatctggcgtgaagcagaccctgaatttcgacctgctgaagctggctggcgacgtggaatccaacccaggcccttctagaggccatatgaccgagtacaagcccacggtgcgcctcgccacccgcgacgacgtccccagggccgtacgcaccctcgccgccgcgttcgccgactaccccgccacgcgccacaccgtcgatccggaccgccacatcgagcgggtcaccgagctgcaagaactcttcctcacgcgcgtcgggctcgacatcggcaaggtgtgggtcgcggacgacggcgccgcggtggcggtctggaccacgccggagagcgtcgaagcgggggcggtgttcgccgagatcggcccgcgcatggccgagttgagcggttcccggctggccgcgcagcaacagatggaaggcctcctggcgccgcaccggcccaaggagcccgcgtggttcctggccaccgtcggcgtctcgcccgaccaccagggcaagggtctgggcagcgccgtcgtgctccccggagtggaggcggccgagcgcgccggggtgcccgccttcctggagacctccgcgccccgcaacctccccttctacgagcggctcggcttcaccgtcaccgccgacgtcgaggtgcccgaaggaccgcgcacctggtgcatgacccgcaagcccggtgcctga

SEQ ID NO: 10499 - DNA, 2019 bp, Artificial Sequence
  Synthetic Polynucloetide
atggccttaccagtgaccgccttgctcctgccgctggccttgctgctccacgccgccaggccggaggtgcagctggttgaatctggcggaggactggttcagcctggcggatctctgagactgtcttgtgccgccagcggctacaccttcaccacctattggatgcactgggtccgacaggcccctggcaaaggacttgagtgggtcggatatatcaggcccagcaccggctacacagagtacaaccagaagttcaaggaccgcttcaccatcagcgccgacaccagcaagaataccgcctacctccagatgaacagcctgagagccgaggacaccgccgtgtactactgtgccagatccagatggctgctggactattggggccagggcacactggttacagtttctggcggaggcggaagtggaggcggaggatctggcggcggaggctctgacattcagatgacacagagccctagcagcctgagcgcctctgtgggagacagagtgaccatcacatgcaagagcagccagagcctgctgtactccagcaatcagaagaactacctggcctggttccagcagaagcctggcaaggctcctaagctgctgatctactgggccagcaccagagaaagcggcgtgccaagcagattttctggcagcggctctggcaccgacttcaccctgacaatatccagcctccagcctgaggacttcgccacctacttttgccaccagtacctgagcagctacacattcggacagggcaccaaggtggaaatcaagcggacgcgtgggtctggaggcggaggcagcggcggaggcgggagcggccagagcatcaagggcaaccacctggtcaaggtgtacgactaccaagaggacggcagcgtgctgctgacatgtgatgccgaggccaagaacatcacctggtttaaggacggcaagatgatcggcttcctgaccgaggacaagaagaagtggaacctgggcagcaacgctaaggaccccagaggcatgtatcagtgcaagggcagccagaacaagagcaagcccctccaggtgtactaccggatgtgccagaactgcatcgagctgaacgccgctaccatcagcggctttctgttcgccgagatcgtgtccatcttcgtgctggccgtgggcgtgtactttatcgctggacaggatggcgtgcggcagagcagagcttccgataagcaaaccctgctgcctaacgaccagctgtaccagcctctgaaggacagagaggacgaccagtacagccacctccagggcaatcagctgagaagaaaccgcgccaagagaagcggatctggcgtgaagcagaccctgaatttcgacctgctgaagctggctggcgacgtggaatccaacccaggcccttctagaggccatatgaccgagtacaagcccacggtgcgcctcgccacccgcgacgacgtccccagggccgtacgcaccctcgccgccgcgttcgccgactaccccgccacgcgccacaccgtcgatccggaccgccacatcgagcgggtcaccgagctgcaagaactcttcctcacgcgcgtcgggctcgacatcggcaaggtgtgggtcgcggacgacggcgccgcggtggcggtctggaccacgccggagagcgtcgaagcgggggcggtgttcgccgagatcggcccgcgcatggccgagttgagcggttcccggctggccgcgcagcaacagatggaaggcctcctggcgccgcaccggcccaaggagcccgcgtggttcctggccaccgtcggcgtctcgcccgaccaccagggcaagggtctgggcagcgccgtcgtgctccccggagtggaggcggccgagcgcgccggggtgcccgccttcctggagacctccgcgccccgcaacctccccttctacgagcggctcggcttcaccgtcaccgccgacgtcgaggtgcccgaaggaccgcgcacctggtgcatgacccgcaagcccggtgcctga

SEQ ID NO: 10500 - DNA, 1968 bp, Artificial Sequence
  Synthetic Polynucloetide
atggccttaccagtgaccgccttgctcctgccgctggccttgctgctccacgccgccaggccggaggtgcagctggttgaatctggcggaggactggttcagcctggcggatctctgagactgtcttgtgccgccagcggctacaccttcaccacctattggatgcactgggtccgacaggcccctggcaaaggacttgagtgggtcggatatatcaggcccagcaccggctacacagagtacaaccagaagttcaaggaccgcttcaccatcagcgccgacaccagcaagaataccgcctacctccagatgaacagcctgagagccgaggacaccgccgtgtactactgtgccagatccagatggctgctggactattggggccagggcacactggttacagtttctggcggaggcggaagtggaggcggaggatctggcggcggaggctctgacattcagatgacacagagccctagcagcctgagcgcctctgtgggagacagagtgaccatcacatgcaagagcagccagagcctgctgtactccagcaatcagaagaactacctggcctggttccagcagaagcctggcaaggctcctaagctgctgatctactgggccagcaccagagaaagcggcgtgccaagcagattttctggcagcggctctggcaccgacttcaccctgacaatatccagcctccagcctgaggacttcgccacctacttttgccaccagtacctgagcagctacacattcggacagggcaccaaggtggaaatcaagcggacgcgtgggtctggaggcggaggcagcggcggaggcgggagcggccagagttttgggttgttggaccctaaattgtgctatctgttggacggaatcctgttcatttacggagtgatcctgaccgcattgttcctgcgggttaagttttccagatccgcagacgcacccgcttaccaacaagggcagaaccaactctacaatgaacttaatttggggcggagggaagagtacgacgttctggacaaaaggaggggacgagatcccgagatgggcggaaagcctcagcgaaggaagaatccgcaagaggggctttataacgaactccagaaagataaaatggcagaagcctatagtgagattgggatgaagggagaaaggaggaggggtaaaggtcacgatgggttgtaccaaggattgagcacagccactaaagatacctatgatgcgctccacatgcaggccctgccgccaagacgcgccaagagaagcggatctggcgtgaagcagaccctgaatttcgacctgctgaagctggctggcgacgtggaatccaacccaggcccttctagaggccatatgaccgagtacaagcccacggtgcgcctcgccacccgcgacgacgtccccagggccgtacgcaccctcgccgccgcgttcgccgactaccccgccacgcgccacaccgtcgatccggaccgccacatcgagcgggtcaccgagctgcaagaactcttcctcacgcgcgtcgggctcgacatcggcaaggtgtgggtcgcggacgacggcgccgcggtggcggtctggaccacgccggagagcgtcgaagcgggggcggtgttcgccgagatcggcccgcgcatggccgagttgagcggttcccggctggccgcgcagcaacagatggaaggcctcctggcgccgcaccggcccaaggagcccgcgtggttcctggccaccgtcggcgtctcgcccgaccaccagggcaagggtctgggcagcgccgtcgtgctccccggagtggaggcggccgagcgcgccggggtgcccgccttcctggagacctccgcgccccgcaacctccccttctacgagcggctcggcttcaccgtcaccgccgacgtcgaggtgcccgaaggaccgcgcacctggtgcatgacccgcaagcccggtgcctga

SEQ ID NO: 10501 - DNA, 2268 bp, Artificial Sequence
  Synthetic Polynucloetide
atggccttaccagtgaccgccttgctcctgccgctggccttgctgctccacgccgccaggccggaagtgcagctggttgaatctggcggaggactggttcagcctggcggatctctgagactgtcttgtgccgccagcggcttcagcttcagcgacttttggatgagctgggtccgacaggcccctggcaaaggacttgaatgggtcgccacaatcagccaggccggcagcgagaaggactacgtggactctgtgaagggcagattcaccatcagccgggacaacgccaagaagtccctgtacctccagatgaacagcctgagagccgaggacaccgccgtgtactattgtgcctctggcgtgtacagcttcgactacagaggccagggcaccctggtcacagtctcttctggtaccggcggaggcggatctggcggcggaggtagcggtggcggaggatctgaattcgaggtgcagctggttgaatctggcggaggactggttcagcctggcggatctctgagactgtcttgtgccgccagcggctacaccttcaccacctattggatgcactgggtccgacaggcccctggcaaaggacttgagtgggtcggatatatcaggcccagcaccggctacacagagtacaaccagaagttcaaggaccgcttcaccatcagcgccgacaccagcaagaataccgcctacctccagatgaacagcctgagagccgaggacaccgccgtgtactactgtgccagatccagatggctgctggactattggggccagggcacactggttacagtttctctcgaggacctgaagaacgtgttcccacctgaggtggccgtgttcgagcctagcgaggccgagatcagccacacccagaaagccaccctcgtgtgcctggctaccggcttctaccccgaccatgtggaactgtcttggtgggtcaacggcaaagaggtgcacagcggcgtgtgtaccgacccccagccactgaaagaacagcccgccctgaacgacagccggtactgcctgagcagcagactgagagtgtccgccaccttctggcagaacccccggaaccacttcagatgccaggtgcagttctacggcctgagcgagaacgacgagtggacccaggacagagccaagcccgtgacccagatcgtgtctgccgaagcctggggcagagccgattgcggctttaccagcgagagctaccagcagggcgtgctgagcgccaccatcctgtacgagatcctgctgggcaaggccaccctgtacgccgtgctggtgtctgccctggtgctgatggctatggtcaagcggaaggacagccggggaagggccaagcgatctggatctggagcaacaaacttctcactactcaaacaagcaggtgacgtggaggagaatcccgggcctactagtatggactggatttggcgcatccttttccttgtcggcgctgctaccggcgcgcattccttcgaagacattcagatgacacagagccctagcagcctgagcgcctctgtgggagacagagtgaccatcacatgcaagagcagccagagcctgctgtactccagcaatcagaagaactacctggcctggttccagcagaagcctggcaaggctcctaagctgctgatctactgggccagcaccagagaaagcggcgtgccaagcagattttctggcagcggctctggcaccgacttcaccctgacaatatccagcctccagcctgaggacttcgccacctacttttgccaccagtacctgagcagctacacattcggacagggcaccaaggtggaaatcaagcggacgcgtatccagaaccctgatcctgccgtgtaccagctgcgggatagcaagagcagcgacaagagcgtgtgtctgttcaccgacttcgacagccagaccaacgtgtcccagagcaaggactccgacgtgtacatcaccgataagtgcgtgctggacatgcggagcatggacttcaagagcaactccgccgtggcctggtccaacaagtccgatttcgcctgcgccaacgccttcaacaacagcattatccccgaggacacattcttcccaagccccgagagcagctgcgacgtgaagctggtggaaaagagcttcgagacagacaccaacctgaacttccagaacctgagcgtgatcggcttcagaatcctgctgctgaaagtggccggctttaacctgctgatgaccctgcggctgtggtccagc

SEQ ID NO: 10502 - DNA, 2280 bp, Artificial Sequence
  Synthetic Polynucloetide
atggccttaccagtgaccgccttgctcctgccgctggccttgctgctccacgccgccaggccggaagtgcagctggttgaatctggcggaggactggttcagcctggcggatctctgagactgtcttgtgccgccagcggcttcagcttcagcgacttttggatgagctgggtccgacaggcccctggcaaaggacttgaatgggtcgccacaatcagccaggccggcagcgagaaggactacgtggactctgtgaagggcagattcaccatcagccgggacaacgccaagaagtccctgtacctccagatgaacagcctgagagccgaggacaccgccgtgtactattgtgcctctggcgtgtacagcttcgactacagaggccagggcaccctggtcacagtctcttctggtaccggcggaggcggatctggcggcggaggtagcggtggcggaggatctgaattcgaggtgcagctggttgaatctggcggaggactggttcagcctggcggatctctgagactgtcttgtgccgccagcggctacaccttcaccacctattggatgcactgggtccgacaggcccctggcaaaggacttgagtgggtcggatatatcaggcccagcaccggctacacagagtacaaccagaagttcaaggaccgcttcaccatcagcgccgacaccagcaagaataccgcctacctccagatgaacagcctgagagccgaggacaccgccgtgtactactgtgccagatccagatggctgctggactattggggccagggcacactggttacagtttctctcgagatccagaaccctgatcctgccgtgtaccagctgcgggatagcaagagcagcgacaagagcgtgtgtctgttcaccgacttcgacagccagaccaacgtgtcccagagcaaggactccgacgtgtacatcaccgataagtgcgtgctggacatgcggagcatggacttcaagagcaactccgccgtggcctggtccaacaagtccgatttcgcctgcgccaacgccttcaacaacagcattatccccgaggacacattcttcccaagccccgagagcagctgcgacgtgaagctggtggaaaagagcttcgagacagacaccaacctgaacttccagaacctgagcgtgatcggcttcagaatcctgctgctgaaagtggccggctttaacctgctgatgaccctgcggctgtggtccagccgcgccaagagaagcggatctggcgtgaagcagaccctgaatttcgacctgctgaagctggctggcgacgtggaatccaacccaggccctactagtatggactggatttggcgcatccttttccttgtcggcgctgctaccggcgcgcattccttcgaagacattcagatgacacagagccctagcagcctgagcgcctctgtgggagacagagtgaccatcacatgcaagagcagccagagcctgctgtactccagcaatcagaagaactacctggcctggttccagcagaagcctggcaaggctcctaagctgctgatctactgggccagcaccagagaaagcggcgtgccaagcagattttctggcagcggctctggcaccgacttcaccctgacaatatccagcctccagcctgaggacttcgccacctacttttgccaccagtacctgagcagctacacattcggacagggcaccaaggtggaaatcaagcggacgcgtgaggacctgaagaacgtgttcccacctgaggtggccgtgttcgagcctagcgaggccgagatcagccacacccagaaagccaccctcgtgtgcctggctaccggcttctaccccgaccatgtggaactgtcttggtgggtcaacggcaaagaggtgcacagcggcgtgtgtaccgacccccagccactgaaagaacagcccgccctgaacgacagccggtactgcctgagcagcagactgagagtgtccgccaccttctggcagaacccccggaaccacttcagatgccaggtgcagttctacggcctgagcgagaacgacgagtggacccaggacagagccaagcccgtgacccagatcgtgtctgccgaagcctggggcagagccgattgcggctttaccagcgagagctaccagcagggcgtgctgagcgccaccatcctgtacgagatcctgctgggcaaggccaccctgtacgccgtgctggtgtctgccctggtgctgatggctatggtcaagcggaaggacagccgggga

SEQ ID NO: 10503 - DNA, 2856 bp, Artificial Sequence
  Synthetic Polynucloetide
atggccttaccagtgaccgccttgctcctgccgctggccttgctgctccacgccgccaggccggaagtgcagctggttgaatctggcggaggactggttcagcctggcggatctctgagactgtcttgtgccgccagcggcttcagcttcagcgacttttggatgagctgggtccgacaggcccctggcaaaggacttgaatgggtcgccacaatcagccaggccggcagcgagaaggactacgtggactctgtgaagggcagattcaccatcagccgggacaacgccaagaagtccctgtacctccagatgaacagcctgagagccgaggacaccgccgtgtactattgtgcctctggcgtgtacagcttcgactacagaggccagggcaccctggtcacagtctcttctggtaccggcggaggcggatctggcggcggaggtagcggtggcggaggatctgaattcgaggtgcagctggttgaatctggcggaggactggttcagcctggcggatctctgagactgtcttgtgccgccagcggctacaccttcaccacctattggatgcactgggtccgacaggcccctggcaaaggacttgagtgggtcggatatatcaggcccagcaccggctacacagagtacaaccagaagttcaaggaccgcttcaccatcagcgccgacaccagcaagaataccgcctacctccagatgaacagcctgagagccgaggacaccgccgtgtactactgtgccagatccagatggctgctggactattggggccagggcacactggttacagtttctctcgaggacctgaagaacgtgttcccacctgaggtggccgtgttcgagcctagcgaggccgagatcagccacacccagaaagccaccctcgtgtgcctggctaccggcttctaccccgaccatgtggaactgtcttggtgggtcaacggcaaagaggtgcacagcggcgtgtctaccgacccccagccactgaaagaacagcccgccctgaacgacagccggtactgcctgagcagcagactgagagtgtccgccaccttctggcagaacccccggaaccacttcagatgccaggtgcagttctacggcctgagcgagaacgacgagtggacccaggacagagccaagcccgtgacccagatcgtgtctgccgaagcctggggcagagccgattgcggatcccagagcttcggcctgctggaccccaagctgtgctacctgctggatggcatcctgttcatctacggcgtgatcctgaccgccctgttcctgagagtgaagttcagcagaagcgccgacgcccctgcctaccagcagggacagaaccaactgtacaacgagctgaacctgggcagacgggaagagtacgacgtgctggacaagcggagaggcagggaccctgagatgggcggaaagccccagcggagaaagaacccccaggaaggactgtataacgaactccagaaagacaagatggccgaagcctacagcgagatcggcatgaagggcgagcggagaagaggcaagggccacgatggcctgtaccagggcctgagcaccgccaccaaggacacctatgacgccctgcacatgcaggccctgcctccaagaagggccaagcgatctggatctggagcaacaaacttctcactactcaaacaagcaggtgacgtggaggagaatcccgggcctactagtatggactggatttggcgcatccttttccttgtcggcgctgctaccggcgcgcattccttcgaagacattcagatgacacagagccctagcagcctgagcgcctctgtgggagacagagtgaccatcacatgcaagagcagccagagcctgctgtactccagcaatcagaagaactacctggcctggttccagcagaagcctggcaaggctcctaagctgctgatctactgggccagcaccagagaaagcggcgtgccaagcagattttctggcagcggctctggcaccgacttcaccctgacaatatccagcctccagcctgaggacttcgccacctacttttgccaccagtacctgagcagctacacattcggacagggcaccaaggtggaaatcaagcggacgcgtatccagaaccctgatcctgccgtgtaccagctgcgggatagcaagagcagcgacaagagcgtgtgtctgttcaccgacttcgacagccagaccaacgtgtcccagagcaaggactccgacgtgtacatcaccgataagaccgtgctggacatgcggagcatggacttcaagagcaactccgccgtggcctggtccaacaagtccgatttcgcctgcgccaacgccttcaacaacagcattatccccgaggacacattcttcccaagccccgagagcagctgcggtacccagagttttgggttgttggaccctaaattgtgctatctgttggacggaatcctgttcatttacggagtgatcctgaccgcattgttcctgcgggttaagttttccagatccgcagacgcacccgcttaccaacaagggcagaaccaactctacaatgaacttaatttggggcggagggaagagtacgacgttctggacaaaaggaggggacgagatcccgagatgggcggaaagcctcagcgaaggaagaatccgcaagaggggctttataacgaactccagaaagataaaatggcagaagcctatagtgagattgggatgaagggagaaaggaggaggggtaaaggtcacgatgggttgtaccaaggattgagcacagccactaaagatacctatgatgcgctccacatgcaggccctgccgccaaga

SEQ ID NO: 10504 - DNA, 2346 bp, Artificial Sequence
  Synthetic Polynucloetide
atggccttaccagtgaccgccttgctcctgccgctggccttgctgctccacgccgccaggccggaagtgcagctggttgaatctggcggaggactggttcagcctggcggatctctgagactgtcttgtgccgccagcggcttcagcttcagcgacttttggatgagctgggtccgacaggcccctggcaaaggacttgaatgggtcgccacaatcagccaggccggcagcgagaaggactacgtggactctgtgaagggcagattcaccatcagccgggacaacgccaagaagtccctgtacctccagatgaacagcctgagagccgaggacaccgccgtgtactattgtgcctctggcgtgtacagcttcgactacagaggccagggcaccctggtcacagtctcttctggtaccggcggaggcggatctggcggcggaggtagcggtggcggaggatctgaattcgaggtgcagctggttgaatctggcggaggactggttcagcctggcggatctctgagactgtcttgtgccgccagcggctacaccttcaccacctattggatgcactgggtccgacaggcccctggcaaaggacttgagtgggtcggatatatcaggcccagcaccggctacacagagtacaaccagaagttcaaggaccgcttcaccatcagcgccgacaccagcaagaataccgcctacctccagatgaacagcctgagagccgaggacaccgccgtgtactactgtgccagatccagatggctgctggactattggggccagggcacactggttacagtttctctcgagggacagcctaaggccaatcctaccgtgacactgttccctccaagcagcgaagaactccaggccaacaaggccacacttgtgtgcctgatctccgacttctaccctggggctgtgacagtggcttggaaggccgatggatctcctgtgaaagccggcgtggaaaccaccaagccatccaagcagagcaacaacaaatacgccgccagctcctacctgagcctgacacctgagcagtggaagtcccacagatcctacagctgccaagtgacccacgaaggcagcaccgtggaaaagacagtggcccctacagagtgcagccccatcaagaccgatgtgattacaatggaccccaaggacaactgctccaaggacgccaacgataccctgctgctccagctgaccaacaccagcgcctactacatgtacttgttgctgctgctgaagtccgtggtgtacttcgccatcatcacatgctgcctgctgcggagaaccgccttctgctgcaacggcgagaagtctagggccaagcgatctggatctggagcaacaaacttctcactactcaaacaagcaggtgacgtggaggagaatcccgggcctactagtatggactggatttggcgcatccttttccttgtcggcgctgctaccggcgcgcattccttcgaagacattcagatgacacagagccctagcagcctgagcgcctctgtgggagacagagtgaccatcacatgcaagagcagccagagcctgctgtactccagcaatcagaagaactacctggcctggttccagcagaagcctggcaaggctcctaagctgctgatctactgggccagcaccagagaaagcggcgtgccaagcagattttctggcagcggctctggcaccgacttcaccctgacaatatccagcctccagcctgaggacttcgccacctacttttgccaccagtacctgagcagctacacattcggacagggcaccaaggtggaaatcaagcggacgcgtgcctctacaaagggaccctccgtgtttcctctggctcccagcagcaagtctacaagcggaggaacagccgctctgggctgcctggtcaaggattactttcccgagcctgtgaccgtgtcctggaatagcggagcactgacaagcggcgtgcacacctttccagccgtgctgcaaagcagcggcctgtactctctgagcagcgtggtcacagtgcctagctctagcctgggcacccagacctacatctgcaatgtgaaccacaagcctagcaacaccaaggtggacaagagagtggaacccaagagctgtgaagtgaaaaccgactccaccgaccacgtgaagcccaaagagacagagaacaccaagcagcccagcaagagctgccacaagcccaaggccatcgtgcacaccgagaaagtgaacatgatgagcctgaccgtgctgggcctgcggatgctgttcgccaaaaccgtggccgtgaacttcctgctgaccgccaagctgttcttcctc

SEQ ID NO: 10505 - DNA, 2289 bp, Artificial Sequence
  Synthetic Polynucloetide
atggccttaccagtgaccgccttgctcctgccgctggccttgctgctccacgccgccaggccggaagtgcagctggttgaatctggcggaggactggttcagcctggcggatctctgagactgtcttgtgccgccagcggcttcagcttcagcgacttttggatgagctgggtccgacaggcccctggcaaaggacttgaatgggtcgccacaatcagccaggccggcagcgagaaggactacgtggactctgtgaagggcagattcaccatcagccgggacaacgccaagaagtccctgtacctccagatgaacagcctgagagccgaggacaccgccgtgtactattgtgcctctggcgtgtacagcttcgactacagaggccagggcaccctggtcacagtctcttctggtaccggcggaggcggatctggcggcggaggtagcggtggcggaggatctgaattcgaggtgcagctggttgaatctggcggaggactggttcagcctggcggatctctgagactgtcttgtgccgccagcggctacaccttcaccacctattggatgcactgggtccgacaggcccctggcaaaggacttgagtgggtcggatatatcaggcccagcaccggctacacagagtacaaccagaagttcaaggaccgcttcaccatcagcgccgacaccagcaagaataccgcctacctccagatgaacagcctgagagccgaggacaccgccgtgtactactgtgccagatccagatggctgctggactattggggccagggcacactggttacagtttctctcgagggacagcctaaggccaatcctaccgtgacactgttccctccaagcagcgaagaactccaggccaacaaggccacacttgtgtgcctgatctccgacttctaccctggggctgtgacagtggcttggaaggccgatggatctcctgtgaaagccggcgtggaaaccaccaagccatccaagcagagcaacaacaaatacgccgccagctcctacctgagcctgacacctgagcagtggaagtcccacagatcctacagctgccaagtgacccacgaaggcagcaccgtggaaaagacagtggcccctacagagtgcagcggcagagccgattgcggctttaccagcgagagctaccagcagggcgtgctgagcgccaccatcctgtacgagatcctgctgggcaaggccaccctgtacgccgtgctggtgtctgccctggtgctgatggctatggtcaagcggaaggacagccggggacgcgccaagagaagcggatctggcgtgaagcagaccctgaatttcgacctgctgaagctggctggcgacgtggaatccaacccaggccctactagtatggactggatttggcgcatccttttccttgtcggcgctgctaccggcgcgcattccttcgaagacattcagatgacacagagccctagcagcctgagcgcctctgtgggagacagagtgaccatcacatgcaagagcagccagagcctgctgtactccagcaatcagaagaactacctggcctggttccagcagaagcctggcaaggctcctaagctgctgatctactgggccagcaccagagaaagcggcgtgccaagcagattttctggcagcggctctggcaccgacttcaccctgacaatatccagcctccagcctgaggacttcgccacctacttttgccaccagtacctgagcagctacacattcggacagggcaccaaggtggaaatcaagcggacgcgtgcctctacaaagggaccctccgtgtttcctctggctcccagcagcaagtctacaagcggaggaacagccgctctgggctgcctggtcaaggattactttcccgagcctgtgaccgtgtcctggaatagcggagcactgacaagcggcgtgcacacctttccagccgtgctgcaaagcagcggcctgtactctctgagcagcgtggtcacagtgcctagctctagcctgggcacccagacctacatctgcaatgtgaaccacaagcctagcaacaccaaggtggacaagagagtggaacccaagagctgtatccccgaggacacattcttcccaagccccgagagcagctgcgacgtgaagctggtggaaaagagcttcgagacagacaccaacctgaacttccagaacctgagcgtgatcggcttcagaatcctgctgctgaaagtggccggctttaacctgctgatgaccctgcggctgtggtccagc

SEQ ID NO: 10506 - DNA, 2691 bp, Artificial Sequence
  Synthetic Polynucloetide
atggccttaccagtgaccgccttgctcctgccgctggccttgctgctccacgccgccaggccggaagtgcagctggttgaatctggcggaggactggttcagcctggcggatctctgagactgtcttgtgccgccagcggcttcagcttcagcgacttttggatgagctgggtccgacaggcccctggcaaaggacttgaatgggtcgccacaatcagccaggccggcagcgagaaggactacgtggactctgtgaagggcagattcaccatcagccgggacaacgccaagaagtccctgtacctccagatgaacagcctgagagccgaggacaccgccgtgtactattgtgcctctggcgtgtacagcttcgactacagaggccagggcaccctggtcacagtctcttctggtaccggcggaggcggatctggcggcggaggtagcggtggcggaggatctgaattcgaggtgcagctggttgaatctggcggaggactggttcagcctggcggatctctgagactgtcttgtgccgccagcggctacaccttcaccacctattggatgcactgggtccgacaggcccctggcaaaggacttgagtgggtcggatatatcaggcccagcaccggctacacagagtacaaccagaagttcaaggaccgcttcaccatcagcgccgacaccagcaagaataccgcctacctccagatgaacagcctgagagccgaggacaccgccgtgtactactgtgccagatccagatggctgctggactattggggccagggcacactggttacagtttctctcgagatccagaaccctgatcctgccgtgtaccagctgcgggatagcaagagcagcgacaagagcgtgtgtctgttcaccgacttcgacagccagaccaacgtgtcccagagcaaggactccgacgtgtacatcaccgataagtgcgtgctggacatgcggagcatggacttcaagagcaactccgccgtggcctggtccaacaagtccgatttcgcctgcgccaacgccttcaacaacagcattatccccgaggacacattcttcccaagccccgagagcagctgcgacgtgaagctggtggaaaagagcttcgagacagacaccaacctgaacttccagaacctgagcgtgatcggcttcagaatcctgctgctgaaagtggccggctttaacctgctgatgaccctgcggctgtggtccagccgcgccaagagaagcggatctggcgtgaagcagaccctgaatttcgacctgctgaagctggctggcgacgtggaatccaacccaggccctactagtatggactggatttggcgcatccttttccttgtcggcgctgctaccggcgcgcattccgggccccagctccagctgcaagagtctggacctggcctggtcaagcctagcgagacactgagcctgacctgtaccgtgtccggcgatagcatcagcagcggcgattactactggggctggatcagacagcctcctggcaaaggactggaatggatcggccacatctactacagcggcgtgacctactacaaccccagcctgaagtccagagtgaccatcagcgtggacaccagccggaaccagttctccctgaagctgtctagcgtgacagccgccgataccgccgtgtactactgcaccagagaggacagcagcaactggcggagtagaggccagggaacactggtcacagttagctctggatccggcggaggcggaagtggaggcggaggatctggcggcggaggctctttcgaagacattcagatgacacagagccctagcagcctgagcgcctctgtgggagacagagtgaccatcacatgcaagagcagccagagcctgctgtactccagcaatcagaagaactacctggcctggttccagcagaagcctggcaaggctcctaagctgctgatctactgggccagcaccagagaaagcggcgtgccaagcagattttctggcagcggctctggcaccgacttcaccctgacaatatccagcctccagcctgaggacttcgccacctacttttgccaccagtacctgagcagctacacattcggacagggcaccaaggtggaaatcaagcggacgcgtgaggacctgaagaacgtgttcccacctgaggtggccgtgttcgagcctagcgaggccgagatcagccacacccagaaagccaccctcgtgtgcctggctaccggcttctaccccgaccatgtggaactgtcttggtgggtcaacggcaaagaggtgcacagcggcgtgtgtaccgacccccagccactgaaagaacagcccgccctgaacgacagccggtactgcctgagcagcagactgagagtgtccgccaccttctggcagaacccccggaaccacttcagatgccaggtgcagttctacggcctgagcgagaacgacgagtggacccaggacagagccaagcccgtgacccagatcgtgtctgccgaagcctggggcagagccgattgcggctttaccagcgagagctaccagcagggcgtgctgagcgccaccatcctgtacgagatcctgctgggcaaggccaccctgtacgccgtgctggtgtctgccctggtgctgatggctatggtcaagcggaaggacagccgggga

SEQ ID NO: 10507 - DNA, 3267 bp, Artificial Sequence
  Synthetic Polynucloetide
atggccttaccagtgaccgccttgctcctgccgctggccttgctgctccacgccgccaggccggaagtgcagctggttgaatctggcggaggactggttcagcctggcggatctctgagactgtcttgtgccgccagcggcttcagcttcagcgacttttggatgagctgggtccgacaggcccctggcaaaggacttgaatgggtcgccacaatcagccaggccggcagcgagaaggactacgtggactctgtgaagggcagattcaccatcagccgggacaacgccaagaagtccctgtacctccagatgaacagcctgagagccgaggacaccgccgtgtactattgtgcctctggcgtgtacagcttcgactacagaggccagggcaccctggtcacagtctcttctggtaccggcggaggcggatctggcggcggaggtagcggtggcggaggatctgaattcgaggtgcagctggttgaatctggcggaggactggttcagcctggcggatctctgagactgtcttgtgccgccagcggctacaccttcaccacctattggatgcactgggtccgacaggcccctggcaaaggacttgagtgggtcggatatatcaggcccagcaccggctacacagagtacaaccagaagttcaaggaccgcttcaccatcagcgccgacaccagcaagaataccgcctacctccagatgaacagcctgagagccgaggacaccgccgtgtactactgtgccagatccagatggctgctggactattggggccagggcacactggttacagtttctctcgaggacctgaagaacgtgttcccacctgaggtggccgtgttcgagcctagcgaggccgagatcagccacacccagaaagccaccctcgtgtgcctggctaccggcttctaccccgaccatgtggaactgtcttggtgggtcaacggcaaagaggtgcacagcggcgtgtctaccgacccccagccactgaaagaacagcccgccctgaacgacagccggtactgcctgagcagcagactgagagtgtccgccaccttctggcagaacccccggaaccacttcagatgccaggtgcagttctacggcctgagcgagaacgacgagtggacccaggacagagccaagcccgtgacccagatcgtgtctgccgaagcctggggcagagccgattgcggatcccagagcttcggcctgctggaccccaagctgtgctacctgctggatggcatcctgttcatctacggcgtgatcctgaccgccctgttcctgagagtgaagttcagcagaagcgccgacgcccctgcctaccagcagggacagaaccaactgtacaacgagctgaacctgggcagacgggaagagtacgacgtgctggacaagcggagaggcagggaccctgagatgggcggaaagccccagcggagaaagaacccccaggaaggactgtataacgaactccagaaagacaagatggccgaagcctacagcgagatcggcatgaagggcgagcggagaagaggcaagggccacgatggcctgtaccagggcctgagcaccgccaccaaggacacctatgacgccctgcacatgcaggccctgcctccaagaagggccaagcgatctggatctggagcaacaaacttctcactactcaaacaagcaggtgacgtggaggagaatcccgggcctactagtatggactggatttggcgcatccttttccttgtcggcgctgctaccggcgcgcattccgggccccagctccagctgcaagagtctggacctggcctggtcaagcctagcgagacactgagcctgacctgtaccgtgtccggcgatagcatcagcagcggcgattactactggggctggatcagacagcctcctggcaaaggactggaatggatcggccacatctactacagcggcgtgacctactacaaccccagcctgaagtccagagtgaccatcagcgtggacaccagccggaaccagttctccctgaagctgtctagcgtgacagccgccgataccgccgtgtactactgcaccagagaggacagcagcaactggcggagtagaggccagggaacactggtcacagttagctctggatccggcggaggcggaagtggaggcggaggatctggcggcggaggctctttcgaagacattcagatgacacagagccctagcagcctgagcgcctctgtgggagacagagtgaccatcacatgcaagagcagccagagcctgctgtactccagcaatcagaagaactacctggcctggttccagcagaagcctggcaaggctcctaagctgctgatctactgggccagcaccagagaaagcggcgtgccaagcagattttctggcagcggctctggcaccgacttcaccctgacaatatccagcctccagcctgaggacttcgccacctacttttgccaccagtacctgagcagctacacattcggacagggcaccaaggtggaaatcaagcggacgcgtatccagaaccctgatcctgccgtgtaccagctgcgggatagcaagagcagcgacaagagcgtgtgtctgttcaccgacttcgacagccagaccaacgtgtcccagagcaaggactccgacgtgtacatcaccgataagaccgtgctggacatgcggagcatggacttcaagagcaactccgccgtggcctggtccaacaagtccgatttcgcctgcgccaacgccttcaacaacagcattatccccgaggacacattcttcccaagccccgagagcagctgcggtacccagagttttgggttgttggaccctaaattgtgctatctgttggacggaatcctgttcatttacggagtgatcctgaccgcattgttcctgcgggttaagttttccagatccgcagacgcacccgcttaccaacaagggcagaaccaactctacaatgaacttaatttggggcggagggaagagtacgacgttctggacaaaaggaggggacgagatcccgagatgggcggaaagcctcagcgaaggaagaatccgcaagaggggctttataacgaactccagaaagataaaatggcagaagcctatagtgagattgggatgaagggagaaaggaggaggggtaaaggtcacgatgggttgtaccaaggattgagcacagccactaaagatacctatgatgcgctccacatgcaggccctgccgccaaga

SEQ ID NO: 10508 - DNA, 2757 bp, Artificial Sequence
  Synthetic Polynucloetide
atggccttaccagtgaccgccttgctcctgccgctggccttgctgctccacgccgccaggccggaagtgcagctggttgaatctggcggaggactggttcagcctggcggatctctgagactgtcttgtgccgccagcggcttcagcttcagcgacttttggatgagctgggtccgacaggcccctggcaaaggacttgaatgggtcgccacaatcagccaggccggcagcgagaaggactacgtggactctgtgaagggcagattcaccatcagccgggacaacgccaagaagtccctgtacctccagatgaacagcctgagagccgaggacaccgccgtgtactattgtgcctctggcgtgtacagcttcgactacagaggccagggcaccctggtcacagtctcttctggtaccggcggaggcggatctggcggcggaggtagcggtggcggaggatctgaattcgaggtgcagctggttgaatctggcggaggactggttcagcctggcggatctctgagactgtcttgtgccgccagcggctacaccttcaccacctattggatgcactgggtccgacaggcccctggcaaaggacttgagtgggtcggatatatcaggcccagcaccggctacacagagtacaaccagaagttcaaggaccgcttcaccatcagcgccgacaccagcaagaataccgcctacctccagatgaacagcctgagagccgaggacaccgccgtgtactactgtgccagatccagatggctgctggactattggggccagggcacactggttacagtttctctcgagggacagcctaaggccaatcctaccgtgacactgttccctccaagcagcgaagaactccaggccaacaaggccacacttgtgtgcctgatctccgacttctaccctggggctgtgacagtggcttggaaggccgatggatctcctgtgaaagccggcgtggaaaccaccaagccatccaagcagagcaacaacaaatacgccgccagctcctacctgagcctgacacctgagcagtggaagtcccacagatcctacagctgccaagtgacccacgaaggcagcaccgtggaaaagacagtggcccctacagagtgcagccccatcaagaccgatgtgattacaatggaccccaaggacaactgctccaaggacgccaacgataccctgctgctccagctgaccaacaccagcgcctactacatgtacttgttgctgctgctgaagtccgtggtgtacttcgccatcatcacatgctgcctgctgcggagaaccgccttctgctgcaacggcgagaagtctagggccaagcgatctggatctggagcaacaaacttctcactactcaaacaagcaggtgacgtggaggagaatcccgggcctactagtatggactggatttggcgcatccttttccttgtcggcgctgctaccggcgcgcattccgggccccagctccagctgcaagagtctggacctggcctggtcaagcctagcgagacactgagcctgacctgtaccgtgtccggcgatagcatcagcagcggcgattactactggggctggatcagacagcctcctggcaaaggactggaatggatcggccacatctactacagcggcgtgacctactacaaccccagcctgaagtccagagtgaccatcagcgtggacaccagccggaaccagttctccctgaagctgtctagcgtgacagccgccgataccgccgtgtactactgcaccagagaggacagcagcaactggcggagtagaggccagggaacactggtcacagttagctctggatccggcggaggcggaagtggaggcggaggatctggcggcggaggctctttcgaagacattcagatgacacagagccctagcagcctgagcgcctctgtgggagacagagtgaccatcacatgcaagagcagccagagcctgctgtactccagcaatcagaagaactacctggcctggttccagcagaagcctggcaaggctcctaagctgctgatctactgggccagcaccagagaaagcggcgtgccaagcagattttctggcagcggctctggcaccgacttcaccctgacaatatccagcctccagcctgaggacttcgccacctacttttgccaccagtacctgagcagctacacattcggacagggcaccaaggtggaaatcaagcggacgcgtgcctctacaaagggaccctccgtgtttcctctggctcccagcagcaagtctacaagcggaggaacagccgctctgggctgcctggtcaaggattactttcccgagcctgtgaccgtgtcctggaatagcggagcactgacaagcggcgtgcacacctttccagccgtgctgcaaagcagcggcctgtactctctgagcagcgtggtcacagtgcctagctctagcctgggcacccagacctacatctgcaatgtgaaccacaagcctagcaacaccaaggtggacaagagagtggaacccaagagctgtgaagtgaaaaccgactccaccgaccacgtgaagcccaaagagacagagaacaccaagcagcccagcaagagctgccacaagcccaaggccatcgtgcacaccgagaaagtgaacatgatgagcctgaccgtgctgggcctgcggatgctgttcgccaaaaccgtggccgtgaacttcctgctgaccgccaagctgttcttcctc

SEQ ID NO: 10509 - DNA, 2700 bp, Artificial Sequence
  Synthetic Polynucloetide
atggccttaccagtgaccgccttgctcctgccgctggccttgctgctccacgccgccaggccggaagtgcagctggttgaatctggcggaggactggttcagcctggcggatctctgagactgtcttgtgccgccagcggcttcagcttcagcgacttttggatgagctgggtccgacaggcccctggcaaaggacttgaatgggtcgccacaatcagccaggccggcagcgagaaggactacgtggactctgtgaagggcagattcaccatcagccgggacaacgccaagaagtccctgtacctccagatgaacagcctgagagccgaggacaccgccgtgtactattgtgcctctggcgtgtacagcttcgactacagaggccagggcaccctggtcacagtctcttctggtaccggcggaggcggatctggcggcggaggtagcggtggcggaggatctgaattcgaggtgcagctggttgaatctggcggaggactggttcagcctggcggatctctgagactgtcttgtgccgccagcggctacaccttcaccacctattggatgcactgggtccgacaggcccctggcaaaggacttgagtgggtcggatatatcaggcccagcaccggctacacagagtacaaccagaagttcaaggaccgcttcaccatcagcgccgacaccagcaagaataccgcctacctccagatgaacagcctgagagccgaggacaccgccgtgtactactgtgccagatccagatggctgctggactattggggccagggcacactggttacagtttctctcgagggacagcctaaggccaatcctaccgtgacactgttccctccaagcagcgaagaactccaggccaacaaggccacacttgtgtgcctgatctccgacttctaccctggggctgtgacagtggcttggaaggccgatggatctcctgtgaaagccggcgtggaaaccaccaagccatccaagcagagcaacaacaaatacgccgccagctcctacctgagcctgacacctgagcagtggaagtcccacagatcctacagctgccaagtgacccacgaaggcagcaccgtggaaaagacagtggcccctacagagtgcagcggcagagccgattgcggctttaccagcgagagctaccagcagggcgtgctgagcgccaccatcctgtacgagatcctgctgggcaaggccaccctgtacgccgtgctggtgtctgccctggtgctgatggctatggtcaagcggaaggacagccggggacgcgccaagagaagcggatctggcgtgaagcagaccctgaatttcgacctgctgaagctggctggcgacgtggaatccaacccaggccctactagtatggactggatttggcgcatccttttccttgtcggcgctgctaccggcgcgcattccgggccccagctccagctgcaagagtctggacctggcctggtcaagcctagcgagacactgagcctgacctgtaccgtgtccggcgatagcatcagcagcggcgattactactggggctggatcagacagcctcctggcaaaggactggaatggatcggccacatctactacagcggcgtgacctactacaaccccagcctgaagtccagagtgaccatcagcgtggacaccagccggaaccagttctccctgaagctgtctagcgtgacagccgccgataccgccgtgtactactgcaccagagaggacagcagcaactggcggagtagaggccagggaacactggtcacagttagctctggatccggcggaggcggaagtggaggcggaggatctggcggcggaggctctttcgaagacattcagatgacacagagccctagcagcctgagcgcctctgtgggagacagagtgaccatcacatgcaagagcagccagagcctgctgtactccagcaatcagaagaactacctggcctggttccagcagaagcctggcaaggctcctaagctgctgatctactgggccagcaccagagaaagcggcgtgccaagcagattttctggcagcggctctggcaccgacttcaccctgacaatatccagcctccagcctgaggacttcgccacctacttttgccaccagtacctgagcagctacacattcggacagggcaccaaggtggaaatcaagcggacgcgtgcctctacaaagggaccctccgtgtttcctctggctcccagcagcaagtctacaagcggaggaacagccgctctgggctgcctggtcaaggattactttcccgagcctgtgaccgtgtcctggaatagcggagcactgacaagcggcgtgcacacctttccagccgtgctgcaaagcagcggcctgtactctctgagcagcgtggtcacagtgcctagctctagcctgggcacccagacctacatctgcaatgtgaaccacaagcctagcaacaccaaggtggacaagagagtggaacccaagagctgtatccccgaggacacattcttcccaagccccgagagcagctgcgacgtgaagctggtggaaaagagcttcgagacagacaccaacctgaacttccagaacctgagcgtgatcggcttcagaatcctgctgctgaaagtggccggctttaacctgctgatgaccctgcggctgtggtccagc

SEQ ID NO: 10510 - DNA, 2271 bp, Artificial Sequence
  Synthetic Polynucloetide
atggccttaccagtgaccgccttgctcctgccgctggccttgctgctccacgccgccaggccggaagtgcaggttttggagtctggcggaggactggttcagcctggcggatctctgagactgtcttgtgccgccagcggcttcaccttcagcaactttgccatgagctgggtccgacaggcccctggcaaaggacttgaatgggtgtccacaatcagcggcagcgccggcacaacagattacgccgattctgtgaagggcagattcaccatcagccgggacaacagcaagaaaaccctgtacctccagatgaacagcctgcgcgtggaagataccgccgtgtactactgtgccgatggcagaggccccttcttcgattatcgcggccagggcacactggtcaccgtttcttctggtaccggcggaggcggatctggcggcggaggtagcggtggcggaggatctgaattcgaggtgcagctggttgaatctggcggaggactggttcagcctggcggatctctgagactgtcttgtgccgccagcggctacaccttcaccacctattggatgcactgggtccgacaggcccctggcaaaggacttgagtgggtcggatatatcaggcccagcaccggctacacagagtacaaccagaagttcaaggaccgcttcaccatcagcgccgacaccagcaagaataccgcctacctccagatgaacagcctgagagccgaggacaccgccgtgtactactgtgccagatccagatggctgctggactattggggccagggcacactggttacagtttctctcgaggacctgaagaacgtgttcccacctgaggtggccgtgttcgagcctagcgaggccgagatcagccacacccagaaagccaccctcgtgtgcctggctaccggcttctaccccgaccatgtggaactgtcttggtgggtcaacggcaaagaggtgcacagcggcgtgtgtaccgacccccagccactgaaagaacagcccgccctgaacgacagccggtactgcctgagcagcagactgagagtgtccgccaccttctggcagaacccccggaaccacttcagatgccaggtgcagttctacggcctgagcgagaacgacgagtggacccaggacagagccaagcccgtgacccagatcgtgtctgccgaagcctggggcagagccgattgcggctttaccagcgagagctaccagcagggcgtgctgagcgccaccatcctgtacgagatcctgctgggcaaggccaccctgtacgccgtgctggtgtctgccctggtgctgatggctatggtcaagcggaaggacagccggggaagggccaagcgatctggatctggagcaacaaacttctcactactcaaacaagcaggtgacgtggaggagaatcccgggcctactagtatggactggatttggcgcatccttttccttgtcggcgctgctaccggcgcgcattccttcgaagacattcagatgacacagagccctagcagcctgagcgcctctgtgggagacagagtgaccatcacatgcaagagcagccagagcctgctgtactccagcaatcagaagaactacctggcctggttccagcagaagcctggcaaggctcctaagctgctgatctactgggccagcaccagagaaagcggcgtgccaagcagattttctggcagcggctctggcaccgacttcaccctgacaatatccagcctccagcctgaggacttcgccacctacttttgccaccagtacctgagcagctacacattcggacagggcaccaaggtggaaatcaagcggacgcgtatccagaaccctgatcctgccgtgtaccagctgcgggatagcaagagcagcgacaagagcgtgtgtctgttcaccgacttcgacagccagaccaacgtgtcccagagcaaggactccgacgtgtacatcaccgataagtgcgtgctggacatgcggagcatggacttcaagagcaactccgccgtggcctggtccaacaagtccgatttcgcctgcgccaacgccttcaacaacagcattatccccgaggacacattcttcccaagccccgagagcagctgcgacgtgaagctggtggaaaagagcttcgagacagacaccaacctgaacttccagaacctgagcgtgatcggcttcagaatcctgctgctgaaagtggccggctttaacctgctgatgaccctgcggctgtggtccagc

SEQ ID NO: 10511 - DNA, 2274 bp, Artificial Sequence
  Synthetic Polynucloetide
atggccttaccagtgaccgccttgctcctgccgctggccttgctgctccacgccgccaggccggaggtgcagctggttgaatctggcggaggactggttcagcctggcggatctctgagactgtcttgtgccgccagcggctacaccttcaccacctattggatgcactgggtccgacaggcccctggcaaaggacttgagtgggtcggatatatcaggcccagcaccggctacacagagtacaaccagaagttcaaggaccgcttcaccatcagcgccgacaccagcaagaataccgcctacctccagatgaacagcctgagagccgaggacaccgccgtgtactactgtgccagatccagatggctgctggactattggggccagggcacactggttacagtttctctcgaggacctgaagaacgtgttcccacctgaggtggccgtgttcgagcctagcgaggccgagatcagccacacccagaaagccaccctcgtgtgcctggctaccggcttctaccccgaccatgtggaactgtcttggtgggtcaacggcaaagaggtgcacagcggcgtgtgtaccgacccccagccactgaaagaacagcccgccctgaacgacagccggtactgcctgagcagcagactgagagtgtccgccaccttctggcagaacccccggaaccacttcagatgccaggtgcagttctacggcctgagcgagaacgacgagtggacccaggacagagccaagcccgtgacccagatcgtgtctgccgaagcctggggcagagccgattgcggctttaccagcgagagctaccagcagggcgtgctgagcgccaccatcctgtacgagatcctgctgggcaaggccaccctgtacgccgtgctggtgtctgccctggtgctgatggctatggtcaagcggaaggacagccggggaagggccaagcgatctggatctggagcaacaaacttctcactactcaaacaagcaggtgacgtggaggagaatcccgggcctactagtatggactggatttggcgcatccttttccttgtcggcgctgctaccggcgcccattccgggcccgaagtgcagctggttgaatctggcggaggactggttcaggctggcggatctctgagactgtcttgtgccgccagcggcagaacctttagcatgggctggtttagacaggcccctggcaaagagagagagttcgtcgccgccatcacatactctggcggcagcccttactacgccgactctgtgaagggcagattcaccatcagccgggacaacgccaagaacaccgtgtacctccagatgaacagcctgaagcctgaggacaccgccgtgtactactgcgccgccaatccaacatacggcagcgactggaacgccgagaattggggccagggaacccaagtgacagtgtctagcggatccggcggcggaggatctggcggaggcggatctgggggcggaggctctttcgaagacattcagatgacacagagccctagcagcctgagcgcctctgtgggagacagagtgaccatcacatgcaagagcagccagagcctgctgtactccagcaatcagaagaactacctggcctggttccagcagaagcctggcaaggctcctaagctgctgatctactgggccagcaccagagaaagcggcgtgccaagcagattttctggcagcggctctggcaccgacttcaccctgacaatatccagcctccagcctgaggacttcgccacctacttttgccaccagtacctgagcagctacacattcggacagggcaccaaggtggaaatcaagcggacgcgtatccagaaccctgatcctgccgtgtaccagctgcgggatagcaagagcagcgacaagagcgtgtgtctgttcaccgacttcgacagccagaccaacgtgtcccagagcaaggactccgacgtgtacatcaccgataagtgcgtgctggacatgcggagcatggacttcaagagcaactccgccgtggcctggtccaacaagtccgatttcgcctgcgccaacgccttcaacaacagcattatccccgaggacacattcttcccaagccccgagagcagctgcgacgtgaagctggtggaaaagagcttcgagacagacaccaacctgaacttccagaacctgagcgtgatcggcttcagaatcctgctgctgaaagtggccggctttaacctgctgatgaccctgcggctgtggtccagc

SEQ ID NO: 10512 - DNA, 2655 bp, Artificial Sequence
  Synthetic Polynucloetide
atggccttaccagtgaccgccttgctcctgccgctggccttgctgctccacgccgccaggccggaggtgcagctggttgaatctggcggaggactggttcagcctggcggatctctgagactgtcttgtgccgccagcggctacaccttcaccacctattggatgcactgggtccgacaggcccctggcaaaggacttgagtgggtcggatatatcaggcccagcaccggctacacagagtacaaccagaagttcaaggaccgcttcaccatcagcgccgacaccagcaagaataccgcctacctccagatgaacagcctgagagccgaggacaccgccgtgtactactgtgccagatccagatggctgctggactattggggccagggcacactggttacagtttctctcgaggacctgaagaacgtgttcccacctgaggtggccgtgttcgagcctagcgaggccgagatcagccacacccagaaagccaccctcgtgtgcctggctaccggcttctaccccgaccatgtggaactgtcttggtgggtcaacggcaaagaggtgcacagcggcgtgtgtaccgacccccagccactgaaagaacagcccgccctgaacgacagccggtactgcctgagcagcagactgagagtgtccgccaccttctggcagaacccccggaaccacttcagatgccaggtgcagttctacggcctgagcgagaacgacgagtggacccaggacagagccaagcccgtgacccagatcgtgtctgccgaagcctggggcagagccgattgcggctttaccagcgagagctaccagcagggcgtgctgagcgccaccatcctgtacgagatcctgctgggcaaggccaccctgtacgccgtgctggtgtctgccctggtgctgatggctatggtcaagcggaaggacagccggggaagggccaagcgatctggatctggagcaacaaacttctcactactcaaacaagcaggtgacgtggaggagaatcccgggcctactagtatggactggatttggcgcatccttttccttgtcggcgctgctaccggcgcccattcccaactgcaactgcaagagtctggccctggcctggtcaagccttctgaaaccctgagcctgacctgtaccgtgtccggcggctctatcagcagcggcgattactactggggctggatcagacagcctccaggcaagggactcgaatggatcggcagcatcagctacagcggctccacctactacaacccaagcctgaagtccagagtgaccatcagcgtggacaccagcagaaaccagttctccctgaagctgagcagcgtgacagccgccgatacagccgtgtattattgcaccagagaggacagcagcaactggcggagtagaggacagggcacactggtcacagtgtcctcttctggaggcggtggaagcggtggaggaggatctgaagtgcagctggttgaatctggcggaggactggttcaggctggcggatctctgagactgtcttgtgccgccagcggcagaacctttagcatgggctggtttagacaggcccctggcaaagagagagagttcgtcgccgccatcacatactctggcggcagcccttactacgccgactctgtgaagggcagattcaccatcagccgggacaacgccaagaacaccgtgtacctccagatgaacagcctgaagcctgaggacaccgccgtgtactactgcgccgccaatccaacatacggcagcgactggaacgccgagaattggggccagggaacccaagtgacagtgtctagcggatccggcggcggaggatctggcggaggcggatctgggggcggaggctctttcgaagacattcagatgacacagagccctagcagcctgagcgcctctgtgggagacagagtgaccatcacatgcaagagcagccagagcctgctgtactccagcaatcagaagaactacctggcctggttccagcagaagcctggcaaggctcctaagctgctgatctactgggccagcaccagagaaagcggcgtgccaagcagattttctggcagcggctctggcaccgacttcaccctgacaatatccagcctccagcctgaggacttcgccacctacttttgccaccagtacctgagcagctacacattcggacagggcaccaaggtggaaatcaagcggacgcgtatccagaaccctgatcctgccgtgtaccagctgcgggatagcaagagcagcgacaagagcgtgtgtctgttcaccgacttcgacagccagaccaacgtgtcccagagcaaggactccgacgtgtacatcaccgataagtgcgtgctggacatgcggagcatggacttcaagagcaactccgccgtggcctggtccaacaagtccgatttcgcctgcgccaacgccttcaacaacagcattatccccgaggacacattcttcccaagccccgagagcagctgcgacgtgaagctggtggaaaagagcttcgagacagacaccaacctgaacttccagaacctgagcgtgatcggcttcagaatcctgctgctgaaagtggccggctttaacctgctgatgaccctgcggctgtggtccagc

SEQ ID NO: 10513 - DNA, 2682 bp, Artificial Sequence
  Synthetic Polynucloetide
atggccttaccagtgaccgccttgctcctgccgctggccttgctgctccacgccgccaggccggaagtgcaggttttggagtctggcggaggactggttcagcctggcggatctctgagactgtcttgtgccgccagcggcttcaccttcagcaactttgccatgagctgggtccgacaggcccctggcaaaggacttgaatgggtgtccacaatcagcggcagcgccggcacaacagattacgccgattctgtgaagggcagattcaccatcagccgggacaacagcaagaaaaccctgtacctccagatgaacagcctgcgcgtggaagataccgccgtgtactactgtgccgatggcagaggccccttcttcgattatcgcggccagggcacactggtcaccgtttcttctggtaccggcggaggcggatctggcggcggaggtagcggtggcggaggatctgaattcgaggtgcagctggttgaatctggcggaggactggttcagcctggcggatctctgagactgtcttgtgccgccagcggctacaccttcaccacctattggatgcactgggtccgacaggcccctggcaaaggacttgagtgggtcggatatatcaggcccagcaccggctacacagagtacaaccagaagttcaaggaccgcttcaccatcagcgccgacaccagcaagaataccgcctacctccagatgaacagcctgagagccgaggacaccgccgtgtactactgtgccagatccagatggctgctggactattggggccagggcacactggttacagtttctctcgaggacctgaagaacgtgttcccacctgaggtggccgtgttcgagcctagcgaggccgagatcagccacacccagaaagccaccctcgtgtgcctggctaccggcttctaccccgaccatgtggaactgtcttggtgggtcaacggcaaagaggtgcacagcggcgtgtgtaccgacccccagccactgaaagaacagcccgccctgaacgacagccggtactgcctgagcagcagactgagagtgtccgccaccttctggcagaacccccggaaccacttcagatgccaggtgcagttctacggcctgagcgagaacgacgagtggacccaggacagagccaagcccgtgacccagatcgtgtctgccgaagcctggggcagagccgattgcggctttaccagcgagagctaccagcagggcgtgctgagcgccaccatcctgtacgagatcctgctgggcaaggccaccctgtacgccgtgctggtgtctgccctggtgctgatggctatggtcaagcggaaggacagccggggaagggccaagcgatctggatctggagcaacaaacttctcactactcaaacaagcaggtgacgtggaggagaatcccgggcctactagtatggactggatttggcgcatccttttccttgtcggcgctgctaccggcgcccattccgggcccgaagtgcagctggttgaatctggcggaggactggttcaggctggcggatctctgagactgtcttgtgccgccagcggcagaacctttagcatgggctggtttagacaggcccctggcaaagagagagagttcgtcgccgccatcacatacagcggcggcagcccttactacgcctcttctgtcagaggccggttcaccatcagccgggacaacgccaagaacaccgtgtacctccagatgaacagcctgaagccagaggacaccgccgtgtactactgtgccgccaatccaacctacggcagcgactggaatgccgagaattggggccagggcacccaagtgacagtgtctagtggatccggcggcggaggatctggcggaggcggatctgggggcggaggctctttcgaagacattcagatgacacagagccctagcagcctgagcgcctctgtgggagacagagtgaccatcacatgcaagagcagccagagcctgctgtactccagcaatcagaagaactacctggcctggttccagcagaagcctggcaaggctcctaagctgctgatctactgggccagcaccagagaaagcggcgtgccaagcagattttctggcagcggctctggcaccgacttcaccctgacaatatccagcctccagcctgaggacttcgccacctacttttgccaccagtacctgagcagctacacattcggacagggcaccaaggtggaaatcaagcggacgcgtatccagaaccctgatcctgccgtgtaccagctgcgggatagcaagagcagcgacaagagcgtgtgtctgttcaccgacttcgacagccagaccaacgtgtcccagagcaaggactccgacgtgtacatcaccgataagtgcgtgctggacatgcggagcatggacttcaagagcaactccgccgtggcctggtccaacaagtccgatttcgcctgcgccaacgccttcaacaacagcattatccccgaggacacattcttcccaagccccgagagcagctgcgacgtgaagctggtggaaaagagcttcgagacagacaccaacctgaacttccagaacctgagcgtgatcggcttcagaatcctgctgctgaaagtggccggctttaacctgctgatgaccctgcggctgtggtccagc

SEQ ID NO: 10514 - DNA, 2169 bp, Artificial Sequence
  Synthetic Polynucloetide
atggccttaccagtgaccgccttgctcctgccgctggccttgctgctccacgccgccaggccggacatccagatgacacagagccctagcagcctgtctgccagcgtgggagacagagtgaccatcacctgtagagccagccaggacatcagcaactacctgaactggtatcagcagaagcccggcaaggcccctaagctgctgatctactacaccagcagactgcacagcggcgtgcccagcagattttctggctctggcagcggcaccgacttcaccctgacaatatctagcctccagcctgaggacttcgccacctactattgccagcagggcaacaccctgccttacacatttggacagggcaccaaggtggaaatcaagagaggcggaggcggaagtggaggcggaggatctggcggcggaggctctgaagtgcagctggttgaatcaggtggcggcctggttcaacctggcggatctctgagactgagctgtgccgccagcggctacaccttcagcgactactttatgagctgggtccgacaggcccctggcaaaggacttgaatgggtcgccaccatcagcaatggcggcacctacacttactaccccgacagcgtgaagggcagattcaccatctccagagacaacagcaagaacaccctgtacctccagatgaactccctgagagccgaggacaccgccgtgtactactgcgccagattcgacggctacatcttcgactattggggccagggcaccctggtcacagtctcttctacgcgtgagcagaaactgatctcggaagaggatctggcgaagcccaccacgacgccagcgccgcgaccaccaacaccggcgcccaccatcgcgtcgcagcccctgtccctgcgcccagaggcgtgccggccagcggcggggggcgcagtgcacacgagggggctggacttcgcctgtgacatctacatctgggcgcccttggccgggacttgtggggtccttctcctgtcactggttatcaccctttactgcaaacggggcagaaagaaactcctgtatatattcaaacaaccatttatgagaccagtacaaactactcaagaggaagatggctgtagctgccgatttccagaagaagaagaaggaggatgtgaactgagagtgaagttcagcaggagcgcagacgcccccgcgtaccagcagggccagaaccagctctataacgagctgaatctaggacgaagagaggagtacgatgttttggacaagagacgtggccgggaccctgagatggggggaaagccgagaaggaagaaccctcaggaaggcctgtacaatgaactgcagaaagataagatggcggaggcctacagtgagattgggatgaaaggcgagcgccggaggggcaaggggcacgatggcctttaccagggtctcagtacagccaccaaggacacctacgacgcccttcacatgcaggccctgccccctcgctctagtggctccggcgagggcagaggaagtctactaacctgcggagatgtggaagaaaatcctggcccacatatgaccgagtacaagcccacggtgcgcctcgccacccgcgacgacgtccccagggccgtacgcaccctcgccgccgcgttcgccgactaccccgccacgcgccacaccgtcgatccggaccgccacatcgagcgggtcaccgagctgcaagaactcttcctcacgcgcgtcgggctcgacatcggcaaggtgtgggtcgcggacgacggcgccgcggtggcggtctggaccacgccggagagcgtcgaagcgggggcggtgttcgccgagatcggcccgcgcatggccgagttgagcggttcccggctggccgcgcagcaacagatggaaggcctcctggcgccgcaccggcccaaggagcccgcgtggttcctggccaccgtcggcgtctcgcccgaccaccagggcaagggtctgggcagcgccgtcgtgctccccggagtggaggcggccgagcgcgccggggtgcccgccttcctggagacctccgcgccccgcaacctccccttctacgagcggctcggcttcaccgtcaccgccgacgtcgaggtgcccgaaggaccgcgcacctggtgcatgacccgcaagcccggtgcctga

SEQ ID NO: 10515 - DNA, 2151 bp, Artificial Sequence
  Synthetic Polynucloetide
atggccttaccagtgaccgccttgctcctgccgctggccttgctgctccacgccgccaggccggacatccagatgacacagagccctagcagcctgtctgccagcgtgggagacagagtgaccatcacctgtagagccagccaggacatcagcaactacctgaactggtatcagcagaagcccggcaaggcccctaagctgctgatctactacaccagcagactgcacagcggcgtgcccagcagattttctggctctggcagcggcaccgacttcaccctgacaatatctagcctccagcctgaggacttcgccacctactattgccagcagggcaacaccctgccttacacatttggacagggcaccaaggtggaaatcaagagaggcggaggcggaagtggaggcggaggatctggcggcggaggctctgaagtgcagctggttgaatcaggtggcggcctggttcaacctggcggatctctgagactgagctgtgccgccagcggctacaccttcagcgactactttatgagctgggtccgacaggcccctggcaaaggacttgaatgggtcgccaccatcagcaatggcggcacctacacttactaccccgacagcgtgaagggcagattcaccatctccagagacaacagcaagaacaccctgtacctccagatgaactccctgagagccgaggacaccgccgtgtactactgcgccagattcgacggctacatcttcgactattggggccagggcaccctggtcacagtctcttctacgcgtgagcagaaactgatctcggaagaggatctgaaaattgaagttatgtatcctcctccttacctagacaatgagaagagcaatggaaccattatccatgtgaaagggaaacacctttgtccaagtcccctatttcccggaccttctaagcccttttgggtgctggtggtggttgggggagtcctggcttgctatagcttgctagtaacagtggcctttattattttctgggtgaggagtaagaggagcaggctcctgcacagtgactacatgaacatgactccacgccgccccggacccacccgcaagcattaccagccctatgccccaccacgcgacttcgcagcctatcgctccagagtgaagttcagcaggagcgcagacgcccccgcgtaccagcagggccagaaccagctctataacgagctcaatctaggacgaagagaggagtacgatgttttggacaagagacgtggccgggaccctgagatggggggaaagccgagaaggaagaaccctcaggaaggcctgtacaatgaactgcagaaagataagatggcggaggcctacagtgagattgggatgaaaggcgagcgccggaggggcaaggggcacgatggcctttaccagggtctcagtacagccaccaaggacacctacgacgcccttcacatgcaggccctgccccctcgctctagtggctccggcgagggcagaggaagtctactaacctgcggagatgtggaagaaaatcctggcccacatatgaccgagtacaagcccacggtgcgcctcgccacccgcgacgacgtccccagggccgtacgcaccctcgccgccgcgttcgccgactaccccgccacgcgccacaccgtcgatccggaccgccacatcgagcgggtcaccgagctgcaagaactcttcctcacgcgcgtcgggctcgacatcggcaaggtgtgggtcgcggacgacggcgccgcggtggcggtctggaccacgccggagagcgtcgaagcgggggcggtgttcgccgagatcggcccgcgcatggccgagttgagcggttcccggctggccgcgcagcaacagatggaaggcctcctggcgccgcaccggcccaaggagcccgcgtggttcctggccaccgtcggcgtctcgcccgaccaccagggcaagggtctgggcagcgccgtcgtgctccccggagtggaggcggccgagcgcgccggggtgcccgccttcctggagacctccgcgccccgcaacctccccttctacgagcggctcggcttcaccgtcaccgccgacgtcgaggtgcccgaaggaccgcgcacctggtgcatgacccgcaagcccggtgcctga

SEQ ID NO: 10516 - DNA, 1479 bp, Artificial Sequence
  Synthetic Polynucloetide
atggccttaccagtgaccgccttgctcctgccgctggccttgctgctccacgccgccaggccggacatccagatgacacagagccctagcagcctgtctgccagcgtgggagacagagtgaccatcacctgtagagccagccaggacatcagcaactacctgaactggtatcagcagaagcccggcaaggcccctaagctgctgatctactacaccagcagactgcacagcggcgtgcccagcagattttctggctctggcagcggcaccgacttcaccctgacaatatctagcctccagcctgaggacttcgccacctactattgccagcagggcaacaccctgccttacacatttggacagggcaccaaggtggaaatcaagagaggcggaggcggaagtggaggcggaggatctggcggcggaggctctgaagtgcagctggttgaatcaggtggcggcctggttcaacctggcggatctctgagactgagctgtgccgccagcggctacaccttcagcgactactttatgagctgggtccgacaggcccctggcaaaggacttgaatgggtcgccaccatcagcaatggcggcacctacacttactaccccgacagcgtgaagggcagattcaccatctccagagacaacagcaagaacaccctgtacctccagatgaactccctgagagccgaggacaccgccgtgtactactgcgccagattcgacggctacatcttcgactattggggccagggcaccctggtcacagtctcttctacgcgtgagcagaaactgatctcggaagaggatctgaaaattgaagttatgtatcctcctccttacctagacaatgagaagagcaatggaaccattatccatgtgaaagggaaacacctttgtccaagtcccctatttcccggaccttctaagcccttttgggtgctggtggtggttgggggagtcctggcttgctatagcttgctagtaacagtggcctttattattttctgggtgaggagtaagaggagcaggctcctgcacagtgactacatgaacatgactccacgccgccccggacccacccgcaagcattaccagccctatgccccaccacgcgacttcgcagcctatcgctccagagtgaagttcagcaggagcgcagacgcccccgcgtaccagcagggccagaaccagctctataacgagctcaatctaggacgaagagaggagtacgatgttttggacaagagacgtggccgggaccctgagatggggggaaagccgagaaggaagaaccctcaggaaggcctgtacaatgaactgcagaaagataagatggcggaggcctacagtgagattgggatgaaaggcgagcgccggaggggcaaggggcacgatggcctttaccagggtctcagtacagccaccaaggacacctacgacgcccttcacatgcaggccctgccccctcgc

SEQ ID NO: 10517 - DNA, 1500 bp, Artificial Sequence
  Synthetic Polynucloetide
atggccttaccagtgaccgccttgctcctgccgctggccttgctgctccacgccgccaggccggacatccagatgacacagagccctagcagcctgtctgccagcgtgggagacagagtgaccatcacctgtagagccagccaggacatcagcaactacctgaactggtatcagcagaagcccggcaaggcccctaagctgctgatctactacaccagcagactgcacagcggcgtgcccagcagattttctggctctggcagcggcaccgacttcaccctgacaatatctagcctccagcctgaggacttcgccacctactattgccagcagggcaacaccctgccttacacatttggacagggcaccaaggtggaaatcaagagaggcggaggcggaagtggaggcggaggatctggcggcggaggctctgaagtgcagctggttgaatcaggtggcggcctggttcaacctggcggatctctgagactgagctgtgccgccagcggctacaccttcagcgactactttatgagctgggtccgacaggcccctggcaaaggacttgaatgggtcgccaccatcagcaatggcggcacctacacttactaccccgacagcgtgaagggcagattcaccatctccagagacaacagcaagaacaccctgtacctccagatgaactccctgagagccgaggacaccgccgtgtactactgcgccagattcgacggctacatcttcgactattggggccagggcaccctggtcacagtctcttctacgcgtgagcagaaactgatctcggaagaggatctggcgaagcccaccacgacgccagcgccgcgaccaccaacaccggcgcccaccatcgcgtcgcagcccctgtccctgcgcccagaggcgtgccggccagcggcggggggcgcagtgcacacgagggggctggacttcgcctgtgacatctacatctgggcgcccttggccgggacttgtggggtccttctcctgtcactggttatcaccctttactgcaaacggggcagaaagaaactcctgtatatattcaaacaaccatttatgagaccagtacaaactactcaagaggaagatggctgtagctgccgatttccagaagaagaagaaggaggatgtgaactgagagtgaagttcagcaggagcgcagacgcccccgcgtaccagcagggccagaaccagctctataacgagctgaatctaggacgaagagaggagtacgatgttttggacaagagacgtggccgggaccctgagatggggggaaagccgagaaggaagaaccctcaggaaggcctgtacaatgaactgcagaaagataagatggcggaggcctacagtgagattgggatgaaaggcgagcgccggaggggcaaggggcacgatggcctttaccagggtctcagtacagccaccaaggacacctacgacgcccttcacatgcaggccctgccccctcgctga

SEQ ID NO: 10518 - DNA, 1500 bp, Artificial Sequence
  Synthetic Polynucloetide
atggccttaccagtgaccgccttgctcctgccgctggccttgctgctccacgccgccaggccggaagtgcagctggttgaatcaggtggcggcctggttcaacctggcggatctctgagactgagctgtgccgccagcggctacaccttcagcgactactttatgagctgggtccgacaggcccctggcaaaggacttgaatgggtcgccaccatcagcaatggcggcacctacacttactaccccgacagcgtgaagggcagattcaccatctccagagacaacagcaagaacaccctgtacctccagatgaactccctgagagccgaggacaccgccgtgtactactgcgccagattcgacggctacatcttcgactattggggccagggcaccctggtcacagtctcttctggcggaggcggaagtggaggcggaggatctggcggcggaggctctgacatccagatgacacagagccctagcagcctgtctgccagcgtgggagacagagtgaccatcacctgtagagccagccaggacatcagcaactacctgaactggtatcagcagaagcccggcaaggcccctaagctgctgatctactacaccagcagactgcacagcggcgtgcccagcagattttctggctctggcagcggcaccgacttcaccctgacaatatctagcctccagcctgaggacttcgccacctactattgccagcagggcaacaccctgccttacacatttggacagggcaccaaggtggaaatcaagagaacgcgtgagcagaaactgatctcggaagaggatctggcgaagcccaccacgacgccagcgccgcgaccaccaacaccggcgcccaccatcgcgtcgcagcccctgtccctgcgcccagaggcgtgccggccagcggcggggggcgcagtgcacacgagggggctggacttcgcctgtgacatctacatctgggcgcccttggccgggacttgtggggtccttctcctgtcactggttatcaccctttactgcaaacggggcagaaagaaactcctgtatatattcaaacaaccatttatgagaccagtacaaactactcaagaggaagatggctgtagctgccgatttccagaagaagaagaaggaggatgtgaactgagagtgaagttcagcaggagcgcagacgcccccgcgtaccagcagggccagaaccagctctataacgagctgaatctaggacgaagagaggagtacgatgttttggacaagagacgtggccgggaccctgagatggggggaaagccgagaaggaagaaccctcaggaaggcctgtacaatgaactgcagaaagataagatggcggaggcctacagtgagattgggatgaaaggcgagcgccggaggggcaaggggcacgatggcctttaccagggtctcagtacagccaccaaggacacctacgacgcccttcacatgcaggccctgccccctcgctga

SEQ ID NO: 10519 - DNA, 2739 bp, Artificial Sequence
  Synthetic Polynucloetide
atggccttaccagtgaccgccttgctcctgccgctggccttgctgctccacgccgccaggccggacatccagatgacacagagccctagcagcctgtctgccagcgtgggagacagagtgaccatcacctgtagagccagccaggacatcagcaactacctgaactggtatcagcagaagcccggcaaggcccctaagctgctgatctactacaccagcagactgcacagcggcgtgcccagcagattttctggctctggcagcggcaccgacttcaccctgacaatatctagcctccagcctgaggacttcgccacctactattgccagcagggcaacaccctgccttacacatttggacagggcaccaaggtggaaatcaagagaggcggaggcggaagtggaggcggaggatctggcggcggaggctctgaagtgcagctggttgaatcaggtggcggcctggttcaacctggcggatctctgagactgagctgtgccgccagcggctacaccttcagcgactactttatgagctgggtccgacaggcccctggcaaaggacttgaatgggtcgccaccatcagcaatggcggcacctacacttactaccccgacagcgtgaagggcagattcaccatctccagagacaacagcaagaacaccctgtacctccagatgaactccctgagagccgaggacaccgccgtgtactactgcgccagattcgacggctacatcttcgactattggggccagggcaccctggtcacagtctcttctacgcgtgagcagaaactgatctcggaagaggatctggcgaagcccaccacgacgccagcgccgcgaccaccaacaccggcgcccaccatcgcgtcgcagcccctgtccctgcgcccagaggcgtgccggccagcggcggggggcgcagtgcacacgagggggctggacttcgcctgtgacatctacatctgggcgcccttggccgggacttgtggggtccttctcctgtcactggttatcaccctttactgcgggcgcgccagagtgaagttcagcaggagcgcagacgcccccgcgtaccagcagggccagaaccagctctataacgagctgaatctaggacgaagagaggagtacgatgttttggacaagagacgtggccgggaccctgagatggggggaaagccgagaaggaagaaccctcaggaaggcctgtacaatgaactgcagaaagataagatggcggaggcctacagtgagattgggatgaaaggcgagcgccggaggggcaaggggcacgatggcctttaccagggtctcagtacagccaccaaggacacctacgacgcccttcacatgcaggccctgccccctcgctctagaggatctggagcaacaaacttctcactactcaaacaagcaggtgacgtggaggagaatcccgggcctgggatccacatggccacttacgaggttctctgtgaggtggcgcggaaactgggcacggatgacagggaagtggtattgttcctcctaaacgtgttcatacctcaacccacactggcccaattaattggagctcttagagctttaaaggaggagggcaggttaacgtttcccctgttagcggaatgtctgtttcgtgcaggtcgcagagacctcttgcgcgacctgcttcacttagacccgcgttttttagagcgccacctagcgggcacaatgagttatttcagcccttatcagctcactgttctccacgtagacggggagctgtgtgcgagggatattaggtctttgatatttttaagcaaggacactatagggtctcgcagcacaccacagacattcttacactgggtgtactgtatggaaaacttagacctactgggtcccactgacgtggatgccctaatgtcaatgcttagatctttgtcaagagtagacctacagcgccaagtgcaaaccctaatgggccttcacctttccggcccatcacactcccaacactatcgccatacaccactcgagaccgatttctacgactacaaggacgacgatgacaagactagtggctccggcgagggcagaggaagtctactaacctgcggagatgtggaagaaaatcctggcccacatatgaccgagtacaagcccacggtgcgcctcgccacccgcgacgacgtccccagggccgtacgcaccctcgccgccgcgttcgccgactaccccgccacgcgccacaccgtcgatccggaccgccacatcgagcgggtcaccgagctgcaagaactcttcctcacgcgcgtcgggctcgacatcggcaaggtgtgggtcgcggacgacggcgccgcggtggcggtctggaccacgccggagagcgtcgaagcgggggcggtgttcgccgagatcggcccgcgcatggccgagttgagcggttcccggctggccgcgcagcaacagatggaaggcctcctggcgccgcaccggcccaaggagcccgcgtggttcctggccaccgtcggcgtctcgcccgaccaccagggcaagggtctgggcagcgccgtcgtgctccccggagtggaggcggccgagcgcgccggggtgcccgccttcctggagacctccgcgccccgcaacctccccttctacgagcggctcggcttcaccgtcaccgccgacgtcgaggtgcccgaaggaccgcgcacctggtgcatgacccgcaagcccggtgcctga

SEQ ID NO: 10520 - DNA, 2559 bp, Artificial Sequence
  Synthetic Polynucloetide
atggccttaccagtgaccgccttgctcctgccgctggccttgctgctccacgccgccaggccggacatccagatgacacagagccctagcagcctgtctgccagcgtgggagacagagtgaccatcacctgtagagccagccaggacatcagcaactacctgaactggtatcagcagaagcccggcaaggcccctaagctgctgatctactacaccagcagactgcacagcggcgtgcccagcagattttctggctctggcagcggcaccgacttcaccctgacaatatctagcctccagcctgaggacttcgccacctactattgccagcagggcaacaccctgccttacacatttggacagggcaccaaggtggaaatcaagagactcgagatccagaaccctgatcctgccgtgtaccagctgcgggatagcaagagcagcgacaagagcgtgtgtctgttcaccgacttcgacagccagaccaacgtgtcccagagcaaggactccgacgtgtacatcaccgataagtgcgtgctggacatgcggagcatggacttcaagagcaactccgccgtggcctggtccaacaagtccgatttcgcctgcgccaacgccttcaacaacagcattatccccgaggacacattcttcccaagcagcgacgtgccctgcgacgtgaagctggtggaaaagagcttcgagacagacaccaacctgaacttccagaacctgagcgtgatcggcttcagaatcctgctgctgaaagtggccggctttaacctgctgatgaccctgcggctgtggtccagccgcgccaagagaagcggatctggcgtgaagcagaccctgaatttcgacctgctgaagctggctggcgacgtggaatccaacccaggccctactagtatggactggatttggcgcatccttttccttgtcggcgctgctaccggcgcgcattccttcgaagaagtgcagctggttgaatcaggtggcggcctggttcaacctggcggatctctgagactgagctgtgccgccagcggctacaccttcagcgactactttatgagctgggtccgacaggcccctggcaaaggacttgaatgggtcgccaccatcagcaatggcggcacctacacttactaccccgacagcgtgaagggcagattcaccatctccagagacaacagcaagaacaccctgtacctccagatgaactccctgagagccgaggacaccgccgtgtactactgcgccagattcgacggctacatcttcgactattggggccagggcaccctggtcacagtctcttctacgcgtgaggacctgaagaacgtgttcccacctgaggtggccgtgttcgagcctagcaaggccgagatcgcccacacccagaaagccaccctcgtgtgcctggctaccggcttctaccccgaccatgtggaactgtcttggtgggtcaacggcaaagaggtgcacagcggcgtgtgtaccgacccccagccactgaaagaacagcccgccctgaacgacagccggtactgcctgagcagcagactgagagtgtccgccaccttctggcagaacccccggaaccacttcagatgccaggtgcagttctacggcctgagcgagaacgacgagtggacccaggacagagccaagcccgtgacccagatcgtgtctgccgaagcctggggcagagccgattgcggcatcaccagcgccagctaccaccagggcgtgctgagcgccaccatcctgtacgagatcctgctgggcaaggccaccctgtacgccgtgctggtgtctgccctggtgctgatggctatggtcaagcggaaggacagccggggaagggccaagcgatctggatctggagcaacaaacttctcactactcaaacaagcaggtgacgtggaggagaatcccgggccttctagaggccatatgaccgagtacaagcccacggtgcgcctcgccacccgcgacgacgtccccagggccgtacgcaccctcgccgccgcgttcgccgactaccccgccacgcgccacaccgtcgatccggaccgccacatcgagcgggtcaccgagctgcaagaactcttcctcacgcgcgtcgggctcgacatcggcaaggtgtgggtcgcggacgacggcgccgcggtggcggtctggaccacgccggagagcgtcgaagcgggggcggtgttcgccgagatcggcccgcgcatggccgagttgagcggttcccggctggccgcgcagcaacagatggaaggcctcctggcgccgcaccggcccaaggagcccgcgtggttcctggccaccgtcggcgtctcgcccgaccaccagggcaagggtctgggcagcgccgtcgtgctccccggagtggaggcggccgagcgcgccggggtgcccgccttcctggagacctccgcgccccgcaacctccccttctacgagcggctcggcttcaccgtcaccgccgacgtcgaggtgcccgaaggaccgcgcacctggtgcatgacccgcaagcccggtgcctga

SEQ ID NO: 10521 - DNA, 2556 bp, Artificial Sequence
  Synthetic Polynucloetide
atggccttaccagtgaccgccttgctcctgccgctggccttgctgctccacgccgccaggccggacatccagatgacacagagccctagcagcctgtctgccagcgtgggagacagagtgaccatcacctgtagagccagccaggacatcagcaactacctgaactggtatcagcagaagcccggcaaggcccctaagctgctgatctactacaccagcagactgcacagcggcgtgcccagcagattttctggctctggcagcggcaccgacttcaccctgacaatatctagcctccagcctgaggacttcgccacctactattgccagcagggcaacaccctgccttacacatttggacagggcaccaaggtggaaatcaagagactcgaggacctgaagaacgtgttcccacctgaggtggccgtgttcgagcctagcaaggccgagatcgcccacacccagaaagccaccctcgtgtgcctggctaccggcttctaccccgaccatgtggaactgtcttggtgggtcaacggcaaagaggtgcacagcggcgtgtgtaccgacccccagccactgaaagaacagcccgccctgaacgacagccggtactgcctgagcagcagactgagagtgtccgccaccttctggcagaacccccggaaccacttcagatgccaggtgcagttctacggcctgagcgagaacgacgagtggacccaggacagagccaagcccgtgacccagatcgtgtctgccgaagcctggggcagagccgattgcggcatcaccagcgccagctaccaccagggcgtgctgagcgccaccatcctgtacgagatcctgctgggcaaggccaccctgtacgccgtgctggtgtctgccctggtgctgatggctatggtcaagcggaaggacagccggggaagggccaagcgatctggatctggagcaacaaacttctcactactcaaacaagcaggtgacgtggaggagaatcccgggcctactagtatggactggatttggcgcatccttttccttgtcggcgctgctaccggcgcgcattccttcgaagaagtgcagctggttgaatcaggtggcggcctggttcaacctggcggatctctgagactgagctgtgccgccagcggctacaccttcagcgactactttatgagctgggtccgacaggcccctggcaaaggacttgaatgggtcgccaccatcagcaatggcggcacctacacttactaccccgacagcgtgaagggcagattcaccatctccagagacaacagcaagaacaccctgtacctccagatgaactccctgagagccgaggacaccgccgtgtactactgcgccagattcgacggctacatcttcgactattggggccagggcaccctggtcacagtctcttctacgcgtatccagaaccctgatcctgccgtgtaccagctgcgggatagcaagagcagcgacaagagcgtgtgtctgttcaccgacttcgacagccagaccaacgtgtcccagagcaaggactccgacgtgtacatcaccgataagtgcgtgctggacatgcggagcatggacttcaagagcaactccgccgtggcctggtccaacaagtccgatttcgcctgcgccaacgccttcaacaacagcattatccccgaggacacattcttcccaagcagcgacgtgccctgcgacgtgaagctggtggaaaagagcttcgagacagacaccaacctgaacttccagaacctgagcgtgatcggcttcagaatcctgctgctgaaagtggccggctttaacctgctgatgaccctgcggctgtggtccagccgcgccaagagaagcggatctggcgtgaagcagaccctgaatttcgacctgctgaagctggctggcgacgtggaatccaacccaggcccttctagaggccatatgaccgagtacaagcccacggtgcgcctcgccacccgcgacgacgtccccagggccgtacgcaccctcgccgccgcgttcgccgactaccccgccacgcgccacaccgtcgatccggaccgccacatcgagcgggtcaccgagctgcaagaactcttcctcacgcgcgtcgggctcgacatcggcaaggtgtgggtcgcggacgacggcgccgcggtggcggtctggaccacgccggagagcgtcgaagcgggggcggtgttcgccgagatcggcccgcgcatggccgagttgagcggttcccggctggccgcgcagcaacagatggaaggcctcctggcgccgcaccggcccaaggagcccgcgtggttcctggccaccgtcggcgtctcgcccgaccaccagggcaagggtctgggcagcgccgtcgtgctccccggagtggaggcggccgagcgcgccggggtgcccgccttcctggagacctccgcgccccgcaacctccccttctacgagcggctcggcttcaccgtcaccgccgacgtcgaggtgcccgaaggaccgcgcacctggtgcatgacccgcaagcccggtgcctga

SEQ ID NO: 10522 - DNA, 1854 bp, Artificial Sequence
  Synthetic Polynucloetide
atggccttaccagtgaccgccttgctcctgccgctggccttgctgctccacgccgccaggccggacatccagatgacacagagccctagcagcctgtctgccagcgtgggagacagagtgaccatcacctgtagagccagccaggacatcagcaactacctgaactggtatcagcagaagcccggcaaggcccctaagctgctgatctactacaccagcagactgcacagcggcgtgcccagcagattttctggctctggcagcggcaccgacttcaccctgacaatatctagcctccagcctgaggacttcgccacctactattgccagcagggcaacaccctgccttacacatttggacagggcaccaaggtggaaatcaagagactcgaggacctgaagaacgtgttcccacctgaggtggccgtgttcgagcctagcgaggccgagatcagccacacccagaaagccaccctcgtgtgcctggctaccggcttctaccccgaccatgtggaactgtcttggtgggtcaacggcaaagaggtgcacagcggcgtgtgtaccgacccccagccactgaaagaacagcccgccctgaacgacagccggtactgcctgagcagcagactgagagtgtccgccaccttctggcagaacccccggaaccacttcagatgccaggtgcagttctacggcctgagcgagaacgacgagtggacccaggacagagccaagcccgtgacccagatcgtgtctgccgaagcctggggcagagccgattgcggctttaccagcgagagctaccagcagggcgtgctgagcgccaccatcctgtacgagatcctgctgggcaaggccaccctgtacgccgtgctggtgtctgccctggtgctgatggctatggtcaagcggaaggacagccggggaagggccaagcgatctggatctggagcaacaaacttctcactactcaaacaagcaggtgacgtggaggagaatcccgggcctactagtatggactggatttggcgcatccttttccttgtcggcgctgctaccggcgcgcattccttcgaagaagtgcagctggttgaatcaggtggcggcctggttcaacctggcggatctctgagactgagctgtgccgccagcggctacaccttcagcgactactttatgagctgggtccgacaggcccctggcaaaggacttgaatgggtcgccaccatcagcaatggcggcacctacacttactaccccgacagcgtgaagggcagattcaccatctccagagacaacagcaagaacaccctgtacctccagatgaactccctgagagccgaggacaccgccgtgtactactgcgccagattcgacggctacatcttcgactattggggccagggcaccctggtcacagtctcttctacgcgtatccagaaccctgatcctgccgtgtaccagctgcgggatagcaagagcagcgacaagagcgtgtgtctgttcaccgacttcgacagccagaccaacgtgtcccagagcaaggactccgacgtgtacatcaccgataagtgcgtgctggacatgcggagcatggacttcaagagcaactccgccgtggcctggtccaacaagtccgatttcgcctgcgccaacgccttcaacaacagcattatccccgaggacacattcttcccaagccccgagagcagctgcgacgtgaagctggtggaaaagagcttcgagacagacaccaacctgaacttccagaacctgagcgtgatcggcttcagaatcctgctgctgaaagtggccggctttaacctgctgatgaccctgcggctgtggtccagc

SEQ ID NO: 10523 - DNA, 2529 bp, Artificial Sequence
  Synthetic Polynucloetide
atggccttaccagtgaccgccttgctcctgccgctggccttgctgctccacgccgccaggccggacatccagatgacacagagccctagcagcctgtctgccagcgtgggagacagagtgaccatcacctgtagagccagccaggacatcagcaactacctgaactggtatcagcagaagcccggcaaggcccctaagctgctgatctactacaccagcagactgcacagcggcgtgcccagcagattttctggctctggcagcggcaccgacttcaccctgacaatatctagcctccagcctgaggacttcgccacctactattgccagcagggcaacaccctgccttacacatttggacagggcaccaaggtggaaatcaagagactcgaggacctgaagaacgtgttcccacctgaggtggccgtgttcgagcctagcgaggccgagatcagccacacccagaaagccaccctcgtgtgcctggctaccggcttctaccccgaccatgtggaactgtcttggtgggtcaacggcaaagaggtgcacagcggcgtgtgtaccgacccccagccactgaaagaacagcccgccctgaacgacagccggtactgcctgagcagcagactgagagtgtccgccaccttctggcagaacccccggaaccacttcagatgccaggtgcagttctacggcctgagcgagaacgacgagtggacccaggacagagccaagcccgtgacccagatcgtgtctgccgaagcctggggcagagccgattgcggctttaccagcgagagctaccagcagggcgtgctgagcgccaccatcctgtacgagatcctgctgggcaaggccaccctgtacgccgtgctggtgtctgccctggtgctgatggctatggtcaagcggaaggacagccggggaagggccaagcgatctggatctggagcaacaaacttctcactactcaaacaagcaggtgacgtggaggagaatcccgggcctactagtatggactggatttggcgcatccttttccttgtcggcgctgctaccggcgcgcattccttcgaagaagtgcagctggttgaatcaggtggcggcctggttcaacctggcggatctctgagactgagctgtgccgccagcggctacaccttcagcgactactttatgagctgggtccgacaggcccctggcaaaggacttgaatgggtcgccaccatcagcaatggcggcacctacacttactaccccgacagcgtgaagggcagattcaccatctccagagacaacagcaagaacaccctgtacctccagatgaactccctgagagccgaggacaccgccgtgtactactgcgccagattcgacggctacatcttcgactattggggccagggcaccctggtcacagtctcttctacgcgtatccagaaccctgatcctgccgtgtaccagctgcgggatagcaagagcagcgacaagagcgtgtgtctgttcaccgacttcgacagccagaccaacgtgtcccagagcaaggactccgacgtgtacatcaccgataagtgcgtgctggacatgcggagcatggacttcaagagcaactccgccgtggcctggtccaacaagtccgatttcgcctgcgccaacgccttcaacaacagcattatccccgaggacacattcttcccaagccccgagagcagctgcgacgtgaagctggtggaaaagagcttcgagacagacaccaacctgaacttccagaacctgagcgtgatcggcttcagaatcctgctgctgaaagtggccggctttaacctgctgatgaccctgcggctgtggtccagccgcgccaagagaagcggatctggcgtgaagcagaccctgaatttcgacctgctgaagctggctggcgacgtggaatccaacccaggcccttctagaggcgggatccacaccatggctacctacgaggtgctgtgcgaggtggcaagaaagctgggcaccgacgacagagaagtggtgctgttcctgctgaacgtgttcatccctcagcctacactggcccagctgatcggtgcactgagagccctgaaagaggaaggccggctgacctttcctctgctggccgaatgcctgttcagagccggaagaagggatctgctgcgggacctgctgcatctggaccccagatttctggaaagacacctggccggcaccatgagctacttcagcccttaccagctgaccgtgctgcacgttgacggcgaactgtgcgccagagatattcggagcctgatcttcctgagcaaggacaccatcggcagccggtctacccctcagacatttctgcactgggtgtactgcatggaaaacctggacctgctcggccccacagatgtggatgccctgatgtccatgctgagaagcctgagcagagtggacctccagagacaggtgcagacactgatgggactgcacctgagcggacctagccacagccagcactacagacacacccct

SEQ ID NO: 10524 - DNA, 1866 bp, Artificial Sequence
  Synthetic Polynucloetide
atggccttaccagtgaccgccttgctcctgccgctggccttgctgctccacgccgccaggccggacatccagatgacacagagccctagcagcctgtctgccagcgtgggagacagagtgaccatcacctgtagagccagccaggacatcagcaactacctgaactggtatcagcagaagcccggcaaggcccctaagctgctgatctactacaccagcagactgcacagcggcgtgcccagcagattttctggctctggcagcggcaccgacttcaccctgacaatatctagcctccagcctgaggacttcgccacctactattgccagcagggcaacaccctgccttacacatttggacagggcaccaaggtggaaatcaagagactcgagatccagaaccctgatcctgccgtgtaccagctgcgggatagcaagagcagcgacaagagcgtgtgtctgttcaccgacttcgacagccagaccaacgtgtcccagagcaaggactccgacgtgtacatcaccgataagtgcgtgctggacatgcggagcatggacttcaagagcaactccgccgtggcctggtccaacaagtccgatttcgcctgcgccaacgccttcaacaacagcattatccccgaggacacattcttcccaagccccgagagcagctgcgacgtgaagctggtggaaaagagcttcgagacagacaccaacctgaacttccagaacctgagcgtgatcggcttcagaatcctgctgctgaaagtggccggctttaacctgctgatgaccctgcggctgtggtccagccgcgccaagagaagcggatctggcgtgaagcagaccctgaatttcgacctgctgaagctggctggcgacgtggaatccaacccaggccctactagtatggactggatttggcgcatccttttccttgtcggcgctgctaccggcgcgcattccttcgaagaagtgcagctggttgaatcaggtggcggcctggttcaacctggcggatctctgagactgagctgtgccgccagcggctacaccttcagcgactactttatgagctgggtccgacaggcccctggcaaaggacttgaatgggtcgccaccatcagcaatggcggcacctacacttactaccccgacagcgtgaagggcagattcaccatctccagagacaacagcaagaacaccctgtacctccagatgaactccctgagagccgaggacaccgccgtgtactactgcgccagattcgacggctacatcttcgactattggggccagggcaccctggtcacagtctcttctacgcgtgaggacctgaagaacgtgttcccacctgaggtggccgtgttcgagcctagcgaggccgagatcagccacacccagaaagccaccctcgtgtgcctggctaccggcttctaccccgaccatgtggaactgtcttggtgggtcaacggcaaagaggtgcacagcggcgtgtgtaccgacccccagccactgaaagaacagcccgccctgaacgacagccggtactgcctgagcagcagactgagagtgtccgccaccttctggcagaacccccggaaccacttcagatgccaggtgcagttctacggcctgagcgagaacgacgagtggacccaggacagagccaagcccgtgacccagatcgtgtctgccgaagcctggggcagagccgattgcggctttaccagcgagagctaccagcagggcgtgctgagcgccaccatcctgtacgagatcctgctgggcaaggccaccctgtacgccgtgctggtgtctgccctggtgctgatggctatggtcaagcggaaggacagccgggga

SEQ ID NO: 10525 - DNA, 2532 bp, Artificial Sequence
  Synthetic Polynucloetide
atggccttaccagtgaccgccttgctcctgccgctggccttgctgctccacgccgccaggccggacatccagatgacacagagccctagcagcctgtctgccagcgtgggagacagagtgaccatcacctgtagagccagccaggacatcagcaactacctgaactggtatcagcagaagcccggcaaggcccctaagctgctgatctactacaccagcagactgcacagcggcgtgcccagcagattttctggctctggcagcggcaccgacttcaccctgacaatatctagcctccagcctgaggacttcgccacctactattgccagcagggcaacaccctgccttacacatttggacagggcaccaaggtggaaatcaagagactcgagatccagaaccctgatcctgccgtgtaccagctgcgggatagcaagagcagcgacaagagcgtgtgtctgttcaccgacttcgacagccagaccaacgtgtcccagagcaaggactccgacgtgtacatcaccgataagtgcgtgctggacatgcggagcatggacttcaagagcaactccgccgtggcctggtccaacaagtccgatttcgcctgcgccaacgccttcaacaacagcattatccccgaggacacattcttcccaagccccgagagcagctgcgacgtgaagctggtggaaaagagcttcgagacagacaccaacctgaacttccagaacctgagcgtgatcggcttcagaatcctgctgctgaaagtggccggctttaacctgctgatgaccctgcggctgtggtccagccgcgccaagagaagcggatctggcgtgaagcagaccctgaatttcgacctgctgaagctggctggcgacgtggaatccaacccaggccctactagtatggactggatttggcgcatccttttccttgtcggcgctgctaccggcgcgcattccttcgaagaagtgcagctggttgaatcaggtggcggcctggttcaacctggcggatctctgagactgagctgtgccgccagcggctacaccttcagcgactactttatgagctgggtccgacaggcccctggcaaaggacttgaatgggtcgccaccatcagcaatggcggcacctacacttactaccccgacagcgtgaagggcagattcaccatctccagagacaacagcaagaacaccctgtacctccagatgaactccctgagagccgaggacaccgccgtgtactactgcgccagattcgacggctacatcttcgactattggggccagggcaccctggtcacagtctcttctacgcgtgaggacctgaagaacgtgttcccacctgaggtggccgtgttcgagcctagcgaggccgagatcagccacacccagaaagccaccctcgtgtgcctggctaccggcttctaccccgaccatgtggaactgtcttggtgggtcaacggcaaagaggtgcacagcggcgtgtgtaccgacccccagccactgaaagaacagcccgccctgaacgacagccggtactgcctgagcagcagactgagagtgtccgccaccttctggcagaacccccggaaccacttcagatgccaggtgcagttctacggcctgagcgagaacgacgagtggacccaggacagagccaagcccgtgacccagatcgtgtctgccgaagcctggggcagagccgattgcggctttaccagcgagagctaccagcagggcgtgctgagcgccaccatcctgtacgagatcctgctgggcaaggccaccctgtacgccgtgctggtgtctgccctggtgctgatggctatggtcaagcggaaggacagccggggaagggccaagcgatctggatctggagcaacaaacttctcactactcaaacaagcaggtgacgtggaggagaatcccgggccttctagaggcgggatccacaccatggctacctacgaggtgctgtgcgaggtggcaagaaagctgggcaccgacgacagagaagtggtgctgttcctgctgaacgtgttcatccctcagcctacactggcccagctgatcggtgcactgagagccctgaaagaggaaggccggctgacctttcctctgctggccgaatgcctgttcagagccggaagaagggatctgctgcgggacctgctgcatctggaccccagatttctggaaagacacctggccggcaccatgagctacttcagcccttaccagctgaccgtgctgcacgttgacggcgaactgtgcgccagagatattcggagcctgatcttcctgagcaaggacaccatcggcagccggtctacccctcagacatttctgcactgggtgtactgcatggaaaacctggacctgctcggccccacagatgtggatgccctgatgtccatgctgagaagcctgagcagagtggacctccagagacaggtgcagacactgatgggactgcacctgagcggacctagccacagccagcactacagacacacccct

SEQ ID NO: 10526 - DNA, 2691 bp, Artificial Sequence
  Synthetic Polynucloetide
atggccttaccagtgaccgccttgctcctgccgctggccttgctgctccacgccgccaggccgctcgaggggaaaccaattcccaaccctcttctgggactggattcaaccggcagcggcgaggacctgaagaacgtgttcccacctgaggtggccgtgttcgagcctagcaaggccgagatcgcccacacccagaaagccaccctcgtgtgcctggctaccggcttctaccccgaccatgtggaactgtcttggtgggtcaacggcaaagaggtgcacagcggcgtgtgtaccgacccccagccactgaaagaacagcccgccctgaacgacagccggtactgcctgagcagcagactgagagtgtccgccaccttctggcagaacccccggaaccacttcagatgccaggtgcagttctacggcctgagcgagaacgacgagtggacccaggacagagccaagcccgtgacccagatcgtgtctgccgaagcctggggcagagccgattgcggcatcaccagcgccagctaccaccagggcgtgctgagcgccaccatcctgtacgagatcctgctgggcaaggccaccctgtacgccgtgctggtgtctgccctggtgctgatggctatggtcaagcggaaggacagccggggaagggccaagcgatctggatctggagcaacaaacttctcactactcaaacaagcaggtgacgtggaggagaatcccgggcctactagcatggccttaccagtgaccgccttgctcctgccgctggccttgctgctccacgccgccaggccggacatccagatgacacagagccctagcagcctgtctgccagcgtgggagacagagtgaccatcacctgtagagccagccaggacatcagcaactacctgaactggtatcagcagaagcccggcaaggcccctaagctgctgatctactacaccagcagactgcacagcggcgtgcccagcagattttctggctctggcagcggcaccgacttcaccctgacaatatctagcctccagcctgaggacttcgccacctactattgccagcagggcaacaccctgccttacacatttggacagggcaccaaggtggaaatcaagagaggcggaggcggaagtggaggcggaggatctggcggcggaggctctgaagtgcagctggttgaatcaggtggcggcctggttcaacctggcggatctctgagactgagctgtgccgccagcggctacaccttcagcgactactttatgagctgggtccgacaggcccctggcaaaggacttgaatgggtcgccaccatcagcaatggcggcacctacacttactaccccgacagcgtgaagggcagattcaccatctccagagacaacagcaagaacaccctgtacctccagatgaactccctgagagccgaggacaccgccgtgtactactgcgccagattcgacggctacatcttcgactattggggccagggcaccctggtcacagtctcttctacgcgtgagcagaaactgatctcggaagaggatgggagcggcatccagaaccctgatcctgccgtgtaccagctgcgggatagcaagagcagcgacaagagcgtgtgtctgttcaccgacttcgacagccagaccaacgtgtcccagagcaaggactccgacgtgtacatcaccgataagtgcgtgctggacatgcggagcatggacttcaagagcaactccgccgtggcctggtccaacaagtccgatttcgcctgcgccaacgccttcaacaacagcattatccccgaggacacattcttcccaagcagcgacgtgccctgcgacgtgaagctggtggaaaagagcttcgagacagacaccaacctgaacttccagaacctgagcgtgatcggcttcagaatcctgctgctgaaagtggccggctttaacctgctgatgaccctgcggctgtggtccagccgcgccaagagaagcggatctggcgtgaagcagaccctgaatttcgacctgctgaagctggctggcgacgtggaatccaacccaggcccttctagaggccatatgaccgagtacaagcccacggtgcgcctcgccacccgcgacgacgtccccagggccgtacgcaccctcgccgccgcgttcgccgactaccccgccacgcgccacaccgtcgatccggaccgccacatcgagcgggtcaccgagctgcaagaactcttcctcacgcgcgtcgggctcgacatcggcaaggtgtgggtcgcggacgacggcgccgcggtggcggtctggaccacgccggagagcgtcgaagcgggggcggtgttcgccgagatcggcccgcgcatggccgagttgagcggttcccggctggccgcgcagcaacagatggaaggcctcctggcgccgcaccggcccaaggagcccgcgtggttcctggccaccgtcggcgtctcgcccgaccaccagggcaagggtctgggcagcgccgtcgtgctccccggagtggaggcggccgagcgcgccggggtgcccgccttcctggagacctccgcgccccgcaacctccccttctacgagcggctcggcttcaccgtcaccgccgacgtcgaggtgcccgaaggaccgcgcacctggtgcatgacccgcaagcccggtgcctga

SEQ ID NO: 10527 - DNA, 2694 bp, Artificial Sequence
  Synthetic Polynucloetide
atggccttaccagtgaccgccttgctcctgccgctggccttgctgctccacgccgccaggccgctcgagcagaaactgatctcggaagaggatctgggctccggcgatcgccctgatcctgccgtgtaccagctgcgggatagcaagagcagcgacaagagcgtgtgtctgttcaccgacttcgacagccagaccaacgtgtcccagagcaaggactccgacgtgtacatcaccgataagtgcgtgctggacatgcggagcatggacttcaagagcaactccgccgtggcctggtccaacaagtccgatttcgcctgcgccaacgccttcaacaacagcattatccccgaggacacattcttcccaagccccgagagcagctgcgacgtgaagctggtggaaaagagcttcgagacagacaccaacctgaacttccagaacctgagcgtgatcggcttcagaatcctgctgctgaaagtggccggctttaacctgctgatgaccctgcggctgtggtccagctctagtcgcgccaagagaagcggatctggcgtgaagcagaccctgaatttcgacctgctgaagctggctggcgacgtggaatccaacccaggccccactagcatggccttaccagtgaccgccttgctcctgccgctggccttgctgctccacgccgccaggccggacatccagatgacacagagccctagcagcctgtctgccagcgtgggagacagagtgaccatcacctgtagagccagccaggacatcagcaactacctgaactggtatcagcagaagcccggcaaggcccctaagctgctgatctactacaccagcagactgcacagcggcgtgcccagcagattttctggctctggcagcggcaccgacttcaccctgacaatatctagcctccagcctgaggacttcgccacctactattgccagcagggcaacaccctgccttacacatttggacagggcaccaaggtggaaatcaagagaggcggaggcggaagtggaggcggaggatctggcggcggaggctctgaagtgcagctggttgaatcaggtggcggcctggttcaacctggcggatctctgagactgagctgtgccgccagcggctacaccttcagcgactactttatgagctgggtccgacaggcccctggcaaaggacttgaatgggtcgccaccatcagcaatggcggcacctacacttactaccccgacagcgtgaagggcagattcaccatctccagagacaacagcaagaacaccctgtacctccagatgaactccctgagagccgaggacaccgccgtgtactactgcgccagattcgacggctacatcttcgactattggggccagggcaccctggtcacagtctcttctacgcgtgggaaaccaattcccaaccctcttctgggactggattcaaccggcagcggcgaggacctgaagaacgtgttcccacctgaggtggccgtgttcgagcctagcgaggccgagatcagccacacccagaaagccaccctcgtgtgcctggctaccggcttctaccccgaccatgtggaactgtcttggtgggtcaacggcaaagaggtgcacagcggcgtgtgtaccgacccccagccactgaaagaacagcccgccctgaacgacagccggtactgcctgagcagcagactgagagtgtccgccaccttctggcagaacccccggaaccacttcagatgccaggtgcagttctacggcctgagcgagaacgacgagtggacccaggacagagccaagcccgtgacccagatcgtgtctgccgaagcctggggcagagccgattgcggctttaccagcgagagctaccagcagggcgtgctgagcgccaccatcctgtacgagatcctgctgggcaaggccaccctgtacgccgtgctggtgtctgccctggtgctgatggctatggtcaagcggaaggacagccggggaagggccaagcgatctggatctggagcaacaaacttctcactactcaaacaagcaggtgacgtggaggagaatcccgggccttctagaggccatatgaccgagtacaagcccacggtgcgcctcgccacccgcgacgacgtccccagggccgtacgcaccctcgccgccgcgttcgccgactaccccgccacgcgccacaccgtcgatccggaccgccacatcgagcgggtcaccgagctgcaagaactcttcctcacgcgcgtcgggctcgacatcggcaaggtgtgggtcgcggacgacggcgccgcggtggcggtctggaccacgccggagagcgtcgaagcgggggcggtgttcgccgagatcggcccgcgcatggccgagttgagcggttcccggctggccgcgcagcaacagatggaaggcctcctggcgccgcaccggcccaaggagcccgcgtggttcctggccaccgtcggcgtctcgcccgaccaccagggcaagggtctgggcagcgccgtcgtgctccccggagtggaggcggccgagcgcgccggggtgcccgccttcctggagacctccgcgccccgcaacctccccttctacgagcggctcggcttcaccgtcaccgccgacgtcgaggtgcccgaaggaccgcgcacctggtgcatgacccgcaagcccggtgcctga

SEQ ID NO: 10528 - DNA, 2556 bp, Artificial Sequence
  Synthetic Polynucloetide
atggccttaccagtgaccgccttgctcctgccgctggccttgctgctccacgccgccaggccggacatccagatgacacagagccctagcagcctgtctgccagcgtgggagacagagtgaccatcacctgtagagccagccaggacatcagcaactacctgaactggtatcagcagaagcccggcaaggcccctaagctgctgatctactacaccagcagactgcacagcggcgtgcccagcagattttctggctctggcagcggcaccgacttcaccctgacaatatctagcctccagcctgaggacttcgccacctactattgccagcagggcaacaccctgccttacacatttggacagggcaccaaggtggaaatcaagagactcgaggacctgaagaacgtgttcccacctgaggtggccgtgttcgagcctagcgaggccgagatcagccacacccagaaagccaccctcgtgtgcctggctaccggcttctaccccgaccatgtggaactgtcttggtgggtcaacggcaaagaggtgcacagcggcgtgtctaccgacccccagccactgaaagaacagcccgccctgaacgacagccggtactgcctgagcagcagactgagagtgtccgccaccttctggcagaacccccggaaccacttcagatgccaggtgcagttctacggcctgagcgagaacgacgagtggacccaggacagagccaagcccgtgacccagatcgtgtctgccgaagcctggggcagagccgattgcggctttaccagcgagagctaccagcagggcgtgctgagcgccaccatcctgtacgagatcctgctgggcaaggccaccctgtacgccgtgctggtgtctgccctggtgctgatggctatggtcaagcggaaggacagccggggaagggccaagcgatctggatctggagcaacaaacttctcactactcaaacaagcaggtgacgtggaggagaatcccgggcctactagtatggactggatttggcgcatccttttccttgtcggcgctgctaccggcgcgcattccttcgaagaagtgcagctggttgaatcaggtggcggcctggttcaacctggcggatctctgagactgagctgtgccgccagcggctacaccttcagcgactactttatgagctgggtccgacaggcccctggcaaaggacttgaatgggtcgccaccatcagcaatggcggcacctacacttactaccccgacagcgtgaagggcagattcaccatctccagagacaacagcaagaacaccctgtacctccagatgaactccctgagagccgaggacaccgccgtgtactactgcgccagattcgacggctacatcttcgactattggggccagggcaccctggtcacagtctcttctacgcgtatccagaaccctgatcctgccgtgtaccagctgcgggatagcaagagcagcgacaagagcgtgtgtctgttcaccgacttcgacagccagaccaacgtgtcccagagcaaggactccgacgtgtacatcaccgataagaccgtgctggacatgcggagcatggacttcaagagcaactccgccgtggcctggtccaacaagtccgatttcgcctgcgccaacgccttcaacaacagcattatccccgaggacacattcttcccaagccccgagagcagctgcgacgtgaagctggtggaaaagagcttcgagacagacaccaacctgaacttccagaacctgagcgtgatcggcttcagaatcctgctgctgaaagtggccggctttaacctgctgatgaccctgcggctgtggtccagccgcgccaagagaagcggatctggcgtgaagcagaccctgaatttcgacctgctgaagctggctggcgacgtggaatccaacccaggcccttctagaggccatatgaccgagtacaagcccacggtgcgcctcgccacccgcgacgacgtccccagggccgtacgcaccctcgccgccgcgttcgccgactaccccgccacgcgccacaccgtcgatccggaccgccacatcgagcgggtcaccgagctgcaagaactcttcctcacgcgcgtcgggctcgacatcggcaaggtgtgggtcgcggacgacggcgccgcggtggcggtctggaccacgccggagagcgtcgaagcgggggcggtgttcgccgagatcggcccgcgcatggccgagttgagcggttcccggctggccgcgcagcaacagatggaaggcctcctggcgccgcaccggcccaaggagcccgcgtggttcctggccaccgtcggcgtctcgcccgaccaccagggcaagggtctgggcagcgccgtcgtgctccccggagtggaggcggccgagcgcgccggggtgcccgccttcctggagacctccgcgccccgcaacctccccttctacgagcggctcggcttcaccgtcaccgccgacgtcgaggtgcccgaaggaccgcgcacctggtgcatgacccgcaagcccggtgcctga

SEQ ID NO: 10529 - DNA, 2802 bp, Artificial Sequence
  Synthetic Polynucloetide
atggccttaccagtgaccgccttgctcctgccgctggccttgctgctccacgccgccaggccggacatccagatgacacagagccctagcagcctgtctgccagcgtgggagacagagtgaccatcacctgtagagccagccaggacatcagcaactacctgaactggtatcagcagaagcccggcaaggcccctaagctgctgatctactacaccagcagactgcacagcggcgtgcccagcagattttctggctctggcagcggcaccgacttcaccctgacaatatctagcctccagcctgaggacttcgccacctactattgccagcagggcaacaccctgccttacacatttggacagggcaccaaggtggaaatcaagagactcgaggacctgaagaacgtgttcccacctgaggtggccgtgttcgagcctagcgaggccgagatcagccacacccagaaagccaccctcgtgtgcctggctaccggcttctaccccgaccatgtggaactgtcttggtgggtcaacggcaaagaggtgcacagcggcgtgtctaccgacccccagccactgaaagaacagcccgccctgaacgacagccggtactgcctgagcagcagactgagagtgtccgccaccttctggcagaacccccggaaccacttcagatgccaggtgcagttctacggcctgagcgagaacgacgagtggacccaggacagagccaagcccgtgacccagatcgtgtctgccgaagcctggggcagagccgattgcggctttaccagcgagagctaccagcagggcgtgctgagcgccaccatcctgtacgagatcctgctgggcaaggccaccctgtacgccgtgctggtgtctgccctggtgctgatggctatggtcaagcggaaggacagccggggaagggccaagcgatctggatctggagcaacaaacttctcactactcaaacaagcaggtgacgtggaggagaatcccgggcctactagtatggactggatttggcgcatccttttccttgtcggcgctgctaccggcgcgcattccttcgaagaagtgcagctggttgaatcaggtggcggcctggttcaacctggcggatctctgagactgagctgtgccgccagcggctacaccttcagcgactactttatgagctgggtccgacaggcccctggcaaaggacttgaatgggtcgccaccatcagcaatggcggcacctacacttactaccccgacagcgtgaagggcagattcaccatctccagagacaacagcaagaacaccctgtacctccagatgaactccctgagagccgaggacaccgccgtgtactactgcgccagattcgacggctacatcttcgactattggggccagggcaccctggtcacagtctcttctacgcgtgagcagaaactgatctcggaagaggatgggagcggcaccccattcccttctctggcccctcccatcatgctgctggtggacggcaagcagcagatggtggtcgtgtgcctggtgctggatgtggccccacctggactggacagccccatctggtttagcgccggcaatggctctgccctggacgcctttacctacggcccaagccctgccaccgatggcacctggacaaatctggcccacctgagcctgcccagcgaggaactggcttcttgggagcctctcgtgtgccacacaggacctggcgctgagggacacagcagatccacccagcctatgcacctgtctggcgaggccagcaccgccagaacctgtcctcaggaacctctgagaggcacccctggcggagcactgtggctgggagtgctgagactgctgctgttcaagctgctgctgtttgacctgctgctgacctgctcctgtctgtgcgatcctgccggccctctgccttctcctgccaccaccacaagactgagagccctgggcagccacagactgcaccctgccacagagacaggcggcagagaggccacaagcagccctagaccccagcccagagacagaagatggggcgataccccccctggcagaaagcctggatctccagtccgcgccaagagaagcggatctggcgtgaagcagaccctgaatttcgacctgctgaagctggctggcgacgtggaatccaacccaggcccttctagaggccatatgaccgagtacaagcccacggtgcgcctcgccacccgcgacgacgtccccagggccgtacgcaccctcgccgccgcgttcgccgactaccccgccacgcgccacaccgtcgatccggaccgccacatcgagcgggtcaccgagctgcaagaactcttcctcacgcgcgtcgggctcgacatcggcaaggtgtgggtcgcggacgacggcgccgcggtggcggtctggaccacgccggagagcgtcgaagcgggggcggtgttcgccgagatcggcccgcgcatggccgagttgagcggttcccggctggccgcgcagcaacagatggaaggcctcctggcgccgcaccggcccaaggagcccgcgtggttcctggccaccgtcggcgtctcgcccgaccaccagggcaagggtctgggcagcgccgtcgtgctccccggagtggaggcggccgagcgcgccggggtgcccgccttcctggagacctccgcgccccgcaacctccccttctacgagcggctcggcttcaccgtcaccgccgacgtcgaggtgcccgaaggaccgcgcacctggtgcatgacccgcaagcccggtgcctga

SEQ ID NO: 10530 - DNA, 2856 bp, Artificial Sequence
  Synthetic Polynucloetide
atggccttaccagtgaccgccttgctcctgccgctggccttgctgctccacgccgccaggccgctcgaggacctgaagaacgtgttcccacctgaggtggccgtgttcgagcctagcgaggccgagatcagccacacccagaaagccaccctcgtgtgcctggctaccggcttctaccccgaccatgtggaactgtcttggtgggtcaacggcaaagaggtgcacagcggcgtgtctaccgacccccagccactgaaagaacagcccgccctgaacgacagccggtactgcctgagcagcagactgagagtgtccgccaccttctggcagaacccccggaaccacttcagatgccaggtgcagttctacggcctgagcgagaacgacgagtggacccaggacagagccaagcccgtgacccagatcgtgtctgccgaagcctggggcagagccgattgcggctttaccagcgagagctaccagcagggcgtgctgagcgccaccatcctgtacgagatcctgctgggcaaggccaccctgtacgccgtgctggtgtctgccctggtgctgatggctatggtcaagcggaaggacagccggggaagggccaagcgatctggatctggagcaacaaacttctcactactcaaacaagcaggtgacgtggaggagaatcccgggcctactagcatggccttaccagtgaccgccttgctcctgccgctggccttgctgctccacgccgccaggccggacatccagatgacacagagccctagcagcctgtctgccagcgtgggagacagagtgaccatcacctgtagagccagccaggacatcagcaactacctgaactggtatcagcagaagcccggcaaggcccctaagctgctgatctactacaccagcagactgcacagcggcgtgcccagcagattttctggctctggcagcggcaccgacttcaccctgacaatatctagcctccagcctgaggacttcgccacctactattgccagcagggcaacaccctgccttacacatttggacagggcaccaaggtggaaatcaagagaggcggaggcggaagtggaggcggaggatctggcggcggaggctctgaagtgcagctggttgaatcaggtggcggcctggttcaacctggcggatctctgagactgagctgtgccgccagcggctacaccttcagcgactactttatgagctgggtccgacaggcccctggcaaaggacttgaatgggtcgccaccatcagcaatggcggcacctacacttactaccccgacagcgtgaagggcagattcaccatctccagagacaacagcaagaacaccctgtacctccagatgaactccctgagagccgaggacaccgccgtgtactactgcgccagattcgacggctacatcttcgactattggggccagggcaccctggtcacagtctcttctacgcgtgagcagaaactgatctcggaagaggatctggggagcggcaccccattcccttctctggcccctcccatcatgctgctggtggacggcaagcagcagatggtggtcgtgtgcctggtgctggatgtggccccacctggactggacagccccatctggtttagcgccggcaatggctctgccctggacgcctttacctacggcccaagccctgccaccgatggcacctggacaaatctggcccacctgagcctgcccagcgaggaactggcttcttgggagcctctcgtgtgccacacaggacctggcgctgagggacacagcagatccacccagcctatgcacctgtctggcgaggccagcaccgccagaacctgtcctcaggaacctctgagaggcacccctggcggagcactgtggctgggagtgctgagactgctgctgttcaagctgctgctgtttgacctgctgctgacctgctcctgtctgtgcgatcctgccggccctctgccttctcctgccaccaccacaagactgagagccctgggcagccacagactgcaccctgccacagagacaggcggcagagaggccacaagcagccctagaccccagcccagagacagaagatggggcgataccccccctggcagaaagcctggatctccagtccgcgccaagagaagcggatctggcgtgaagcagaccctgaatttcgacctgctgaagctggctggcgacgtggaatccaacccaggcccttctagatctagaggccatatgaccgagtacaagcccacggtgcgcctcgccacccgcgacgacgtccccagggccgtacgcaccctcgccgccgcgttcgccgactaccccgccacgcgccacaccgtcgatccggaccgccacatcgagcgggtcaccgagctgcaagaactcttcctcacgcgcgtcgggctcgacatcggcaaggtgtgggtcgcggacgacggcgccgcggtggcggtctggaccacgccggagagcgtcgaagcgggggcggtgttcgccgagatcggcccgcgcatggccgagttgagcggttcccggctggccgcgcagcaacagatggaaggcctcctggcgccgcaccggcccaaggagcccgcgtggttcctggccaccgtcggcgtctcgcccgaccaccagggcaagggtctgggcagcgccgtcgtgctccccggagtggaggcggccgagcgcgccggggtgcccgccttcctggagacctccgcgccccgcaacctccccttctacgagcggctcggcttcaccgtcaccgccgacgtcgaggtgcccgaaggaccgcgcacctggtgcatgacccgcaagcccggtgcctga

SEQ ID NO: 10531 - DNA, 2667 bp, Artificial Sequence
  Synthetic Polynucloetide
atggccttaccagtgaccgccttgctcctgccgctggccttgctgctccacgccgccaggccggacatccagatgacacagagccctagcagcctgtctgccagcgtgggagacagagtgaccatcacctgtagagccagccaggacatcagcaactacctgaactggtatcagcagaagcccggcaaggcccctaagctgctgatctactacaccagcagactgcacagcggcgtgcccagcagattttctggctctggcagcggcaccgacttcaccctgacaatatctagcctccagcctgaggacttcgccacctactattgccagcagggcaacaccctgccttacacatttggacagggcaccaaggtggaaatcaagagactcgaggggaaaccaattcccaaccctcttctgggactggattcaaccggcagcggcgacaagcagctggacgccgacgtgtcccccaagcctaccatcttcctgccctctatcgccgagacaaagctccagaaggccggcacctacctgtgcctgctggaaaagttcttcccagatgtgattaagatccactggcaggaaaagaagtccaacaccatcctgggcagccaggaaggcaacaccatgaagaccaacgacacctacatgaagttcagctggctgaccgtgcccgagaagtccctggacaaagaacacagatgcatcgtgcggcacgaaaacaacaagaacggcgtggaccaggaaatcatcttcccacccatcaagaccgatgtgattacaatggaccccaaggacaactgctccaaggacgccaacgataccctgctgctccagctgaccaacaccagcgcctactacatgtacttgttgctgctgctgaagtccgtggtgtacttcgccatcatcacatgctgcctgctgcggagaaccgccttctgctgcaacggcgagaagtctagggccaagcgatctggatctggagcaacaaacttctcactactcaaacaagcaggtgacgtggaggagaatcccgggcctactagtatggactggatttggcgcatccttttccttgtcggcgctgctaccggcgcgcattccttcgaagaagtgcagctggttgaatcaggtggcggcctggttcaacctggcggatctctgagactgagctgtgccgccagcggctacaccttcagcgactactttatgagctgggtccgacaggcccctggcaaaggacttgaatgggtcgccaccatcagcaatggcggcacctacacttactaccccgacagcgtgaagggcagattcaccatctccagagacaacagcaagaacaccctgtacctccagatgaactccctgagagccgaggacaccgccgtgtactactgcgccagattcgacggctacatcttcgactattggggccagggcaccctggtcacagtctcttctacgcgtgagcagaaactgatctcggaagaggatgggagcggcagccagcctcacaccaagcccagcgtgttcgtgatgaagaacggcaccaacgtggcctgcctcgtgaaagagttctaccccaaggacatcaggatcaacctggtgtccagcaagaagatcaccgagttcgaccccgccatcgtgatctcccccagcggcaagtacaacgccgtgaagctggggaagtacgaggacagcaacagcgtgacctgctccgtgcagcacgacaacaagaccgtgcacagcaccgactttgaagtgaaaaccgactccaccgaccacgtgaagcccaaagagacagagaacaccaagcagcccagcaagagctgccacaagcccaaggccatcgtgcacaccgagaaagtgaacatgatgagcctgaccgtgctgggcctgcggatgctgttcgccaaaaccgtggccgtgaacttcctgctgaccgccaagctgttcttcctccgcgccaagagaagcggatctggcgtgaagcagaccctgaatttcgacctgctgaagctggctggcgacgtggaatccaacccaggcccttctagaggccatatgaccgagtacaagcccacggtgcgcctcgccacccgcgacgacgtccccagggccgtacgcaccctcgccgccgcgttcgccgactaccccgccacgcgccacaccgtcgatccggaccgccacatcgagcgggtcaccgagctgcaagaactcttcctcacgcgcgtcgggctcgacatcggcaaggtgtgggtcgcggacgacggcgccgcggtggcggtctggaccacgccggagagcgtcgaagcgggggcggtgttcgccgagatcggcccgcgcatggccgagttgagcggttcccggctggccgcgcagcaacagatggaaggcctcctggcgccgcaccggcccaaggagcccgcgtggttcctggccaccgtcggcgtctcgcccgaccaccagggcaagggtctgggcagcgccgtcgtgctccccggagtggaggcggccgagcgcgccggggtgcccgccttcctggagacctccgcgccccgcaacctccccttctacgagcggctcggcttcaccgtcaccgccgacgtcgaggtgcccgaaggaccgcgcacctggtgcatgacccgcaagcccggtgcctga

SEQ ID NO: 10532 - DNA, 1878 bp, Artificial Sequence
  Synthetic Polynucloetide
atggccttaccagtgaccgccttgctcctgccgctggccttgctgctccacgccgccaggccggacatccagatgacacagagccctagcagcctgtctgccagcgtgggagacagagtgaccatcacctgtagagccagccaggacatcagcaactacctgaactggtatcagcagaagcccggcaaggcccctaagctgctgatctactacaccagcagactgcacagcggcgtgcccagcagattttctggctctggcagcggcaccgacttcaccctgacaatatctagcctccagcctgaggacttcgccacctactattgccagcagggcaacaccctgccttacacatttggacagggcaccaaggtggaaatcaagagactcgagagccagcctcacaccaagcccagcgtgttcgtgatgaagaacggcaccaacgtggcctgcctcgtgaaagagttctaccccaaggacatcaggatcaacctggtgtccagcaagaagatcaccgagttcgaccccgccatcgtgatctcccccagcggcaagtacaacgccgtgaagctggggaagtacgaggacagcaacagcgtgacctgctccgtgcagcacgacaacaagaccgtgcacagcaccgactttgaagtgaaaaccgactccaccgaccacgtgaagcccaaagagacagagaacaccaagcagcccagcaagagctgccacaagcccaaggccatcgtgcacaccgagaaagtgaacatgatgagcctgaccgtgctgggcctgcggatgctgttcgccaaaaccgtggccgtgaacttcctgctgaccgccaagctgttcttcctcagggccaagcgatctggatctggagcaacaaacttctcactactcaaacaagcaggtgacgtggaggagaatcccgggcctactagtatggactggatttggcgcatccttttccttgtcggcgctgctaccggcgcgcattccttcgaagaagtgcagctggttgaatcaggtggcggcctggttcaacctggcggatctctgagactgagctgtgccgccagcggctacaccttcagcgactactttatgagctgggtccgacaggcccctggcaaaggacttgaatgggtcgccaccatcagcaatggcggcacctacacttactaccccgacagcgtgaagggcagattcaccatctccagagacaacagcaagaacaccctgtacctccagatgaactccctgagagccgaggacaccgccgtgtactactgcgccagattcgacggctacatcttcgactattggggccagggcaccctggtcacagtctcttctacgcgtgacaagcagctggacgccgacgtgtcccccaagcctaccatcttcctgccctctatcgccgagacaaagctccagaaggccggcacctacctgtgcctgctggaaaagttcttcccagatgtgattaagatccactggcaggaaaagaagtccaacaccatcctgggcagccaggaaggcaacaccatgaagaccaacgacacctacatgaagttcagctggctgaccgtgcccgagaagtccctggacaaagaacacagatgcatcgtgcggcacgaaaacaacaagaacggcgtggaccaggaaatcatcttcccacccatcaagaccgatgtgattacaatggaccccaaggacaactgctccaaggacgccaacgataccctgctgctccagctgaccaacaccagcgcctactacatgtacttgttgctgctgctgaagtccgtggtgtacttcgccatcatcacatgctgcctgctgcggagaaccgccttctgctgcaacggcgagaagtct

SEQ ID NO: 10533 - DNA, 2712 bp, Artificial Sequence
  Synthetic Polynucloetide
atggccttaccagtgaccgccttgctcctgccgctggccttgctgctccacgccgccaggccgctcgaggggaaaccaattcccaaccctcttctgggactggattcaaccggcagcggcgacaagcagctggacgccgacgtgtcccccaagcctaccatcttcctgccctctatcgccgagacaaagctccagaaggccggcacctacctgtgcctgctggaaaagttcttcccagatgtgattaagatccactggcaggaaaagaagtccaacaccatcctgggcagccaggaaggcaacaccatgaagaccaacgacacctacatgaagttcagctggctgaccgtgcccgagaagtccctggacaaagaacacagatgcatcgtgcggcacgaaaacaacaagaacggcgtggaccaggaaatcatcttcccacccatcaagaccgatgtgattacaatggaccccaaggacaactgctccaaggacgccaacgataccctgctgctccagctgaccaacaccagcgcctactacatgtacttgttgctgctgctgaagtccgtggtgtacttcgccatcatcacatgctgcctgctgcggagaaccgccttctgctgcaacggcgagaagtctagggccaagcgatctggatctggagcaacaaacttctcactactcaaacaagcaggtgacgtggaggagaatcccgggcctactagcatggccttaccagtgaccgccttgctcctgccgctggccttgctgctccacgccgccaggccggacatccagatgacacagagccctagcagcctgtctgccagcgtgggagacagagtgaccatcacctgtagagccagccaggacatcagcaactacctgaactggtatcagcagaagcccggcaaggcccctaagctgctgatctactacaccagcagactgcacagcggcgtgcccagcagattttctggctctggcagcggcaccgacttcaccctgacaatatctagcctccagcctgaggacttcgccacctactattgccagcagggcaacaccctgccttacacatttggacagggcaccaaggtggaaatcaagagaggcggaggcggaagtggaggcggaggatctggcggcggaggctctgaagtgcagctggttgaatcaggtggcggcctggttcaacctggcggatctctgagactgagctgtgccgccagcggctacaccttcagcgactactttatgagctgggtccgacaggcccctggcaaaggacttgaatgggtcgccaccatcagcaatggcggcacctacacttactaccccgacagcgtgaagggcagattcaccatctccagagacaacagcaagaacaccctgtacctccagatgaactccctgagagccgaggacaccgccgtgtactactgcgccagattcgacggctacatcttcgactattggggccagggcaccctggtcacagtctcttctacgcgtgagcagaaactgatctcggaagaggatgggagcggcagccagcctcacaccaagcccagcgtgttcgtgatgaagaacggcaccaacgtggcctgcctcgtgaaagagttctaccccaaggacatcaggatcaacctggtgtccagcaagaagatcaccgagttcgaccccgccatcgtgatctcccccagcggcaagtacaacgccgtgaagctggggaagtacgaggacagcaacagcgtgacctgctccgtgcagcacgacaacaagaccgtgcacagcaccgactttgaagtgaaaaccgactccaccgaccacgtgaagcccaaagagacagagaacaccaagcagcccagcaagagctgccacaagcccaaggccatcgtgcacaccgagaaagtgaacatgatgagcctgaccgtgctgggcctgcggatgctgttcgccaaaaccgtggccgtgaacttcctgctgaccgccaagctgttcttcctccgcgccaagagaagcggatctggcgtgaagcagaccctgaatttcgacctgctgaagctggctggcgacgtggaatccaacccaggcccttctagaggccatatgaccgagtacaagcccacggtgcgcctcgccacccgcgacgacgtccccagggccgtacgcaccctcgccgccgcgttcgccgactaccccgccacgcgccacaccgtcgatccggaccgccacatcgagcgggtcaccgagctgcaagaactcttcctcacgcgcgtcgggctcgacatcggcaaggtgtgggtcgcggacgacggcgccgcggtggcggtctggaccacgccggagagcgtcgaagcgggggcggtgttcgccgagatcggcccgcgcatggccgagttgagcggttcccggctggccgcgcagcaacagatggaaggcctcctggcgccgcaccggcccaaggagcccgcgtggttcctggccaccgtcggcgtctcgcccgaccaccagggcaagggtctgggcagcgccgtcgtgctccccggagtggaggcggccgagcgcgccggggtgcccgccttcctggagacctccgcgccccgcaacctccccttctacgagcggctcggcttcaccgtcaccgccgacgtcgaggtgcccgaaggaccgcgcacctggtgcatgacccgcaagcccggtgcctga

SEQ ID NO: 10534 - DNA, 3087 bp, Artificial Sequence
  Synthetic Polynucloetide
atggccttaccagtgaccgccttgctcctgccgctggccttgctgctccacgccgccaggccggacatccagatgacacagagccctagcagcctgtctgccagcgtgggagacagagtgaccatcacctgtagagccagccaggacatcagcaactacctgaactggtatcagcagaagcccggcaaggcccctaagctgctgatctactacaccagcagactgcacagcggcgtgcccagcagattttctggctctggcagcggcaccgacttcaccctgacaatatctagcctccagcctgaggacttcgccacctactattgccagcagggcaacaccctgccttacacatttggacagggcaccaaggtggaaatcaagagaggacagcctaaggccaatcctaccgtgacactgttccctccaagcagcgaagaactccaggccaacaaggccacacttgtgtgcctgatctccgacttctaccctggggctgtgacagtggcttggaaggccgatggatctcctgtgaaagccggcgtggaaaccaccaagccatccaagcagagcaacaacaaatacgccgccagctcctacctgagcctgacacctgagcagtggaagtcccacagatcctacagctgccaagtgacccacgaaggcagcaccgtggaaaagacagtggcccctacagagtgcagcggatcccagagcttcggcctgctggaccccaagctgtgctacctgctggatggcatcctgttcatctacggcgtgatcctgaccgccctgttcctgagagtgaagttcagcagaagcgccgacgcccctgcctaccagcagggacagaaccaactgtacaacgagctgaacctgggcagacgggaagagtacgacgtgctggacaagcggagaggcagggaccctgagatgggcggaaagccccagcggagaaagaacccccaggaaggactgtataacgaactccagaaagacaagatggccgaagcctacagcgagatcggcatgaagggcgagcggagaagaggcaagggccacgatggcctgtaccagggcctgagcaccgccaccaaggacacctatgacgccctgcacatgcaggccctgcctccaagaagggccaagcgatctggatctggagcaacaaacttctcactactcaaacaagcaggtgacgtggaggagaatcccgggcctactagtatggactggatttggcgcatccttttccttgtcggcgctgctaccggcgcgcattccttcgaagaagtgcagctggttgaatcaggtggcggcctggttcaacctggcggatctctgagactgagctgtgccgccagcggctacaccttcagcgactactttatgagctgggtccgacaggcccctggcaaaggacttgaatgggtcgccaccatcagcaatggcggcacctacacttactaccccgacagcgtgaagggcagattcaccatctccagagacaacagcaagaacaccctgtacctccagatgaactccctgagagccgaggacaccgccgtgtactactgcgccagattcgacggctacatcttcgactattggggccagggcaccctggtcacagtctcttctgcctctacaaagggaccctccgtgtttcctctggctcccagcagcaagtctacaagcggaggaacagccgctctgggctgcctggtcaaggattactttcccgagcctgtgaccgtgtcctggaatagcggagcactgacaagcggcgtgcacacctttccagccgtgctgcaaagcagcggcctgtactctctgagcagcgtggtcacagtgcctagctctagcctgggcacccagacctacatctgcaatgtgaaccacaagcctagcaacaccaaggtggacaagagagtggaacccaagagctgtggtacccagagttttgggttgttggaccctaaattgtgctatctgttggacggaatcctgttcatttacggagtgatcctgaccgcattgttcctgcgggttaagttttccagatccgcagacgcacccgcttaccaacaagggcagaaccaactctacaatgaacttaatttggggcggagggaagagtacgacgttctggacaaaaggaggggacgagatcccgagatgggcggaaagcctcagcgaaggaagaatccgcaagaggggctttataacgaactccagaaagataaaatggcagaagcctatagtgagattgggatgaagggagaaaggaggaggggtaaaggtcacgatgggttgtaccaaggattgagcacagccactaaagatacctatgatgcgctccacatgcaggccctgccgccaagacgcgccaagagaagcggatctggcgtgaagcagaccctgaatttcgacctgctgaagctggctggcgacgtggaatccaacccaggcccttctagaggccatatgaccgagtacaagcccacggtgcgcctcgccacccgcgacgacgtccccagggccgtacgcaccctcgccgccgcgttcgccgactaccccgccacgcgccacaccgtcgatccggaccgccacatcgagcgggtcaccgagctgcaagaactcttcctcacgcgcgtcgggctcgacatcggcaaggtgtgggtcgcggacgacggcgccgcggtggcggtctggaccacgccggagagcgtcgaagcgggggcggtgttcgccgagatcggcccgcgcatggccgagttgagcggttcccggctggccgcgcagcaacagatggaaggcctcctggcgccgcaccggcccaaggagcccgcgtggttcctggccaccgtcggcgtctcgcccgaccaccagggcaagggtctgggcagcgccgtcgtgctccccggagtggaggcggccgagcgcgccggggtgcccgccttcctggagacctccgcgccccgcaacctccccttctacgagcggctcggcttcaccgtcaccgccgacgtcgaggtgcccgaaggaccgcgcacctggtgcatgacccgcaagcccggtgcctga

SEQ ID NO: 10535 - DNA, 2442 bp, Artificial Sequence
  Synthetic Polynucloetide
atggccttaccagtgaccgccttgctcctgccgctggccttgctgctccacgccgccaggccggacatccagatgacacagagccctagcagcctgtctgccagcgtgggagacagagtgaccatcacctgtagagccagccaggacatcagcaactacctgaactggtatcagcagaagcccggcaaggcccctaagctgctgatctactacaccagcagactgcacagcggcgtgcccagcagattttctggctctggcagcggcaccgacttcaccctgacaatatctagcctccagcctgaggacttcgccacctactattgccagcagggcaacaccctgccttacacatttggacagggcaccaaggtggaaatcaagagactcgaggacctgaagaacgtgttcccacctgaggtggccgtgttcgagcctagcgaggccgagatcagccacacccagaaagccaccctcgtgtgcctggctaccggcttctaccccgaccatgtggaactgtcttggtgggtcaacggcaaagaggtgcacagcggcgtgtctaccgacccccagccactgaaagaacagcccgccctgaacgacagccggtactgcctgagcagcagactgagagtgtccgccaccttctggcagaacccccggaaccacttcagatgccaggtgcagttctacggcctgagcgagaacgacgagtggacccaggacagagccaagcccgtgacccagatcgtgtctgccgaagcctggggcagagccgattgcggatcccagagcttcggcctgctggaccccaagctgtgctacctgctggatggcatcctgttcatctacggcgtgatcctgaccgccctgttcctgagagtgaagttcagcagaagcgccgacgcccctgcctaccagcagggacagaaccaactgtacaacgagctgaacctgggcagacgggaagagtacgacgtgctggacaagcggagaggcagggaccctgagatgggcggaaagccccagcggagaaagaacccccaggaaggactgtataacgaactccagaaagacaagatggccgaagcctacagcgagatcggcatgaagggcgagcggagaagaggcaagggccacgatggcctgtaccagggcctgagcaccgccaccaaggacacctatgacgccctgcacatgcaggccctgcctccaagaagggccaagcgatctggatctggagcaacaaacttctcactactcaaacaagcaggtgacgtggaggagaatcccgggcctactagtatggactggatttggcgcatccttttccttgtcggcgctgctaccggcgcgcattccttcgaagaagtgcagctggttgaatcaggtggcggcctggttcaacctggcggatctctgagactgagctgtgccgccagcggctacaccttcagcgactactttatgagctgggtccgacaggcccctggcaaaggacttgaatgggtcgccaccatcagcaatggcggcacctacacttactaccccgacagcgtgaagggcagattcaccatctccagagacaacagcaagaacaccctgtacctccagatgaactccctgagagccgaggacaccgccgtgtactactgcgccagattcgacggctacatcttcgactattggggccagggcaccctggtcacagtctcttctacgcgtatccagaaccctgatcctgccgtgtaccagctgcgggatagcaagagcagcgacaagagcgtgtgtctgttcaccgacttcgacagccagaccaacgtgtcccagagcaaggactccgacgtgtacatcaccgataagaccgtgctggacatgcggagcatggacttcaagagcaactccgccgtggcctggtccaacaagtccgatttcgcctgcgccaacgccttcaacaacagcattatccccgaggacacattcttcccaagccccgagagcagctgcggtacccagagttttgggttgttggaccctaaattgtgctatctgttggacggaatcctgttcatttacggagtgatcctgaccgcattgttcctgcgggttaagttttccagatccgcagacgcacccgcttaccaacaagggcagaaccaactctacaatgaacttaatttggggcggagggaagagtacgacgttctggacaaaaggaggggacgagatcccgagatgggcggaaagcctcagcgaaggaagaatccgcaagaggggctttataacgaactccagaaagataaaatggcagaagcctatagtgagattgggatgaagggagaaaggaggaggggtaaaggtcacgatgggttgtaccaaggattgagcacagccactaaagatacctatgatgcgctccacatgcaggccctgccgccaaga

SEQ ID NO: 10536 - DNA, 2442 bp, Artificial Sequence
  Synthetic Polynucloetide
atggccttaccagtgaccgccttgctcctgccgctggccttgctgctccacgccgccaggccggacatccagatgacacagagccctagcagcctgtctgccagcgtgggagacagagtgaccatcacctgtagagccagccaggacatcagcaactacctgaactggtatcagcagaagcccggcaaggcccctaagctgctgatctactacaccagcagactgcacagcggcgtgcccagcagattttctggctctggcagcggcaccgacttcaccctgacaatatctagcctccagcctgaggacttcgccacctactattgccagcagggcaacaccctgccttacacatttggacagggcaccaaggtggaaatcaagagactcgaggacctgaagaacgtgttcccacctgaggtggccgtgttcgagcctagcaaggccgagatcgcccacacccagaaagccaccctcgtgtgcctggctaccggcttctaccccgaccatgtggaactgtcttggtgggtcaacggcaaagaggtgcacagcggcgtgtgtaccgacccccagccactgaaagaacagcccgccctgaacgacagccggtactgcctgagcagcagactgagagtgtccgccaccttctggcagaacccccggaaccacttcagatgccaggtgcagttctacggcctgagcgagaacgacgagtggacccaggacagagccaagcccgtgacccagatcgtgtctgccgaagcctggggcagagccgattgcggatcccagagcttcggcctgctggaccccaagctgtgctacctgctggatggcatcctgttcatctacggcgtgatcctgaccgccctgttcctgagagtgaagttcagcagaagcgccgacgcccctgcctaccagcagggacagaaccaactgtacaacgagctgaacctgggcagacgggaagagtacgacgtgctggacaagcggagaggcagggaccctgagatgggcggaaagccccagcggagaaagaacccccaggaaggactgtataacgaactccagaaagacaagatggccgaagcctacagcgagatcggcatgaagggcgagcggagaagaggcaagggccacgatggcctgtaccagggcctgagcaccgccaccaaggacacctatgacgccctgcacatgcaggccctgcctccaagaagggccaagcgatctggatctggagcaacaaacttctcactactcaaacaagcaggtgacgtggaggagaatcccgggcctactagtatggactggatttggcgcatccttttccttgtcggcgctgctaccggcgcgcattccttcgaagaagtgcagctggttgaatcaggtggcggcctggttcaacctggcggatctctgagactgagctgtgccgccagcggctacaccttcagcgactactttatgagctgggtccgacaggcccctggcaaaggacttgaatgggtcgccaccatcagcaatggcggcacctacacttactaccccgacagcgtgaagggcagattcaccatctccagagacaacagcaagaacaccctgtacctccagatgaactccctgagagccgaggacaccgccgtgtactactgcgccagattcgacggctacatcttcgactattggggccagggcaccctggtcacagtctcttctacgcgtatccagaaccctgatcctgccgtgtaccagctgcgggatagcaagagcagcgacaagagcgtgtgtctgttcaccgacttcgacagccagaccaacgtgtcccagagcaaggactccgacgtgtacatcaccgataagtgcgtgctggacatgcggagcatggacttcaagagcaactccgccgtggcctggtccaacaagtccgatttcgcctgcgccaacgccttcaacaacagcattatccccgaggacacattcttcccaagcagcgacgtgccctgcggtacccagagttttgggttgttggaccctaaattgtgctatctgttggacggaatcctgttcatttacggagtgatcctgaccgcattgttcctgcgggttaagttttccagatccgcagacgcacccgcttaccaacaagggcagaaccaactctacaatgaacttaatttggggcggagggaagagtacgacgttctggacaaaaggaggggacgagatcccgagatgggcggaaagcctcagcgaaggaagaatccgcaagaggggctttataacgaactccagaaagataaaatggcagaagcctatagtgagattgggatgaagggagaaaggaggaggggtaaaggtcacgatgggttgtaccaaggattgagcacagccactaaagatacctatgatgcgctccacatgcaggccctgccgccaaga

SEQ ID NO: 10537 - DNA, 2655 bp, Artificial Sequence
  Synthetic Polynucloetide
atggccttaccagtgaccgccttgctcctgccgctggccttgctgctccacgccgccaggccggacatccagatgacacagagccctagcagcctgtctgccagcgtgggagacagagtgaccatcacctgtagagccagccaggacatcagcaactacctgaactggtatcagcagaagcccggcaaggcccctaagctgctgatctactacaccagcagactgcacagcggcgtgcccagcagattttctggctctggcagcggcaccgacttcaccctgacaatatctagcctccagcctgaggacttcgccacctactattgccagcagggcaacaccctgccttacacatttggacagggcaccaaggtggaaatcaagagactcgaggggaaaccaattcccaaccctcttctgggactggattcaaccggcagcggcgaggacctgaagaacgtgttcccacctgaggtggccgtgttcgagcctagcgaggccgagatcagccacacccagaaagccaccctcgtgtgcctggctaccggcttctaccccgaccatgtggaactgtcttggtgggtcaacggcaaagaggtgcacagcggcgtgtctaccgacccccagccactgaaagaacagcccgccctgaacgacagccggtactgcctgagcagcagactgagagtgtccgccaccttctggcagaacccccggaaccacttcagatgccaggtgcagttctacggcctgagcgagaacgacgagtggacccaggacagagccaagcccgtgacccagatcgtgtctgccgaagcctggggcagagccgattgcggatcccagagcttcggcctgctggaccccaagctgtgctacctgctggatggcatcctgttcatctacggcgtgatcctgaccgccctgttcctgagagtgaagttcagcagaagcgccgacgcccctgcctaccagcagggacagaaccaactgtacaacgagctgaacctgggcagacgggaagagtacgacgtgctggacaagcggagaggcagggaccctgagatgggcggaaagccccagcggagaaagaacccccaggaaggactgtataacgaactccagaaagacaagatggccgaagcctacagcgagatcggcatgaagggcgagcggagaagaggcaagggccacgatggcctgtaccagggcctgagcaccgccaccaaggacacctatgacgccctgcacatgcaggccctgcctccaagaagggccaagcgatctggatctggagcaacaaacttctcactactcaaacaagcaggtgacgtggaggagaatcccgggcctactagtatggactggatttggcgcatccttttccttgtcggcgctgctaccggcgcgcattccttcgaagaagtgcagctggttgaatcaggtggcggcctggttcaacctggcggatctctgagactgagctgtgccgccagcggctacaccttcagcgactactttatgagctgggtccgacaggcccctggcaaaggacttgaatgggtcgccaccatcagcaatggcggcacctacacttactaccccgacagcgtgaagggcagattcaccatctccagagacaacagcaagaacaccctgtacctccagatgaactccctgagagccgaggacaccgccgtgtactactgcgccagattcgacggctacatcttcgactattggggccagggcaccctggtcacagtctcttctacgcgtgagcagaaactgatctcggaagaggatgggagcggcatccagaaccctgatcctgccgtgtaccagctgcgggatagcaagagcagcgacaagagcgtgtgtctgttcaccgacttcgacagccagaccaacgtgtcccagagcaaggactccgacgtgtacatcaccgataagaccgtgctggacatgcggagcatggacttcaagagcaactccgccgtggcctggtccaacaagtccgatttcgcctgcgccaacgccttcaacaacagcattatccccgaggacacattcttcccaagccccgagagcagctgcggtacccagagttttgggttgttggaccctaaattgtgctatctgttggacggaatcctgttcatttacggagtgatcctgaccgcattgttcctgaggagcaagcggtcacggctgctccacagcgattacatgaatatgacaccacgaagaccgggtcctactcgcaaacactaccaaccctacgcacctccccgcgactttgcagcgtaccgatctcgggttaagttttccagatccgcagacgcacccgcttaccaacaagggcagaaccaactctacaatgaacttaatttggggcggagggaagagtacgacgttctggacaaaaggaggggacgagatcccgagatgggcggaaagcctcagcgaaggaagaatccgcaagaggggctttataacgaactccagaaagataaaatggcagaagcctatagtgagattgggatgaagggagaaaggaggaggggtaaaggtcacgatgggttgtaccaaggattgagcacagccactaaagatacctatgatgcgctccacatgcaggccctgccgccaaga

SEQ ID NO: 10538 - DNA, 2778 bp, Artificial Sequence
  Synthetic Polynucloetide
atggccttaccagtgaccgccttgctcctgccgctggccttgctgctccacgccgccaggccggacatccagatgacacagagccctagcagcctgtctgccagcgtgggagacagagtgaccatcacctgtagagccagccaggacatcagcaactacctgaactggtatcagcagaagcccggcaaggcccctaagctgctgatctactacaccagcagactgcacagcggcgtgcccagcagattttctggctctggcagcggcaccgacttcaccctgacaatatctagcctccagcctgaggacttcgccacctactattgccagcagggcaacaccctgccttacacatttggacagggcaccaaggtggaaatcaagagactcgaggggaaaccaattcccaaccctcttctgggactggattcaaccggcagcggcgaggacctgaagaacgtgttcccacctgaggtggccgtgttcgagcctagcgaggccgagatcagccacacccagaaagccaccctcgtgtgcctggctaccggcttctaccccgaccatgtggaactgtcttggtgggtcaacggcaaagaggtgcacagcggcgtgtctaccgacccccagccactgaaagaacagcccgccctgaacgacagccggtactgcctgagcagcagactgagagtgtccgccaccttctggcagaacccccggaaccacttcagatgccaggtgcagttctacggcctgagcgagaacgacgagtggacccaggacagagccaagcccgtgacccagatcgtgtctgccgaagcctggggcagagccgattgcggatcccagagcttcggcctgctggaccccaagctgtgctacctgctggatggcatcctgttcatctacggcgtgatcctgaccgccctgttcctgaggagtaagaggagcaggctcctgcacagtgactacatgaacatgactccacgccgccccggacccacccgcaagcattaccagccctatgccccaccacgcgacttcgcagcctatcgctccagagtgaagttcagcagaagcgccgacgcccctgcctaccagcagggacagaaccaactgtacaacgagctgaacctgggcagacgggaagagtacgacgtgctggacaagcggagaggcagggaccctgagatgggcggaaagccccagcggagaaagaacccccaggaaggactgtataacgaactccagaaagacaagatggccgaagcctacagcgagatcggcatgaagggcgagcggagaagaggcaagggccacgatggcctgtaccagggcctgagcaccgccaccaaggacacctatgacgccctgcacatgcaggccctgcctccaagaagggccaagcgatctggatctggagcaacaaacttctcactactcaaacaagcaggtgacgtggaggagaatcccgggcctactagtatggactggatttggcgcatccttttccttgtcggcgctgctaccggcgcgcattccttcgaagaagtgcagctggttgaatcaggtggcggcctggttcaacctggcggatctctgagactgagctgtgccgccagcggctacaccttcagcgactactttatgagctgggtccgacaggcccctggcaaaggacttgaatgggtcgccaccatcagcaatggcggcacctacacttactaccccgacagcgtgaagggcagattcaccatctccagagacaacagcaagaacaccctgtacctccagatgaactccctgagagccgaggacaccgccgtgtactactgcgccagattcgacggctacatcttcgactattggggccagggcaccctggtcacagtctcttctacgcgtgagcagaaactgatctcggaagaggatgggagcggcatccagaaccctgatcctgccgtgtaccagctgcgggatagcaagagcagcgacaagagcgtgtgtctgttcaccgacttcgacagccagaccaacgtgtcccagagcaaggactccgacgtgtacatcaccgataagaccgtgctggacatgcggagcatggacttcaagagcaactccgccgtggcctggtccaacaagtccgatttcgcctgcgccaacgccttcaacaacagcattatccccgaggacacattcttcccaagccccgagagcagctgcggtacccagagttttgggttgttggaccctaaattgtgctatctgttggacggaatcctgttcatttacggagtgatcctgaccgcattgttcctgaggagcaagcggtcacggctgctccacagcgattacatgaatatgacaccacgaagaccgggtcctactcgcaaacactaccaaccctacgcacctccccgcgactttgcagcgtaccgatctcgggttaagttttccagatccgcagacgcacccgcttaccaacaagggcagaaccaactctacaatgaacttaatttggggcggagggaagagtacgacgttctggacaaaaggaggggacgagatcccgagatgggcggaaagcctcagcgaaggaagaatccgcaagaggggctttataacgaactccagaaagataaaatggcagaagcctatagtgagattgggatgaagggagaaaggaggaggggtaaaggtcacgatgggttgtaccaaggattgagcacagccactaaagatacctatgatgcgctccacatgcaggccctgccgccaaga

SEQ ID NO: 10539 - DNA, 2661 bp, Artificial Sequence
  Synthetic Polynucloetide
atggccttaccagtgaccgccttgctcctgccgctggccttgctgctccacgccgccaggccggacatccagatgacacagagccctagcagcctgtctgccagcgtgggagacagagtgaccatcacctgtagagccagccaggacatcagcaactacctgaactggtatcagcagaagcccggcaaggcccctaagctgctgatctactacaccagcagactgcacagcggcgtgcccagcagattttctggctctggcagcggcaccgacttcaccctgacaatatctagcctccagcctgaggacttcgccacctactattgccagcagggcaacaccctgccttacacatttggacagggcaccaaggtggaaatcaagagactcgaggggaaaccaattcccaaccctcttctgggactggattcaaccggcagcggcgaggacctgaagaacgtgttcccacctgaggtggccgtgttcgagcctagcgaggccgagatcagccacacccagaaagccaccctcgtgtgcctggctaccggcttctaccccgaccatgtggaactgtcttggtgggtcaacggcaaagaggtgcacagcggcgtgtctaccgacccccagccactgaaagaacagcccgccctgaacgacagccggtactgcctgagcagcagactgagagtgtccgccaccttctggcagaacccccggaaccacttcagatgccaggtgcagttctacggcctgagcgagaacgacgagtggacccaggacagagccaagcccgtgacccagatcgtgtctgccgaagcctggggcagagccgattgcggatcccagagcttcggcctgctggaccccaagctgtgctacctgctggatggcatcctgttcatctacggcgtgatcctgaccgccctgttcctgagagtgaagttcagcagaagcgccgacgcccctgcctaccagcagggacagaaccaactgtacaacgagctgaacctgggcagacgggaagagtacgacgtgctggacaagcggagaggcagggaccctgagatgggcggaaagccccagcggagaaagaacccccaggaaggactgtataacgaactccagaaagacaagatggccgaagcctacagcgagatcggcatgaagggcgagcggagaagaggcaagggccacgatggcctgtaccagggcctgagcaccgccaccaaggacacctatgacgccctgcacatgcaggccctgcctccaagaagggccaagcgatctggatctggagcaacaaacttctcactactcaaacaagcaggtgacgtggaggagaatcccgggcctactagtatggactggatttggcgcatccttttccttgtcggcgctgctaccggcgcgcattccttcgaagaagtgcagctggttgaatcaggtggcggcctggttcaacctggcggatctctgagactgagctgtgccgccagcggctacaccttcagcgactactttatgagctgggtccgacaggcccctggcaaaggacttgaatgggtcgccaccatcagcaatggcggcacctacacttactaccccgacagcgtgaagggcagattcaccatctccagagacaacagcaagaacaccctgtacctccagatgaactccctgagagccgaggacaccgccgtgtactactgcgccagattcgacggctacatcttcgactattggggccagggcaccctggtcacagtctcttctacgcgtgagcagaaactgatctcggaagaggatctggggagcggcatccagaaccctgatcctgccgtgtaccagctgcgggatagcaagagcagcgacaagagcgtgtgtctgttcaccgacttcgacagccagaccaacgtgtcccagagcaaggactccgacgtgtacatcaccgataagaccgtgctggacatgcggagcatggacttcaagagcaactccgccgtggcctggtccaacaagtccgatttcgcctgcgccaacgccttcaacaacagcattatccccgaggacacattcttcccaagccccgagagcagctgcggtacccagagttttgggttgttggaccctaaattgtgctatctgttggacggaatcctgttcatttacggagtgatcctgaccgcattgttcctgaagagaggccggaagaagctgctgtacatcttcaagcagcctttcatgcggcccgtgcagaccacccaggaagaggacggctgctcctgccggttccccgaggaagaagaaggcggctgcgagctgcgggttaagttttccagatccgcagacgcacccgcttaccaacaagggcagaaccaactctacaatgaacttaatttggggcggagggaagagtacgacgttctggacaaaaggaggggacgagatcccgagatgggcggaaagcctcagcgaaggaagaatccgcaagaggggctttataacgaactccagaaagataaaatggcagaagcctatagtgagattgggatgaagggagaaaggaggaggggtaaaggtcacgatgggttgtaccaaggattgagcacagccactaaagatacctatgatgcgctccacatgcaggccctgccgccaaga

SEQ ID NO: 10540 - DNA, 2787 bp, Artificial Sequence
  Synthetic Polynucloetide
atggccttaccagtgaccgccttgctcctgccgctggccttgctgctccacgccgccaggccggacatccagatgacacagagccctagcagcctgtctgccagcgtgggagacagagtgaccatcacctgtagagccagccaggacatcagcaactacctgaactggtatcagcagaagcccggcaaggcccctaagctgctgatctactacaccagcagactgcacagcggcgtgcccagcagattttctggctctggcagcggcaccgacttcaccctgacaatatctagcctccagcctgaggacttcgccacctactattgccagcagggcaacaccctgccttacacatttggacagggcaccaaggtggaaatcaagagactcgaggggaaaccaattcccaaccctcttctgggactggattcaaccggcagcggcgaggacctgaagaacgtgttcccacctgaggtggccgtgttcgagcctagcgaggccgagatcagccacacccagaaagccaccctcgtgtgcctggctaccggcttctaccccgaccatgtggaactgtcttggtgggtcaacggcaaagaggtgcacagcggcgtgtctaccgacccccagccactgaaagaacagcccgccctgaacgacagccggtactgcctgagcagcagactgagagtgtccgccaccttctggcagaacccccggaaccacttcagatgccaggtgcagttctacggcctgagcgagaacgacgagtggacccaggacagagccaagcccgtgacccagatcgtgtctgccgaagcctggggcagagccgattgcggatcccagagcttcggcctgctggaccccaagctgtgctacctgctggatggcatcctgttcatctacggcgtgatcctgaccgccctgttcctgaaacggggcagaaagaaactcctgtatatattcaaacaaccatttatgagaccagtacaaactactcaagaggaagatggctgtagctgccgatttccagaagaagaagaaggaggatgtgaactgagagtgaagttcagcagaagcgccgacgcccctgcctaccagcagggacagaaccaactgtacaacgagctgaacctgggcagacgggaagagtacgacgtgctggacaagcggagaggcagggaccctgagatgggcggaaagccccagcggagaaagaacccccaggaaggactgtataacgaactccagaaagacaagatggccgaagcctacagcgagatcggcatgaagggcgagcggagaagaggcaagggccacgatggcctgtaccagggcctgagcaccgccaccaaggacacctatgacgccctgcacatgcaggccctgcctccaagaagggccaagcgatctggatctggagcaacaaacttctcactactcaaacaagcaggtgacgtggaggagaatcccgggcctactagtatggactggatttggcgcatccttttccttgtcggcgctgctaccggcgcgcattccttcgaagaagtgcagctggttgaatcaggtggcggcctggttcaacctggcggatctctgagactgagctgtgccgccagcggctacaccttcagcgactactttatgagctgggtccgacaggcccctggcaaaggacttgaatgggtcgccaccatcagcaatggcggcacctacacttactaccccgacagcgtgaagggcagattcaccatctccagagacaacagcaagaacaccctgtacctccagatgaactccctgagagccgaggacaccgccgtgtactactgcgccagattcgacggctacatcttcgactattggggccagggcaccctggtcacagtctcttctacgcgtgagcagaaactgatctcggaagaggatctggggagcggcatccagaaccctgatcctgccgtgtaccagctgcgggatagcaagagcagcgacaagagcgtgtgtctgttcaccgacttcgacagccagaccaacgtgtcccagagcaaggactccgacgtgtacatcaccgataagaccgtgctggacatgcggagcatggacttcaagagcaactccgccgtggcctggtccaacaagtccgatttcgcctgcgccaacgccttcaacaacagcattatccccgaggacacattcttcccaagccccgagagcagctgcggtacccagagttttgggttgttggaccctaaattgtgctatctgttggacggaatcctgttcatttacggagtgatcctgaccgcattgttcctgaagagaggccggaagaagctgctgtacatcttcaagcagcctttcatgcggcccgtgcagaccacccaggaagaggacggctgctcctgccggttccccgaggaagaagaaggcggctgcgagctgcgggttaagttttccagatccgcagacgcacccgcttaccaacaagggcagaaccaactctacaatgaacttaatttggggcggagggaagagtacgacgttctggacaaaaggaggggacgagatcccgagatgggcggaaagcctcagcgaaggaagaatccgcaagaggggctttataacgaactccagaaagataaaatggcagaagcctatagtgagattgggatgaagggagaaaggaggaggggtaaaggtcacgatgggttgtaccaaggattgagcacagccactaaagatacctatgatgcgctccacatgcaggccctgccgccaaga

SEQ ID NO: 10541 - DNA, 2460 bp, Artificial Sequence
  Synthetic Polynucloetide
atggccttaccagtgaccgccttgctcctgccgctggccttgctgctccacgccgccaggccggacatccagatgacacagagccctagcagcctgtctgccagcgtgggagacagagtgaccatcacctgtagagccagccaggacatcagcaactacctgaactggtatcagcagaagcccggcaaggcccctaagctgctgatctactacaccagcagactgcacagcggcgtgcccagcagattttctggctctggcagcggcaccgacttcaccctgacaatatctagcctccagcctgaggacttcgccacctactattgccagcagggcaacaccctgccttacacatttggacagggcaccaaggtggaaatcaagagactcgagcagagcttcggcctgctggaccccaagctgtgctacctgctggatggcatcctgttcatctacggcgtgatcctgaccgccctgttcctgagagtgaagttcagcagaagcgccgacgcccctgcctaccagcagggacagaaccaactgtacaacgagctgaacctgggcagacgggaagagtacgacgtgctggacaagcggagaggcagggaccctgagatgggcggaaagccccagcggagaaagaacccccaggaaggactgtataacgaactccagaaagacaagatggccgaagcctacagcgagatcggcatgaagggcgagcggagaagaggcaagggccacgatggcctgtaccagggcctgagcaccgccaccaaggacacctatgacgccctgcacatgcaggccctgcctccaagaagggccaagcgatctggatctggagcaacaaacttctcactactcaaacaagcaggtgacgtggaggagaatcccgggcctactagtatggactggatttggcgcatccttttccttgtcggcgctgctaccggcgcgcattccttcgaagaagtgcagctggttgaatcaggtggcggcctggttcaacctggcggatctctgagactgagctgtgccgccagcggctacaccttcagcgactactttatgagctgggtccgacaggcccctggcaaaggacttgaatgggtcgccaccatcagcaatggcggcacctacacttactaccccgacagcgtgaagggcagattcaccatctccagagacaacagcaagaacaccctgtacctccagatgaactccctgagagccgaggacaccgccgtgtactactgcgccagattcgacggctacatcttcgactattggggccagggcaccctggtcacagtctcttctacgcgtcagagttttgggttgttggaccctaaattgtgctatctgttggacggaatcctgttcatttacggagtgatcctgaccgcattgttcctgcgggttaagttttccagatccgcagacgcacccgcttaccaacaagggcagaaccaactctacaatgaacttaatttggggcggagggaagagtacgacgttctggacaaaaggaggggacgagatcccgagatgggcggaaagcctcagcgaaggaagaatccgcaagaggggctttataacgaactccagaaagataaaatggcagaagcctatagtgagattgggatgaagggagaaaggaggaggggtaaaggtcacgatgggttgtaccaaggattgagcacagccactaaagatacctatgatgcgctccacatgcaggccctgccgccaagacgcgccaagagaagcggatctggcgtgaagcagaccctgaatttcgacctgctgaagctggctggcgacgtggaatccaacccaggcccttctagaggccatatgaccgagtacaagcccacggtgcgcctcgccacccgcgacgacgtccccagggccgtacgcaccctcgccgccgcgttcgccgactaccccgccacgcgccacaccgtcgatccggaccgccacatcgagcgggtcaccgagctgcaagaactcttcctcacgcgcgtcgggctcgacatcggcaaggtgtgggtcgcggacgacggcgccgcggtggcggtctggaccacgccggagagcgtcgaagcgggggcggtgttcgccgagatcggcccgcgcatggccgagttgagcggttcccggctggccgcgcagcaacagatggaaggcctcctggcgccgcaccggcccaaggagcccgcgtggttcctggccaccgtcggcgtctcgcccgaccaccagggcaagggtctgggcagcgccgtcgtgctccccggagtggaggcggccgagcgcgccggggtgcccgccttcctggagacctccgcgccccgcaacctccccttctacgagcggctcggcttcaccgtcaccgccgacgtcgaggtgcccgaaggaccgcgcacctggtgcatgacccgcaagcccggtgcctga

SEQ ID NO: 10542 - DNA, 1932 bp, Artificial Sequence
  Synthetic Polynucloetide
atggccttaccagtgaccgccttgctcctgccgctggccttgctgctccacgccgccaggccggacatccagatgacacagagccctagcagcctgtctgccagcgtgggagacagagtgaccatcacctgtagagccagccaggacatcagcaactacctgaactggtatcagcagaagcccggcaaggcccctaagctgctgatctactacaccagcagactgcacagcggcgtgcccagcagattttctggctctggcagcggcaccgacttcaccctgacaatatctagcctccagcctgaggacttcgccacctactattgccagcagggcaacaccctgccttacacatttggacagggcaccaaggtggaaatcaagagactcgagggacagcctaaggccaatcctaccgtgacactgttccctccaagcagcgaagaactccaggccaacaaggccacacttgtgtgcctgatctccgacttctaccctggggctgtgacagtggcttggaaggccgatggatctcctgtgaaagccggcgtggaaaccaccaagccatccaagcagagcaacaacaaatacgccgccagctcctacctgagcctgacacctgagcagtggaagtcccacagatcctacagctgccaagtgacccacgaaggcagcaccgtggaaaagacagtggcccctacagagtgcagccccatcaagaccgatgtgattacaatggaccccaaggacaactgctccaaggacgccaacgataccctgctgctccagctgaccaacaccagcgcctactacatgtacttgttgctgctgctgaagtccgtggtgtacttcgccatcatcacatgctgcctgctgcggagaaccgccttctgctgcaacggcgagaagtctagggccaagcgatctggatctggagcaacaaacttctcactactcaaacaagcaggtgacgtggaggagaatcccgggcctactagtatggactggatttggcgcatccttttccttgtcggcgctgctaccggcgcgcattccttcgaagaagtgcagctggttgaatcaggtggcggcctggttcaacctggcggatctctgagactgagctgtgccgccagcggctacaccttcagcgactactttatgagctgggtccgacaggcccctggcaaaggacttgaatgggtcgccaccatcagcaatggcggcacctacacttactaccccgacagcgtgaagggcagattcaccatctccagagacaacagcaagaacaccctgtacctccagatgaactccctgagagccgaggacaccgccgtgtactactgcgccagattcgacggctacatcttcgactattggggccagggcaccctggtcacagtctcttctacgcgtgcctctacaaagggaccctccgtgtttcctctggctcccagcagcaagtctacaagcggaggaacagccgctctgggctgcctggtcaaggattactttcccgagcctgtgaccgtgtcctggaatagcggagcactgacaagcggcgtgcacacctttccagccgtgctgcaaagcagcggcctgtactctctgagcagcgtggtcacagtgcctagctctagcctgggcacccagacctacatctgcaatgtgaaccacaagcctagcaacaccaaggtggacaagagagtggaacccaagagctgtgaagtgaaaaccgactccaccgaccacgtgaagcccaaagagacagagaacaccaagcagcccagcaagagctgccacaagcccaaggccatcgtgcacaccgagaaagtgaacatgatgagcctgaccgtgctgggcctgcggatgctgttcgccaaaaccgtggccgtgaacttcctgctgaccgccaagctgttcttcctc

SEQ ID NO: 10543 - DNA, 1866 bp, Artificial Sequence
  Synthetic Polynucloetide
atggccttaccagtgaccgccttgctcctgccgctggccttgctgctccacgccgccaggccggacatccagatgacacagagccctagcagcctgtctgccagcgtgggagacagagtgaccatcacctgtagagccagccaggacatcagcaactacctgaactggtatcagcagaagcccggcaaggcccctaagctgctgatctactacaccagcagactgcacagcggcgtgcccagcagattttctggctctggcagcggcaccgacttcaccctgacaatatctagcctccagcctgaggacttcgccacctactattgccagcagggcaacaccctgccttacacatttggacagggcaccaaggtggaaatcaagagactcgagggacagcctaaggccaatcctaccgtgacactgttccctccaagcagcgaagaactccaggccaacaaggccacacttgtgtgcctgatctccgacttctaccctggggctgtgacagtggcttggaaggccgatggatctcctgtgaaagccggcgtggaaaccaccaagccatccaagcagagcaacaacaaatacgccgccagctcctacctgagcctgacacctgagcagtggaagtcccacagatcctacagctgccaagtgacccacgaaggcagcaccgtggaaaagacagtggcccctacagagtgcagcggcagagccgattgcggcatcaccagcgccagctaccaccagggcgtgctgagcgccaccatcctgtacgagatcctgctgggcaaggccaccctgtacgccgtgctggtgtctgccctggtgctgatggctatggtcaagcggaaggacagccggggaagggccaagcgatctggatctggagcaacaaacttctcactactcaaacaagcaggtgacgtggaggagaatcccgggcctactagtatggactggatttggcgcatccttttccttgtcggcgctgctaccggcgcgcattccttcgaagaagtgcagctggttgaatcaggtggcggcctggttcaacctggcggatctctgagactgagctgtgccgccagcggctacaccttcagcgactactttatgagctgggtccgacaggcccctggcaaaggacttgaatgggtcgccaccatcagcaatggcggcacctacacttactaccccgacagcgtgaagggcagattcaccatctccagagacaacagcaagaacaccctgtacctccagatgaactccctgagagccgaggacaccgccgtgtactactgcgccagattcgacggctacatcttcgactattggggccagggcaccctggtcacagtctcttctacgcgtgcctctacaaagggaccctccgtgtttcctctggctcccagcagcaagtctacaagcggaggaacagccgctctgggctgcctggtcaaggattactttcccgagcctgtgaccgtgtcctggaatagcggagcactgacaagcggcgtgcacacctttccagccgtgctgcaaagcagcggcctgtactctctgagcagcgtggtcacagtgcctagctctagcctgggcacccagacctacatctgcaatgtgaaccacaagcctagcaacaccaaggtggacaagagagtggaacccaagagctgtatccccgaggacacattcttcccaagcagcgacgtgccctgcgacgtgaagctggtggaaaagagcttcgagacagacaccaacctgaacttccagaacctgagcgtgatcggcttcagaatcctgctgctgaaagtggccggctttaacctgctgatgaccctgcggctgtggtccagc

SEQ ID NO: 10544 - DNA, 1866 bp, Artificial Sequence
  Synthetic Polynucloetide
atggccttaccagtgaccgccttgctcctgccgctggccttgctgctccacgccgccaggccggacatccagatgacacagagccctagcagcctgtctgccagcgtgggagacagagtgaccatcacctgtagagccagccaggacatcagcaactacctgaactggtatcagcagaagcccggcaaggcccctaagctgctgatctactacaccagcagactgcacagcggcgtgcccagcagattttctggctctggcagcggcaccgacttcaccctgacaatatctagcctccagcctgaggacttcgccacctactattgccagcagggcaacaccctgccttacacatttggacagggcaccaaggtggaaatcaagagactcgagggacagcctaaggccaatcctaccgtgacactgttccctccaagcagcgaagaactccaggccaacaaggccacacttgtgtgcctgatctccgacttctaccctggggctgtgacagtggcttggaaggccgatggatctcctgtgaaagccggcgtggaaaccaccaagccatccaagcagagcaacaacaaatacgccgccagctcctacctgagcctgacacctgagcagtggaagtcccacagatcctacagctgccaagtgacccacgaaggcagcaccgtggaaaagacagtggcccctacagagtgcagcggcagagccgattgcggctttaccagcgagagctaccagcagggcgtgctgagcgccaccatcctgtacgagatcctgctgggcaaggccaccctgtacgccgtgctggtgtctgccctggtgctgatggctatggtcaagcggaaggacagccggggaagggccaagcgatctggatctggagcaacaaacttctcactactcaaacaagcaggtgacgtggaggagaatcccgggcctactagtatggactggatttggcgcatccttttccttgtcggcgctgctaccggcgcgcattccttcgaagaagtgcagctggttgaatcaggtggcggcctggttcaacctggcggatctctgagactgagctgtgccgccagcggctacaccttcagcgactactttatgagctgggtccgacaggcccctggcaaaggacttgaatgggtcgccaccatcagcaatggcggcacctacacttactaccccgacagcgtgaagggcagattcaccatctccagagacaacagcaagaacaccctgtacctccagatgaactccctgagagccgaggacaccgccgtgtactactgcgccagattcgacggctacatcttcgactattggggccagggcaccctggtcacagtctcttctacgcgtgcctctacaaagggaccctccgtgtttcctctggctcccagcagcaagtctacaagcggaggaacagccgctctgggctgcctggtcaaggattactttcccgagcctgtgaccgtgtcctggaatagcggagcactgacaagcggcgtgcacacctttccagccgtgctgcaaagcagcggcctgtactctctgagcagcgtggtcacagtgcctagctctagcctgggcacccagacctacatctgcaatgtgaaccacaagcctagcaacaccaaggtggacaagagagtggaacccaagagctgtatccccgaggacacattcttcccaagccccgagagcagctgcgacgtgaagctggtggaaaagagcttcgagacagacaccaacctgaacttccagaacctgagcgtgatcggcttcagaatcctgctgctgaaagtggccggctttaacctgctgatgaccctgcggctgtggtccagc

SEQ ID NO: 10545 - DNA, 1344 bp, Artificial Sequence
  Synthetic Polynucloetide
atggccttaccagtgaccgccttgctcctgccgctggccttgctgctccacgccgccaggccggacatccagatgacacagagccctagcagcctgtctgccagcgtgggagacagagtgaccatcacctgtagagccagccaggacatcagcaactacctgaactggtatcagcagaagcccggcaaggcccctaagctgctgatctactacaccagcagactgcacagcggcgtgcccagcagattttctggctctggcagcggcaccgacttcaccctgacaatatctagcctccagcctgaggacttcgccacctactattgccagcagggcaacaccctgccttacacatttggacagggcaccaaggtggaaatcaagagaggcggaggcggaagtggaggcggaggatctggcggcggaggctctgaagtgcagctggttgaatcaggtggcggcctggttcaacctggcggatctctgagactgagctgtgccgccagcggctacaccttcagcgactactttatgagctgggtccgacaggcccctggcaaaggacttgaatgggtcgccaccatcagcaatggcggcacctacacttactaccccgacagcgtgaagggcagattcaccatctccagagacaacagcaagaacaccctgtacctccagatgaactccctgagagccgaggacaccgccgtgtactactgcgccagattcgacggctacatcttcgactattggggccagggcaccctggtcacagtctcttctacgcgtgacggtaacgaggagatgggaggaatcactcaaaccccttacaaagtctcaatttcaggaacaactgttatccttacatgtccccagtatcctggcagcgagatcctttggcagcataacgacaagaatatagggggagatgaagacgataagaatatcggatctgacgaggatcacttgagcctgaaagagttctccgagcttgaacaaagcggatattatgtgtgctatccgcgcgggtcaaagccggaagacgctaacttttacctttatctccgagccagagtgtgcgaaaattgcatggaaatggacgttatgtccgttgctacaatagttatcgtagatatatgcatcacgggtggactgcttctgctggtttattattggtccaagaatagaaaggccaaagctaaacccgtgaccagaggcgctggcgcaggcggaaggcaaaggggacaaaacaaagaacggccaccaccagtgccaaatccagattatgagcctattcggaaaggacagagggacctgtactctggcctgaatcagagaagaatc

SEQ ID NO: 10546 - DNA, 1239 bp, Artificial Sequence
  Synthetic Polynucloetide
atggccttaccagtgaccgccttgctcctgccgctggccttgctgctccacgccgccaggccggacatccagatgacacagagccctagcagcctgtctgccagcgtgggagacagagtgaccatcacctgtagagccagccaggacatcagcaactacctgaactggtatcagcagaagcccggcaaggcccctaagctgctgatctactacaccagcagactgcacagcggcgtgcccagcagattttctggctctggcagcggcaccgacttcaccctgacaatatctagcctccagcctgaggacttcgccacctactattgccagcagggcaacaccctgccttacacatttggacagggcaccaaggtggaaatcaagagaggcggaggcggaagtggaggcggaggatctggcggcggaggctctgaagtgcagctggttgaatcaggtggcggcctggttcaacctggcggatctctgagactgagctgtgccgccagcggctacaccttcagcgactactttatgagctgggtccgacaggcccctggcaaaggacttgaatgggtcgccaccatcagcaatggcggcacctacacttactaccccgacagcgtgaagggcagattcaccatctccagagacaacagcaagaacaccctgtacctccagatgaactccctgagagccgaggacaccgccgtgtactactgcgccagattcgacggctacatcttcgactattggggccagggcaccctggtcacagtctcttctacgcgtttcaagatccccatcgaggaactggaagatcgggtgttcgtgaactgcaacacctctatcacctgggtggaaggcaccgtgggaacactgctgagcgacatcaccagactggacctcggcaagcggattctggaccctcggggcatctacagatgcaacggcaccgacatctacaaggacaaagaaagcaccgtgcaggtccactacagaatgtgccagtcctgcgtggaactggaccctgctacagtggccggcatcatcgtgaccgatgtgatcgctactctgctgctggctctgggagtgttctgcttcgccggacacgaaacaggcagactgtctggcgctgccgatacacaggccctgctgagaaacgaccaagtgtatcagcccctgcgcgacagagatgatgcccagtattctcacctcggcggcaactgggctagaaacaag

SEQ ID NO: 10547 - DNA, 1269 bp, Artificial Sequence
  Synthetic Polynucloetide
atggccttaccagtgaccgccttgctcctgccgctggccttgctgctccacgccgccaggccggacatccagatgacacagagccctagcagcctgtctgccagcgtgggagacagagtgaccatcacctgtagagccagccaggacatcagcaactacctgaactggtatcagcagaagcccggcaaggcccctaagctgctgatctactacaccagcagactgcacagcggcgtgcccagcagattttctggctctggcagcggcaccgacttcaccctgacaatatctagcctccagcctgaggacttcgccacctactattgccagcagggcaacaccctgccttacacatttggacagggcaccaaggtggaaatcaagagaggcggaggcggaagtggaggcggaggatctggcggcggaggctctgaagtgcagctggttgaatcaggtggcggcctggttcaacctggcggatctctgagactgagctgtgccgccagcggctacaccttcagcgactactttatgagctgggtccgacaggcccctggcaaaggacttgaatgggtcgccaccatcagcaatggcggcacctacacttactaccccgacagcgtgaagggcagattcaccatctccagagacaacagcaagaacaccctgtacctccagatgaactccctgagagccgaggacaccgccgtgtactactgcgccagattcgacggctacatcttcgactattggggccagggcaccctggtcacagtctcttctacgcgtcagagcatcaagggcaaccacctggtcaaggtgtacgactaccaagaggacggcagcgtgctgctgacatgtgatgccgaggccaagaacatcacctggtttaaggacggcaagatgatcggcttcctgaccgaggacaagaagaagtggaacctgggcagcaacgctaaggaccccagaggcatgtatcagtgcaagggcagccagaacaagagcaagcccctccaggtgtactaccggatgtgccagaactgcatcgagctgaacgccgctaccatcagcggctttctgttcgccgagatcgtgtccatcttcgtgctggccgtgggcgtgtactttatcgctggacaggatggcgtgcggcagagcagagcttccgataagcaaaccctgctgcctaacgaccagctgtaccagcctctgaaggacagagaggacgaccagtacagccacctccagggcaatcagctgagaagaaac

SEQ ID NO: 10548 - DNA, 1218 bp, Artificial Sequence
  Synthetic Polynucloetide
atggccttaccagtgaccgccttgctcctgccgctggccttgctgctccacgccgccaggccggacatccagatgacacagagccctagcagcctgtctgccagcgtgggagacagagtgaccatcacctgtagagccagccaggacatcagcaactacctgaactggtatcagcagaagcccggcaaggcccctaagctgctgatctactacaccagcagactgcacagcggcgtgcccagcagattttctggctctggcagcggcaccgacttcaccctgacaatatctagcctccagcctgaggacttcgccacctactattgccagcagggcaacaccctgccttacacatttggacagggcaccaaggtggaaatcaagagaggcggaggcggaagtggaggcggaggatctggcggcggaggctctgaagtgcagctggttgaatcaggtggcggcctggttcaacctggcggatctctgagactgagctgtgccgccagcggctacaccttcagcgactactttatgagctgggtccgacaggcccctggcaaaggacttgaatgggtcgccaccatcagcaatggcggcacctacacttactaccccgacagcgtgaagggcagattcaccatctccagagacaacagcaagaacaccctgtacctccagatgaactccctgagagccgaggacaccgccgtgtactactgcgccagattcgacggctacatcttcgactattggggccagggcaccctggtcacagtctcttctacgcgtcagagttttgggttgttggaccctaaattgtgctatctgttggacggaatcctgttcatttacggagtgatcctgaccgcattgttcctgcgggttaagttttccagatccgcagacgcacccgcttaccaacaagggcagaaccaactctacaatgaacttaatttggggcggagggaagagtacgacgttctggacaaaaggaggggacgagatcccgagatgggcggaaagcctcagcgaaggaagaatccgcaagaggggctttataacgaactccagaaagataaaatggcagaagcctatagtgagattgggatgaagggagaaaggaggaggggtaaaggtcacgatgggttgtaccaaggattgagcacagccactaaagatacctatgatgcgctccacatgcaggccctgccgccaaga

SEQ ID NO: 10549 - DNA, 1344 bp, Artificial Sequence
  Synthetic Polynucloetide
atggccttaccagtgaccgccttgctcctgccgctggccttgctgctccacgccgccaggccggaagtgcagctggttgaatcaggtggcggcctggttcaacctggcggatctctgagactgagctgtgccgccagcggctacaccttcagcgactactttatgagctgggtccgacaggcccctggcaaaggacttgaatgggtcgccaccatcagcaatggcggcacctacacttactaccccgacagcgtgaagggcagattcaccatctccagagacaacagcaagaacaccctgtacctccagatgaactccctgagagccgaggacaccgccgtgtactactgcgccagattcgacggctacatcttcgactattggggccagggcaccctggtcacagtctcttctggcggaggcggaagtggaggcggaggatctggcggcggaggctctgacatccagatgacacagagccctagcagcctgtctgccagcgtgggagacagagtgaccatcacctgtagagccagccaggacatcagcaactacctgaactggtatcagcagaagcccggcaaggcccctaagctgctgatctactacaccagcagactgcacagcggcgtgcccagcagattttctggctctggcagcggcaccgacttcaccctgacaatatctagcctccagcctgaggacttcgccacctactattgccagcagggcaacaccctgccttacacatttggacagggcaccaaggtggaaatcaagagaacgcgtgacggtaacgaggagatgggaggaatcactcaaaccccttacaaagtctcaatttcaggaacaactgttatccttacatgtccccagtatcctggcagcgagatcctttggcagcataacgacaagaatatagggggagatgaagacgataagaatatcggatctgacgaggatcacttgagcctgaaagagttctccgagcttgaacaaagcggatattatgtgtgctatccgcgcgggtcaaagccggaagacgctaacttttacctttatctccgagccagagtgtgcgaaaattgcatggaaatggacgttatgtccgttgctacaatagttatcgtagatatatgcatcacgggtggactgcttctgctggtttattattggtccaagaatagaaaggccaaagctaaacccgtgaccagaggcgctggcgcaggcggaaggcaaaggggacaaaacaaagaacggccaccaccagtgccaaatccagattatgagcctattcggaaaggacagagggacctgtactctggcctgaatcagagaagaatc

SEQ ID NO: 10550 - DNA, 1239 bp, Artificial Sequence
  Synthetic Polynucloetide
atggccttaccagtgaccgccttgctcctgccgctggccttgctgctccacgccgccaggccggaagtgcagctggttgaatcaggtggcggcctggttcaacctggcggatctctgagactgagctgtgccgccagcggctacaccttcagcgactactttatgagctgggtccgacaggcccctggcaaaggacttgaatgggtcgccaccatcagcaatggcggcacctacacttactaccccgacagcgtgaagggcagattcaccatctccagagacaacagcaagaacaccctgtacctccagatgaactccctgagagccgaggacaccgccgtgtactactgcgccagattcgacggctacatcttcgactattggggccagggcaccctggtcacagtctcttctggcggaggcggaagtggaggcggaggatctggcggcggaggctctgacatccagatgacacagagccctagcagcctgtctgccagcgtgggagacagagtgaccatcacctgtagagccagccaggacatcagcaactacctgaactggtatcagcagaagcccggcaaggcccctaagctgctgatctactacaccagcagactgcacagcggcgtgcccagcagattttctggctctggcagcggcaccgacttcaccctgacaatatctagcctccagcctgaggacttcgccacctactattgccagcagggcaacaccctgccttacacatttggacagggcaccaaggtggaaatcaagagaacgcgtttcaagatccccatcgaggaactggaagatcgggtgttcgtgaactgcaacacctctatcacctgggtggaaggcaccgtgggaacactgctgagcgacatcaccagactggacctcggcaagcggattctggaccctcggggcatctacagatgcaacggcaccgacatctacaaggacaaagaaagcaccgtgcaggtccactacagaatgtgccagtcctgcgtggaactggaccctgctacagtggccggcatcatcgtgaccgatgtgatcgctactctgctgctggctctgggagtgttctgcttcgccggacacgaaacaggcagactgtctggcgctgccgatacacaggccctgctgagaaacgaccaagtgtatcagcccctgcgcgacagagatgatgcccagtattctcacctcggcggcaactgggctagaaacaag

SEQ ID NO: 10551 - DNA, 1269 bp, Artificial Sequence
  Synthetic Polynucloetide
atggccttaccagtgaccgccttgctcctgccgctggccttgctgctccacgccgccaggccggaagtgcagctggttgaatcaggtggcggcctggttcaacctggcggatctctgagactgagctgtgccgccagcggctacaccttcagcgactactttatgagctgggtccgacaggcccctggcaaaggacttgaatgggtcgccaccatcagcaatggcggcacctacacttactaccccgacagcgtgaagggcagattcaccatctccagagacaacagcaagaacaccctgtacctccagatgaactccctgagagccgaggacaccgccgtgtactactgcgccagattcgacggctacatcttcgactattggggccagggcaccctggtcacagtctcttctggcggaggcggaagtggaggcggaggatctggcggcggaggctctgacatccagatgacacagagccctagcagcctgtctgccagcgtgggagacagagtgaccatcacctgtagagccagccaggacatcagcaactacctgaactggtatcagcagaagcccggcaaggcccctaagctgctgatctactacaccagcagactgcacagcggcgtgcccagcagattttctggctctggcagcggcaccgacttcaccctgacaatatctagcctccagcctgaggacttcgccacctactattgccagcagggcaacaccctgccttacacatttggacagggcaccaaggtggaaatcaagagaacgcgtcagagcatcaagggcaaccacctggtcaaggtgtacgactaccaagaggacggcagcgtgctgctgacatgtgatgccgaggccaagaacatcacctggtttaaggacggcaagatgatcggcttcctgaccgaggacaagaagaagtggaacctgggcagcaacgctaaggaccccagaggcatgtatcagtgcaagggcagccagaacaagagcaagcccctccaggtgtactaccggatgtgccagaactgcatcgagctgaacgccgctaccatcagcggctttctgttcgccgagatcgtgtccatcttcgtgctggccgtgggcgtgtactttatcgctggacaggatggcgtgcggcagagcagagcttccgataagcaaaccctgctgcctaacgaccagctgtaccagcctctgaaggacagagaggacgaccagtacagccacctccagggcaatcagctgagaagaaac

SEQ ID NO: 10552 - DNA, 1218 bp, Artificial Sequence
  Synthetic Polynucloetide
atggccttaccagtgaccgccttgctcctgccgctggccttgctgctccacgccgccaggccggaagtgcagctggttgaatcaggtggcggcctggttcaacctggcggatctctgagactgagctgtgccgccagcggctacaccttcagcgactactttatgagctgggtccgacaggcccctggcaaaggacttgaatgggtcgccaccatcagcaatggcggcacctacacttactaccccgacagcgtgaagggcagattcaccatctccagagacaacagcaagaacaccctgtacctccagatgaactccctgagagccgaggacaccgccgtgtactactgcgccagattcgacggctacatcttcgactattggggccagggcaccctggtcacagtctcttctggcggaggcggaagtggaggcggaggatctggcggcggaggctctgacatccagatgacacagagccctagcagcctgtctgccagcgtgggagacagagtgaccatcacctgtagagccagccaggacatcagcaactacctgaactggtatcagcagaagcccggcaaggcccctaagctgctgatctactacaccagcagactgcacagcggcgtgcccagcagattttctggctctggcagcggcaccgacttcaccctgacaatatctagcctccagcctgaggacttcgccacctactattgccagcagggcaacaccctgccttacacatttggacagggcaccaaggtggaaatcaagagaacgcgtcagagttttgggttgttggaccctaaattgtgctatctgttggacggaatcctgttcatttacggagtgatcctgaccgcattgttcctgcgggttaagttttccagatccgcagacgcacccgcttaccaacaagggcagaaccaactctacaatgaacttaatttggggcggagggaagagtacgacgttctggacaaaaggaggggacgagatcccgagatgggcggaaagcctcagcgaaggaagaatccgcaagaggggctttataacgaactccagaaagataaaatggcagaagcctatagtgagattgggatgaagggagaaaggaggaggggtaaaggtcacgatgggttgtaccaaggattgagcacagccactaaagatacctatgatgcgctccacatgcaggccctgccgccaaga

SEQ ID NO: 10553 - DNA, 1920 bp, Artificial Sequence
  Synthetic Polynucloetide
atggccttaccagtgaccgccttgctcctgccgctggccttgctgctccacgccgccaggccggacatccagatgacacagagccctagcagcctgtctgccagcgtgggagacagagtgaccatcacctgtagagccagccaggacatcagcaactacctgaactggtatcagcagaagcccggcaaggcccctaagctgctgatctactacaccagcagactgcacagcggcgtgcccagcagattttctggctctggcagcggcaccgacttcaccctgacaatatctagcctccagcctgaggacttcgccacctactattgccagcagggcaacaccctgccttacacatttggacagggcaccaaggtggaaatcaagagaggcggaggcggaagtggaggcggaggatctggcggcggaggctctgaagtgcagctggttgaatcaggtggcggcctggttcaacctggcggatctctgagactgagctgtgccgccagcggctacaccttcagcgactactttatgagctgggtccgacaggcccctggcaaaggacttgaatgggtcgccaccatcagcaatggcggcacctacacttactaccccgacagcgtgaagggcagattcaccatctccagagacaacagcaagaacaccctgtacctccagatgaactccctgagagccgaggacaccgccgtgtactactgcgccagattcgacggctacatcttcgactattggggccagggcaccctggtcacagtctcttctacgcgtgggagcggcatccagaaccctgatcctgccgtgtaccagctgcgggatagcaagagcagcgacaagagcgtgtgtctgttcaccgacttcgacagccagaccaacgtgtcccagagcaaggactccgacgtgtacatcaccgataagaccgtgctggacatgcggagcatggacttcaagagcaactccgccgtggcctggtccaacaagtccgatttcgcctgcgccaacgccttcaacaacagcattatccccgaggacacattcttcccaagccccgagagcagctgcgacgtgaagctggtggaaaagagcttcgagacagacaccaacctgaacttccagaacctgagcgtgatcggcttcagaatcctgctgctgaaagtggccggctttaacctgctgatgaccctgcggctgtggtccagccgcgccaagagaagcggatctggcgtgaagcagaccctgaatttcgacctgctgaagctggctggcgacgtggaatccaacccaggcccttctagaggccatatgaccgagtacaagcccacggtgcgcctcgccacccgcgacgacgtccccagggccgtacgcaccctcgccgccgcgttcgccgactaccccgccacgcgccacaccgtcgatccggaccgccacatcgagcgggtcaccgagctgcaagaactcttcctcacgcgcgtcgggctcgacatcggcaaggtgtgggtcgcggacgacggcgccgcggtggcggtctggaccacgccggagagcgtcgaagcgggggcggtgttcgccgagatcggcccgcgcatggccgagttgagcggttcccggctggccgcgcagcaacagatggaaggcctcctggcgccgcaccggcccaaggagcccgcgtggttcctggccaccgtcggcgtctcgcccgaccaccagggcaagggtctgggcagcgccgtcgtgctccccggagtggaggcggccgagcgcgccggggtgcccgccttcctggagacctccgcgccccgcaacctccccttctacgagcggctcggcttcaccgtcaccgccgacgtcgaggtgcccgaaggaccgcgcacctggtgcatgacccgcaagcccggtgcctga

SEQ ID NO: 10554 - DNA, 2016 bp, Artificial Sequence
  Synthetic Polynucloetide
atggccttaccagtgaccgccttgctcctgccgctggccttgctgctccacgccgccaggccggacatccagatgacacagagccctagcagcctgtctgccagcgtgggagacagagtgaccatcacctgtagagccagccaggacatcagcaactacctgaactggtatcagcagaagcccggcaaggcccctaagctgctgatctactacaccagcagactgcacagcggcgtgcccagcagattttctggctctggcagcggcaccgacttcaccctgacaatatctagcctccagcctgaggacttcgccacctactattgccagcagggcaacaccctgccttacacatttggacagggcaccaaggtggaaatcaagagaggcggaggcggaagtggaggcggaggatctggcggcggaggctctgaagtgcagctggttgaatcaggtggcggcctggttcaacctggcggatctctgagactgagctgtgccgccagcggctacaccttcagcgactactttatgagctgggtccgacaggcccctggcaaaggacttgaatgggtcgccaccatcagcaatggcggcacctacacttactaccccgacagcgtgaagggcagattcaccatctccagagacaacagcaagaacaccctgtacctccagatgaactccctgagagccgaggacaccgccgtgtactactgcgccagattcgacggctacatcttcgactattggggccagggcaccctggtcacagtctcttctctcgaggacctgaagaacgtgttcccacctgaggtggccgtgttcgagcctagcgaggccgagatcagccacacccagaaagccaccctcgtgtgcctggctaccggcttctaccccgaccatgtggaactgtcttggtgggtcaacggcaaagaggtgcacagcggcgtgtctaccgacccccagccactgaaagaacagcccgccctgaacgacagccggtactgcctgagcagcagactgagagtgtccgccaccttctggcagaacccccggaaccacttcagatgccaggtgcagttctacggcctgagcgagaacgacgagtggacccaggacagagccaagcccgtgacccagatcgtgtctgccgaagcctggggcagagccgattgcggctttaccagcgagagctaccagcagggcgtgctgagcgccaccatcctgtacgagatcctgctgggcaaggccaccctgtacgccgtgctggtgtctgccctggtgctgatggctatggtcaagcggaaggacagccggggaagggccaagcgatctggatctggagcaacaaacttctcactactcaaacaagcaggtgacgtggaggagaatcccgggcctactagaggccatatgaccgagtacaagcccacggtgcgcctcgccacccgcgacgacgtccccagggccgtacgcaccctcgccgccgcgttcgccgactaccccgccacgcgccacaccgtcgatccggaccgccacatcgagcgggtcaccgagctgcaagaactcttcctcacgcgcgtcgggctcgacatcggcaaggtgtgggtcgcggacgacggcgccgcggtggcggtctggaccacgccggagagcgtcgaagcgggggcggtgttcgccgagatcggcccgcgcatggccgagttgagcggttcccggctggccgcgcagcaacagatggaaggcctcctggcgccgcaccggcccaaggagcccgcgtggttcctggccaccgtcggcgtctcgcccgaccaccagggcaagggtctgggcagcgccgtcgtgctccccggagtggaggcggccgagcgcgccggggtgcccgccttcctggagacctccgcgccccgcaacctccccttctacgagcggctcggcttcaccgtcaccgccgacgtcgaggtgcccgaaggaccgcgcacctggtgcatgacccgcaagcccggtgcctga

SEQ ID NO: 10555 - DNA, 2166 bp, Artificial Sequence
  Synthetic Polynucloetide
atggccttaccagtgaccgccttgctcctgccgctggccttgctgctccacgccgccaggccggacatccagatgacacagagccctagcagcctgtctgccagcgtgggagacagagtgaccatcacctgtagagccagccaggacatcagcaactacctgaactggtatcagcagaagcccggcaaggcccctaagctgctgatctactacaccagcagactgcacagcggcgtgcccagcagattttctggctctggcagcggcaccgacttcaccctgacaatatctagcctccagcctgaggacttcgccacctactattgccagcagggcaacaccctgccttacacatttggacagggcaccaaggtggaaatcaagagaggcggaggcggaagtggaggcggaggatctggcggcggaggctctgaagtgcagctggttgaatcaggtggcggcctggttcaacctggcggatctctgagactgagctgtgccgccagcggctacaccttcagcgactactttatgagctgggtccgacaggcccctggcaaaggacttgaatgggtcgccaccatcagcaatggcggcacctacacttactaccccgacagcgtgaagggcagattcaccatctccagagacaacagcaagaacaccctgtacctccagatgaactccctgagagccgaggacaccgccgtgtactactgcgccagattcgacggctacatcttcgactattggggccagggcaccctggtcacagtctcttctacgcgtgagcagaaactgatctcggaagaggatctggggagcggcaccccattcccttctctggcccctcccatcatgctgctggtggacggcaagcagcagatggtggtcgtgtgcctggtgctggatgtggccccacctggactggacagccccatctggtttagcgccggcaatggctctgccctggacgcctttacctacggcccaagccctgccaccgatggcacctggacaaatctggcccacctgagcctgcccagcgaggaactggcttcttgggagcctctcgtgtgccacacaggacctggcgctgagggacacagcagatccacccagcctatgcacctgtctggcgaggccagcaccgccagaacctgtcctcaggaacctctgagaggcacccctggcggagcactgtggctgggagtgctgagactgctgctgttcaagctgctgctgtttgacctgctgctgacctgctcctgtctgtgcgatcctgccggccctctgccttctcctgccaccaccacaagactgagagccctgggcagccacagactgcaccctgccacagagacaggcggcagagaggccacaagcagccctagaccccagcccagagacagaagatggggcgataccccccctggcagaaagcctggatctccagtccgcgccaagagaagcggatctggcgtgaagcagaccctgaatttcgacctgctgaagctggctggcgacgtggaatccaacccaggcccttctagatctagaggccatatgaccgagtacaagcccacggtgcgcctcgccacccgcgacgacgtccccagggccgtacgcaccctcgccgccgcgttcgccgactaccccgccacgcgccacaccgtcgatccggaccgccacatcgagcgggtcaccgagctgcaagaactcttcctcacgcgcgtcgggctcgacatcggcaaggtgtgggtcgcggacgacggcgccgcggtggcggtctggaccacgccggagagcgtcgaagcgggggcggtgttcgccgagatcggcccgcgcatggccgagttgagcggttcccggctggccgcgcagcaacagatggaaggcctcctggcgccgcaccggcccaaggagcccgcgtggttcctggccaccgtcggcgtctcgcccgaccaccagggcaagggtctgggcagcgccgtcgtgctccccggagtggaggcggccgagcgcgccggggtgcccgccttcctggagacctccgcgccccgcaacctccccttctacgagcggctcggcttcaccgtcaccgccgacgtcgaggtgcccgaaggaccgcgcacctggtgcatgacccgcaagcccggtgcctga

SEQ ID NO: 10556 - DNA, 1620 bp, Artificial Sequence
  Synthetic Polynucloetide
atggccttaccagtgaccgccttgctcctgccgctggccttgctgctccacgccgccaggccggacatccagatgacacagagccctagcagcctgtctgccagcgtgggagacagagtgaccatcacctgtagagccagccaggacatcagcaactacctgaactggtatcagcagaagcccggcaaggcccctaagctgctgatctactacaccagcagactgcacagcggcgtgcccagcagattttctggctctggcagcggcaccgacttcaccctgacaatatctagcctccagcctgaggacttcgccacctactattgccagcagggcaacaccctgccttacacatttggacagggcaccaaggtggaaatcaagagactcgaggacctgaagaacgtgttcccacctgaggtggccgtgttcgagcctagcgaggccgagatcagccacacccagaaagccaccctcgtgtgcctggctaccggcttctaccccgaccatgtggaactgtcttggtgggtcaacggcaaagaggtgcacagcggcgtgtctaccgacccccagccactgaaagaacagcccgccctgaacgacagccggtactgcctgagcagcagactgagagtgtccgccaccttctggcagaacccccggaaccacttcagatgccaggtgcagttctacggcctgagcgagaacgacgagtggacccaggacagagccaagcccgtgacccagatcgtgtctgccgaagcctggggcagagccgattgcggctttaccagcgagagctaccagcagggcgtgctgagcgccaccatcctgtacgagatcctgctgggcaaggccaccctgtacgccgtgctggtgtctgccctggtgctgatggctatggtcaagcggaaggacagccggggaagggccaagcgatctggatctggagcaacaaacttctcactactcaaacaagcaggtgacgtggaggagaatcccgggcctactagaggccatatgaccgagtacaagcccacggtgcgcctcgccacccgcgacgacgtccccagggccgtacgcaccctcgccgccgcgttcgccgactaccccgccacgcgccacaccgtcgatccggaccgccacatcgagcgggtcaccgagctgcaagaactcttcctcacgcgcgtcgggctcgacatcggcaaggtgtgggtcgcggacgacggcgccgcggtggcggtctggaccacgccggagagcgtcgaagcgggggcggtgttcgccgagatcggcccgcgcatggccgagttgagcggttcccggctggccgcgcagcaacagatggaaggcctcctggcgccgcaccggcccaaggagcccgcgtggttcctggccaccgtcggcgtctcgcccgaccaccagggcaagggtctgggcagcgccgtcgtgctccccggagtggaggcggccgagcgcgccggggtgcccgccttcctggagacctccgcgccccgcaacctccccttctacgagcggctcggcttcaccgtcaccgccgacgtcgaggtgcccgaaggaccgcgcacctggtgcatgacccgcaagcccggtgcctga

SEQ ID NO: 10557 - DNA, 927 bp, Artificial Sequence
  Synthetic Polynucloetide
atggccttaccagtgaccgccttgctcctgccgctggccttgctgctccacgccgccaggccggacatccagatgacacagagccctagcagcctgtctgccagcgtgggagacagagtgaccatcacctgtagagccagccaggacatcagcaactacctgaactggtatcagcagaagcccggcaaggcccctaagctgctgatctactacaccagcagactgcacagcggcgtgcccagcagattttctggctctggcagcggcaccgacttcaccctgacaatatctagcctccagcctgaggacttcgccacctactattgccagcagggcaacaccctgccttacacatttggacagggcaccaaggtggaaatcaagagactcgaggacctgaagaacgtgttcccacctgaggtggccgtgttcgagcctagcgaggccgagatcagccacacccagaaagccaccctcgtgtgcctggctaccggcttctaccccgaccatgtggaactgtcttggtgggtcaacggcaaagaggtgcacagcggcgtgtctaccgacccccagccactgaaagaacagcccgccctgaacgacagccggtactgcctgagcagcagactgagagtgtccgccaccttctggcagaacccccggaaccacttcagatgccaggtgcagttctacggcctgagcgagaacgacgagtggacccaggacagagccaagcccgtgacccagatcgtgtctgccgaagcctggggcagagccgattgcggctttaccagcgagagctaccagcagggcgtgctgagcgccaccatcctgtacgagatcctgctgggcaaggccaccctgtacgccgtgctggtgtctgccctggtgctgatggctatggtcaagcggaaggacagccgggga

SEQ ID NO: 10558 - DNA, 1341 bp, Artificial Sequence
  Synthetic Polynucloetide
atggactggatttggcgcatccttttccttgtcggcgctgctaccggcgcgcattccttcgaagaagtgcagctggttgaatcaggtggcggcctggttcaacctggcggatctctgagactgagctgtgccgccagcggctacaccttcagcgactactttatgagctgggtccgacaggcccctggcaaaggacttgaatgggtcgccaccatcagcaatggcggcacctacacttactaccccgacagcgtgaagggcagattcaccatctccagagacaacagcaagaacaccctgtacctccagatgaactccctgagagccgaggacaccgccgtgtactactgcgccagattcgacggctacatcttcgactattggggccagggcaccctggtcacagtctcttctacgcgtatccagaaccctgatcctgccgtgtaccagctgcgggatagcaagagcagcgacaagagcgtgtgtctgttcaccgacttcgacagccagaccaacgtgtcccagagcaaggactccgacgtgtacatcaccgataagaccgtgctggacatgcggagcatggacttcaagagcaactccgccgtggcctggtccaacaagtccgatttcgcctgcgccaacgccttcaacaacagcattatccccgaggacacattcttcccaagccccgagagcagctgcgacgtgaagctggtggaaaagagcttcgagacagacaccaacctgaacttccagaacctgagcgtgatcggcttcagaatcctgctgctgaaagtggccggctttaacctgctgatgaccctgcggctgtggtccagccgcgccaagagaagcggatctggcgtgaagcagaccctgaatttcgacctgctgaagctggctggcgacgtggaatccaacccaggcccttctagaggccatatggccaagcctttgtctcaagaagaatccaccctcattgaaagagcaacggctacaatcaacagcatccccatctctgaagactacagcgtcgccagcgcagctctctctagcgacggccgcatcttcactggtgtcaatgtatatcattttactgggggaccttgtgcagaactcgtggtgctgggcactgctgctgctgcggcagctggcaacctgacttgtatcgtcgcgatcggaaatgagaacaggggcatcttgagcccctgcggacggtgccgacaggtgcttctcgatctgcatcctgggatcaaagccatagtgaaggacagtgatggacagccgacggcagttgggattcgtgaattgctgccctctggttatgtgtgggagggctga

SEQ ID NO: 10559 - DNA, 840 bp, Artificial Sequence
  Synthetic Polynucloetide
atggactggatttggcgcatccttttccttgtcggcgctgctaccggcgcgcattccttcgaagaagtgcagctggttgaatcaggtggcggcctggttcaacctggcggatctctgagactgagctgtgccgccagcggctacaccttcagcgactactttatgagctgggtccgacaggcccctggcaaaggacttgaatgggtcgccaccatcagcaatggcggcacctacacttactaccccgacagcgtgaagggcagattcaccatctccagagacaacagcaagaacaccctgtacctccagatgaactccctgagagccgaggacaccgccgtgtactactgcgccagattcgacggctacatcttcgactattggggccagggcaccctggtcacagtctcttctacgcgtatccagaaccctgatcctgccgtgtaccagctgcgggatagcaagagcagcgacaagagcgtgtgtctgttcaccgacttcgacagccagaccaacgtgtcccagagcaaggactccgacgtgtacatcaccgataagaccgtgctggacatgcggagcatggacttcaagagcaactccgccgtggcctggtccaacaagtccgatttcgcctgcgccaacgccttcaacaacagcattatccccgaggacacattcttcccaagccccgagagcagctgcgacgtgaagctggtggaaaagagcttcgagacagacaccaacctgaacttccagaacctgagcgtgatcggcttcagaatcctgctgctgaaagtggccggctttaacctgctgatgaccctgcggctgtggtccagc

SEQ ID NO: 10560 - DNA, 1674 bp, Artificial Sequence
  Synthetic Polynucloetide
atggccttaccagtgaccgccttgctcctgccgctggccttgctgctccacgccgccaggccggacatccagatgacacagagccctagcagcctgtctgccagcgtgggagacagagtgaccatcacctgtagagccagccaggacatcagcaactacctgaactggtatcagcagaagcccggcaaggcccctaagctgctgatctactacaccagcagactgcacagcggcgtgcccagcagattttctggctctggcagcggcaccgacttcaccctgacaatatctagcctccagcctgaggacttcgccacctactattgccagcagggcaacaccctgccttacacatttggacagggcaccaaggtggaaatcaagagactcgaggggaaaccaattcccaaccctcttctgggactggattcaaccggcagcggcgaggacctgaagaacgtgttcccacctgaggtggccgtgttcgagcctagcgaggccgagatcagccacacccagaaagccaccctcgtgtgcctggctaccggcttctaccccgaccatgtggaactgtcttggtgggtcaacggcaaagaggtgcacagcggcgtgtgtaccgacccccagccactgaaagaacagcccgccctgaacgacagccggtactgcctgagcagcagactgagagtgtccgccaccttctggcagaacccccggaaccacttcagatgccaggtgcagttctacggcctgagcgagaacgacgagtggacccaggacagagccaagcccgtgacccagatcgtgtctgccgaagcctggggcagagccgattgcggctttaccagcgagagctaccagcagggcgtgctgagcgccaccatcctgtacgagatcctgctgggcaaggccaccctgtacgccgtgctggtgtctgccctggtgctgatggctatggtcaagcggaaggacagccggggaagggccaagcgatctggatctggagcaacaaacttctcactactcaaacaagcaggtgacgtggaggagaatcccgggcctactagaggccatatgaccgagtacaagcccacggtgcgcctcgccacccgcgacgacgtccccagggccgtacgcaccctcgccgccgcgttcgccgactaccccgccacgcgccacaccgtcgatccggaccgccacatcgagcgggtcaccgagctgcaagaactcttcctcacgcgcgtcgggctcgacatcggcaaggtgtgggtcgcggacgacggcgccgcggtggcggtctggaccacgccggagagcgtcgaagcgggggcggtgttcgccgagatcggcccgcgcatggccgagttgagcggttcccggctggccgcgcagcaacagatggaaggcctcctggcgccgcaccggcccaaggagcccgcgtggttcctggccaccgtcggcgtctcgcccgaccaccagggcaagggtctgggcagcgccgtcgtgctccccggagtggaggcggccgagcgcgccggggtgcccgccttcctggagacctccgcgccccgcaacctccccttctacgagcggctcggcttcaccgtcaccgccgacgtcgaggtgcccgaaggaccgcgcacctggtgcatgacccgcaagcccggtgcctga

SEQ ID NO: 10561 - DNA, 984 bp, Artificial Sequence
  Synthetic Polynucloetide
atggccttaccagtgaccgccttgctcctgccgctggccttgctgctccacgccgccaggccggacatccagatgacacagagccctagcagcctgtctgccagcgtgggagacagagtgaccatcacctgtagagccagccaggacatcagcaactacctgaactggtatcagcagaagcccggcaaggcccctaagctgctgatctactacaccagcagactgcacagcggcgtgcccagcagattttctggctctggcagcggcaccgacttcaccctgacaatatctagcctccagcctgaggacttcgccacctactattgccagcagggcaacaccctgccttacacatttggacagggcaccaaggtggaaatcaagagactcgaggggaaaccaattcccaaccctcttctgggactggattcaaccggcagcggcgaggacctgaagaacgtgttcccacctgaggtggccgtgttcgagcctagcgaggccgagatcagccacacccagaaagccaccctcgtgtgcctggctaccggcttctaccccgaccatgtggaactgtcttggtgggtcaacggcaaagaggtgcacagcggcgtgtgtaccgacccccagccactgaaagaacagcccgccctgaacgacagccggtactgcctgagcagcagactgagagtgtccgccaccttctggcagaacccccggaaccacttcagatgccaggtgcagttctacggcctgagcgagaacgacgagtggacccaggacagagccaagcccgtgacccagatcgtgtctgccgaagcctggggcagagccgattgcggctttaccagcgagagctaccagcagggcgtgctgagcgccaccatcctgtacgagatcctgctgggcaaggccaccctgtacgccgtgctggtgtctgccctggtgctgatggctatggtcaagcggaaggacagccggggatga

SEQ ID NO: 10562 - DNA, 1377 bp, Artificial Sequence
  Synthetic Polynucloetide
atggactggatttggcgcatccttttccttgtcggcgctgctaccggcgcgcattccttcgaagaagtgcagctggttgaatcaggtggcggcctggttcaacctggcggatctctgagactgagctgtgccgccagcggctacaccttcagcgactactttatgagctgggtccgacaggcccctggcaaaggacttgaatgggtcgccaccatcagcaatggcggcacctacacttactaccccgacagcgtgaagggcagattcaccatctccagagacaacagcaagaacaccctgtacctccagatgaactccctgagagccgaggacaccgccgtgtactactgcgccagattcgacggctacatcttcgactattggggccagggcaccctggtcacagtctcttctacgcgtgagcagaaactgatctcggaagaggatgggagcggcatccagaaccctgatcctgccgtgtaccagctgcgggatagcaagagcagcgacaagagcgtgtgtctgttcaccgacttcgacagccagaccaacgtgtcccagagcaaggactccgacgtgtacatcaccgataagtgcgtgctggacatgcggagcatggacttcaagagcaactccgccgtggcctggtccaacaagtccgatttcgcctgcgccaacgccttcaacaacagcattatccccgaggacacattcttcccaagccccgagagcagctgcgacgtgaagctggtggaaaagagcttcgagacagacaccaacctgaacttccagaacctgagcgtgatcggcttcagaatcctgctgctgaaagtggccggctttaacctgctgatgaccctgcggctgtggtccagccgcgccaagagaagcggatctggcgtgaagcagaccctgaatttcgacctgctgaagctggctggcgacgtggaatccaacccaggcccttctagaggccatatggccaagcctttgtctcaagaagaatccaccctcattgaaagagcaacggctacaatcaacagcatccccatctctgaagactacagcgtcgccagcgcagctctctctagcgacggccgcatcttcactggtgtcaatgtatatcattttactgggggaccttgtgcagaactcgtggtgctgggcactgctgctgctgcggcagctggcaacctgacttgtatcgtcgcgatcggaaatgagaacaggggcatcttgagcccctgcggacggtgccgacaggtgcttctcgatctgcatcctgggatcaaagccatagtgaaggacagtgatggacagccgacggcagttgggattcgtgaattgctgccctctggttatgtgtgggagggctga

SEQ ID NO: 10563 - DNA, 879 bp, Artificial Sequence
  Synthetic Polynucloetide
atggactggatttggcgcatccttttccttgtcggcgctgctaccggcgcgcattccttcgaagaagtgcagctggttgaatcaggtggcggcctggttcaacctggcggatctctgagactgagctgtgccgccagcggctacaccttcagcgactactttatgagctgggtccgacaggcccctggcaaaggacttgaatgggtcgccaccatcagcaatggcggcacctacacttactaccccgacagcgtgaagggcagattcaccatctccagagacaacagcaagaacaccctgtacctccagatgaactccctgagagccgaggacaccgccgtgtactactgcgccagattcgacggctacatcttcgactattggggccagggcaccctggtcacagtctcttctacgcgtgagcagaaactgatctcggaagaggatgggagcggcatccagaaccctgatcctgccgtgtaccagctgcgggatagcaagagcagcgacaagagcgtgtgtctgttcaccgacttcgacagccagaccaacgtgtcccagagcaaggactccgacgtgtacatcaccgataagtgcgtgctggacatgcggagcatggacttcaagagcaactccgccgtggcctggtccaacaagtccgatttcgcctgcgccaacgccttcaacaacagcattatccccgaggacacattcttcccaagccccgagagcagctgcgacgtgaagctggtggaaaagagcttcgagacagacaccaacctgaacttccagaacctgagcgtgatcggcttcagaatcctgctgctgaaagtggccggctttaacctgctgatgaccctgcggctgtggtccagctga

SEQ ID NO: 10564 - DNA, 1920 bp, Artificial Sequence
  Synthetic Polynucloetide
atggccttaccagtgaccgccttgctcctgccgctggccttgctgctccacgccgccaggccggacatccagatgacacagagccctagcagcctgtctgccagcgtgggagacagagtgaccatcacctgtagagccagccaggacatcagcaactacctgaactggtatcagcagaagcccggcaaggcccctaagctgctgatctactacaccagcagactgcacagcggcgtgcccagcagattttctggctctggcagcggcaccgacttcaccctgacaatatctagcctccagcctgaggacttcgccacctactattgccagcagggcaacaccctgccttacacatttggacagggcaccaaggtggaaatcaagagaggcggaggcggaagtggaggcggaggatctggcggcggaggctctgaagtgcagctggttgaatcaggtggcggcctggttcaacctggcggatctctgagactgagctgtgccgccagcggctacaccttcagcgactactttatgagctgggtccgacaggcccctggcaaaggacttgaatgggtcgccaccatcagcaatggcggcacctacacttactaccccgacagcgtgaagggcagattcaccatctccagagacaacagcaagaacaccctgtacctccagatgaactccctgagagccgaggacaccgccgtgtactactgcgccagattcgacggctacatcttcgactattggggccagggcaccctggtcacagtctcttctacgcgtgggagcggcatccagaaccctgatcctgccgtgtaccagctgcgggatagcaagagcagcgacaagagcgtgtgtctgttcaccgacttcgacagccagaccaacgtgtcccagagcaaggactccgacgtgtacatcaccgataagaccgtgctggacatgcggagcatggacttcaagagcaactccgccgtggcctggtccaacaagtccgatttcgcctgcgccaacgccttcaacaacagcattatccccgaggacacattcttcccaagcagcgacgtgccctgcgacgtgaagctggtggaaaagagcttcgagacagacaccaacctgaacttccagaacctgagcgtgatcggcttcagaatcctgctgctgaaagtggccggctttaacctgctgatgaccctgcggctgtggtccagccgcgccaagagaagcggatctggcgtgaagcagaccctgaatttcgacctgctgaagctggctggcgacgtggaatccaacccaggcccttctagaggccatatgaccgagtacaagcccacggtgcgcctcgccacccgcgacgacgtccccagggccgtacgcaccctcgccgccgcgttcgccgactaccccgccacgcgccacaccgtcgatccggaccgccacatcgagcgggtcaccgagctgcaagaactcttcctcacgcgcgtcgggctcgacatcggcaaggtgtgggtcgcggacgacggcgccgcggtggcggtctggaccacgccggagagcgtcgaagcgggggcggtgttcgccgagatcggcccgcgcatggccgagttgagcggttcccggctggccgcgcagcaacagatggaaggcctcctggcgccgcaccggcccaaggagcccgcgtggttcctggccaccgtcggcgtctcgcccgaccaccagggcaagggtctgggcagcgccgtcgtgctccccggagtggaggcggccgagcgcgccggggtgcccgccttcctggagacctccgcgccccgcaacctccccttctacgagcggctcggcttcaccgtcaccgccgacgtcgaggtgcccgaaggaccgcgcacctggtgcatgacccgcaagcccggtgcctga

SEQ ID NO: 10565 - DNA, 2016 bp, Artificial Sequence
  Synthetic Polynucloetide
atggccttaccagtgaccgccttgctcctgccgctggccttgctgctccacgccgccaggccggacatccagatgacacagagccctagcagcctgtctgccagcgtgggagacagagtgaccatcacctgtagagccagccaggacatcagcaactacctgaactggtatcagcagaagcccggcaaggcccctaagctgctgatctactacaccagcagactgcacagcggcgtgcccagcagattttctggctctggcagcggcaccgacttcaccctgacaatatctagcctccagcctgaggacttcgccacctactattgccagcagggcaacaccctgccttacacatttggacagggcaccaaggtggaaatcaagagaggcggaggcggaagtggaggcggaggatctggcggcggaggctctgaagtgcagctggttgaatcaggtggcggcctggttcaacctggcggatctctgagactgagctgtgccgccagcggctacaccttcagcgactactttatgagctgggtccgacaggcccctggcaaaggacttgaatgggtcgccaccatcagcaatggcggcacctacacttactaccccgacagcgtgaagggcagattcaccatctccagagacaacagcaagaacaccctgtacctccagatgaactccctgagagccgaggacaccgccgtgtactactgcgccagattcgacggctacatcttcgactattggggccagggcaccctggtcacagtctcttctctcgaggacctgaagaacgtgttcccacctgaggtggccgtgttcgagcctagcaaggccgagatcgcccacacccagaaagccaccctcgtgtgcctggctaccggcttctaccccgaccatgtggaactgtcttggtgggtcaacggcaaagaggtgcacagcggcgtgtctaccgacccccagccactgaaagaacagcccgccctgaacgacagccggtactgcctgagcagcagactgagagtgtccgccaccttctggcagaacccccggaaccacttcagatgccaggtgcagttctacggcctgagcgagaacgacgagtggacccaggacagagccaagcccgtgacccagatcgtgtctgccgaagcctggggcagagccgattgcggcatcaccagcgccagctaccaccagggcgtgctgagcgccaccatcctgtacgagatcctgctgggcaaggccaccctgtacgccgtgctggtgtctgccctggtgctgatggctatggtcaagcggaaggacagccggggaagggccaagcgatctggatctggagcaacaaacttctcactactcaaacaagcaggtgacgtggaggagaatcccgggcctactagaggccatatgaccgagtacaagcccacggtgcgcctcgccacccgcgacgacgtccccagggccgtacgcaccctcgccgccgcgttcgccgactaccccgccacgcgccacaccgtcgatccggaccgccacatcgagcgggtcaccgagctgcaagaactcttcctcacgcgcgtcgggctcgacatcggcaaggtgtgggtcgcggacgacggcgccgcggtggcggtctggaccacgccggagagcgtcgaagcgggggcggtgttcgccgagatcggcccgcgcatggccgagttgagcggttcccggctggccgcgcagcaacagatggaaggcctcctggcgccgcaccggcccaaggagcccgcgtggttcctggccaccgtcggcgtctcgcccgaccaccagggcaagggtctgggcagcgccgtcgtgctccccggagtggaggcggccgagcgcgccggggtgcccgccttcctggagacctccgcgccccgcaacctccccttctacgagcggctcggcttcaccgtcaccgccgacgtcgaggtgcccgaaggaccgcgcacctggtgcatgacccgcaagcccggtgcctga

SEQ ID NO: 10566 - DNA, 2085 bp, Artificial Sequence
  Synthetic Polynucloetide
atggccttaccagtgaccgccttgctcctgccgctggccttgctgctccacgccgccaggccggacatccagatgacacagagccctagcagcctgtctgccagcgtgggagacagagtgaccatcacctgtagagccagccaggacatcagcaactacctgaactggtatcagcagaagcccggcaaggcccctaagctgctgatctactacaccagcagactgcacagcggcgtgcccagcagattttctggctctggcagcggcaccgacttcaccctgacaatatctagcctccagcctgaggacttcgccacctactattgccagcagggcaacaccctgccttacacatttggacagggcaccaaggtggaaatcaagagaggcggaggcggaagtggaggcggaggatctggcggcggaggctctgaagtgcagctggttgaatcaggtggcggcctggttcaacctggcggatctctgagactgagctgtgccgccagcggctacaccttcagcgactactttatgagctgggtccgacaggcccctggcaaaggacttgaatgggtcgccaccatcagcaatggcggcacctacacttactaccccgacagcgtgaagggcagattcaccatctccagagacaacagcaagaacaccctgtacctccagatgaactccctgagagccgaggacaccgccgtgtactactgcgccagattcgacggctacatcttcgactattggggccagggcaccctggtcacagtctcttctacgcgtgggtctggaggcggaggcagcggcggaggcgggagcggcgacggtaacgaggagatgggaggaatcactcaaaccccttacaaagtctcaatttcaggaacaactgttatccttacatgtccccagtatcctggcagcgagatcctttggcagcataacgacaagaatatagggggagatgaagacgataagaatatcggatctgacgaggatcacttgagcctgaaagagttctccgagcttgaacaaagcggatattatgtgtgctatccgcgcgggtcaaagccggaagacgctaacttttacctttatctccgagccagagtgtgcgaaaattgcatggaaatggacgttatgtccgttgctacaatagttatcgtagatatatgcatcacgggtggactgcttctgctggtttattattggtccaagaatagaaaggccaaagctaaacccgtgaccagaggcgctggcgcaggcggaaggcaaaggggacaaaacaaagaacggccaccaccagtgccaaatccagattatgagcctattcggaaaggacagagggacctgtactctggcctgaatcagagaagaatccgcgccaagagaagcggatctggcgtgaagcagaccctgaatttcgacctgctgaagctggctggcgacgtggaatccaacccaggcccttctagaggccatatgaccgagtacaagcccacggtgcgcctcgccacccgcgacgacgtccccagggccgtacgcaccctcgccgccgcgttcgccgactaccccgccacgcgccacaccgtcgatccggaccgccacatcgagcgggtcaccgagctgcaagaactcttcctcacgcgcgtcgggctcgacatcggcaaggtgtgggtcgcggacgacggcgccgcggtggcggtctggaccacgccggagagcgtcgaagcgggggcggtgttcgccgagatcggcccgcgcatggccgagttgagcggttcccggctggccgcgcagcaacagatggaaggcctcctggcgccgcaccggcccaaggagcccgcgtggttcctggccaccgtcggcgtctcgcccgaccaccagggcaagggtctgggcagcgccgtcgtgctccccggagtggaggcggccgagcgcgccggggtgcccgccttcctggagacctccgcgccccgcaacctccccttctacgagcggctcggcttcaccgtcaccgccgacgtcgaggtgcccgaaggaccgcgcacctggtgcatgacccgcaagcccggtgcctga

SEQ ID NO: 10567 - DNA, 1980 bp, Artificial Sequence
  Synthetic Polynucloetide
atggccttaccagtgaccgccttgctcctgccgctggccttgctgctccacgccgccaggccggacatccagatgacacagagccctagcagcctgtctgccagcgtgggagacagagtgaccatcacctgtagagccagccaggacatcagcaactacctgaactggtatcagcagaagcccggcaaggcccctaagctgctgatctactacaccagcagactgcacagcggcgtgcccagcagattttctggctctggcagcggcaccgacttcaccctgacaatatctagcctccagcctgaggacttcgccacctactattgccagcagggcaacaccctgccttacacatttggacagggcaccaaggtggaaatcaagagaggcggaggcggaagtggaggcggaggatctggcggcggaggctctgaagtgcagctggttgaatcaggtggcggcctggttcaacctggcggatctctgagactgagctgtgccgccagcggctacaccttcagcgactactttatgagctgggtccgacaggcccctggcaaaggacttgaatgggtcgccaccatcagcaatggcggcacctacacttactaccccgacagcgtgaagggcagattcaccatctccagagacaacagcaagaacaccctgtacctccagatgaactccctgagagccgaggacaccgccgtgtactactgcgccagattcgacggctacatcttcgactattggggccagggcaccctggtcacagtctcttctacgcgtgggtctggaggcggaggcagcggcggaggcgggagcggcttcaagatccccatcgaggaactggaagatcgggtgttcgtgaactgcaacacctctatcacctgggtggaaggcaccgtgggaacactgctgagcgacatcaccagactggacctcggcaagcggattctggaccctcggggcatctacagatgcaacggcaccgacatctacaaggacaaagaaagcaccgtgcaggtccactacagaatgtgccagtcctgcgtggaactggaccctgctacagtggccggcatcatcgtgaccgatgtgatcgctactctgctgctggctctgggagtgttctgcttcgccggacacgaaacaggcagactgtctggcgctgccgatacacaggccctgctgagaaacgaccaagtgtatcagcccctgcgcgacagagatgatgcccagtattctcacctcggcggcaactgggctagaaacaagcgcgccaagagaagcggatctggcgtgaagcagaccctgaatttcgacctgctgaagctggctggcgacgtggaatccaacccaggcccttctagaggccatatgaccgagtacaagcccacggtgcgcctcgccacccgcgacgacgtccccagggccgtacgcaccctcgccgccgcgttcgccgactaccccgccacgcgccacaccgtcgatccggaccgccacatcgagcgggtcaccgagctgcaagaactcttcctcacgcgcgtcgggctcgacatcggcaaggtgtgggtcgcggacgacggcgccgcggtggcggtctggaccacgccggagagcgtcgaagcgggggcggtgttcgccgagatcggcccgcgcatggccgagttgagcggttcccggctggccgcgcagcaacagatggaaggcctcctggcgccgcaccggcccaaggagcccgcgtggttcctggccaccgtcggcgtctcgcccgaccaccagggcaagggtctgggcagcgccgtcgtgctccccggagtggaggcggccgagcgcgccggggtgcccgccttcctggagacctccgcgccccgcaacctccccttctacgagcggctcggcttcaccgtcaccgccgacgtcgaggtgcccgaaggaccgcgcacctggtgcatgacccgcaagcccggtgcctga

SEQ ID NO: 10568 - DNA, 2010 bp, Artificial Sequence
  Synthetic Polynucloetide
atggccttaccagtgaccgccttgctcctgccgctggccttgctgctccacgccgccaggccggacatccagatgacacagagccctagcagcctgtctgccagcgtgggagacagagtgaccatcacctgtagagccagccaggacatcagcaactacctgaactggtatcagcagaagcccggcaaggcccctaagctgctgatctactacaccagcagactgcacagcggcgtgcccagcagattttctggctctggcagcggcaccgacttcaccctgacaatatctagcctccagcctgaggacttcgccacctactattgccagcagggcaacaccctgccttacacatttggacagggcaccaaggtggaaatcaagagaggcggaggcggaagtggaggcggaggatctggcggcggaggctctgaagtgcagctggttgaatcaggtggcggcctggttcaacctggcggatctctgagactgagctgtgccgccagcggctacaccttcagcgactactttatgagctgggtccgacaggcccctggcaaaggacttgaatgggtcgccaccatcagcaatggcggcacctacacttactaccccgacagcgtgaagggcagattcaccatctccagagacaacagcaagaacaccctgtacctccagatgaactccctgagagccgaggacaccgccgtgtactactgcgccagattcgacggctacatcttcgactattggggccagggcaccctggtcacagtctcttctacgcgtgggtctggaggcggaggcagcggcggaggcgggagcggccagagcatcaagggcaaccacctggtcaaggtgtacgactaccaagaggacggcagcgtgctgctgacatgtgatgccgaggccaagaacatcacctggtttaaggacggcaagatgatcggcttcctgaccgaggacaagaagaagtggaacctgggcagcaacgctaaggaccccagaggcatgtatcagtgcaagggcagccagaacaagagcaagcccctccaggtgtactaccggatgtgccagaactgcatcgagctgaacgccgctaccatcagcggctttctgttcgccgagatcgtgtccatcttcgtgctggccgtgggcgtgtactttatcgctggacaggatggcgtgcggcagagcagagcttccgataagcaaaccctgctgcctaacgaccagctgtaccagcctctgaaggacagagaggacgaccagtacagccacctccagggcaatcagctgagaagaaaccgcgccaagagaagcggatctggcgtgaagcagaccctgaatttcgacctgctgaagctggctggcgacgtggaatccaacccaggcccttctagaggccatatgaccgagtacaagcccacggtgcgcctcgccacccgcgacgacgtccccagggccgtacgcaccctcgccgccgcgttcgccgactaccccgccacgcgccacaccgtcgatccggaccgccacatcgagcgggtcaccgagctgcaagaactcttcctcacgcgcgtcgggctcgacatcggcaaggtgtgggtcgcggacgacggcgccgcggtggcggtctggaccacgccggagagcgtcgaagcgggggcggtgttcgccgagatcggcccgcgcatggccgagttgagcggttcccggctggccgcgcagcaacagatggaaggcctcctggcgccgcaccggcccaaggagcccgcgtggttcctggccaccgtcggcgtctcgcccgaccaccagggcaagggtctgggcagcgccgtcgtgctccccggagtggaggcggccgagcgcgccggggtgcccgccttcctggagacctccgcgccccgcaacctccccttctacgagcggctcggcttcaccgtcaccgccgacgtcgaggtgcccgaaggaccgcgcacctggtgcatgacccgcaagcccggtgcctga

SEQ ID NO: 10569 - DNA, 1959 bp, Artificial Sequence
  Synthetic Polynucloetide
atggccttaccagtgaccgccttgctcctgccgctggccttgctgctccacgccgccaggccggacatccagatgacacagagccctagcagcctgtctgccagcgtgggagacagagtgaccatcacctgtagagccagccaggacatcagcaactacctgaactggtatcagcagaagcccggcaaggcccctaagctgctgatctactacaccagcagactgcacagcggcgtgcccagcagattttctggctctggcagcggcaccgacttcaccctgacaatatctagcctccagcctgaggacttcgccacctactattgccagcagggcaacaccctgccttacacatttggacagggcaccaaggtggaaatcaagagaggcggaggcggaagtggaggcggaggatctggcggcggaggctctgaagtgcagctggttgaatcaggtggcggcctggttcaacctggcggatctctgagactgagctgtgccgccagcggctacaccttcagcgactactttatgagctgggtccgacaggcccctggcaaaggacttgaatgggtcgccaccatcagcaatggcggcacctacacttactaccccgacagcgtgaagggcagattcaccatctccagagacaacagcaagaacaccctgtacctccagatgaactccctgagagccgaggacaccgccgtgtactactgcgccagattcgacggctacatcttcgactattggggccagggcaccctggtcacagtctcttctacgcgtgggtctggaggcggaggcagcggcggaggcgggagcggccagagttttgggttgttggaccctaaattgtgctatctgttggacggaatcctgttcatttacggagtgatcctgaccgcattgttcctgcgggttaagttttccagatccgcagacgcacccgcttaccaacaagggcagaaccaactctacaatgaacttaatttggggcggagggaagagtacgacgttctggacaaaaggaggggacgagatcccgagatgggcggaaagcctcagcgaaggaagaatccgcaagaggggctttataacgaactccagaaagataaaatggcagaagcctatagtgagattgggatgaagggagaaaggaggaggggtaaaggtcacgatgggttgtaccaaggattgagcacagccactaaagatacctatgatgcgctccacatgcaggccctgccgccaagacgcgccaagagaagcggatctggcgtgaagcagaccctgaatttcgacctgctgaagctggctggcgacgtggaatccaacccaggcccttctagaggccatatgaccgagtacaagcccacggtgcgcctcgccacccgcgacgacgtccccagggccgtacgcaccctcgccgccgcgttcgccgactaccccgccacgcgccacaccgtcgatccggaccgccacatcgagcgggtcaccgagctgcaagaactcttcctcacgcgcgtcgggctcgacatcggcaaggtgtgggtcgcggacgacggcgccgcggtggcggtctggaccacgccggagagcgtcgaagcgggggcggtgttcgccgagatcggcccgcgcatggccgagttgagcggttcccggctggccgcgcagcaacagatggaaggcctcctggcgccgcaccggcccaaggagcccgcgtggttcctggccaccgtcggcgtctcgcccgaccaccagggcaagggtctgggcagcgccgtcgtgctccccggagtggaggcggccgagcgcgccggggtgcccgccttcctggagacctccgcgccccgcaacctccccttctacgagcggctcggcttcaccgtcaccgccgacgtcgaggtgcccgaaggaccgcgcacctggtgcatgacccgcaagcccggtgcctga

SEQ ID NO: 10570 - DNA, 2259 bp, Artificial Sequence
  Synthetic Polynucloetide
atggccttaccagtgaccgccttgctcctgccgctggccttgctgctccacgccgccaggccggaagtgcagctggttgaatctggcggaggactggttcagcctggcggatctctgagactgtcttgtgccgccagcggcttcagcttcagcgacttttggatgagctgggtccgacaggcccctggcaaaggacttgaatgggtcgccacaatcagccaggccggcagcgagaaggactacgtggactctgtgaagggcagattcaccatcagccgggacaacgccaagaagtccctgtacctccagatgaacagcctgagagccgaggacaccgccgtgtactattgtgcctctggcgtgtacagcttcgactacagaggccagggcaccctggtcacagtctcttctggtaccggcggaggcggatctggcggcggaggtagcggtggcggaggatctgaattcgacatccagatgacacagagccctagcagcctgtctgccagcgtgggagacagagtgaccatcacctgtagagccagccaggacatcagcaactacctgaactggtatcagcagaagcccggcaaggcccctaagctgctgatctactacaccagcagactgcacagcggcgtgcccagcagattttctggctctggcagcggcaccgacttcaccctgacaatatctagcctccagcctgaggacttcgccacctactattgccagcagggcaacaccctgccttacacatttggacagggcaccaaggtggaaatcaagagactcgaggacctgaagaacgtgttcccacctgaggtggccgtgttcgagcctagcgaggccgagatcagccacacccagaaagccaccctcgtgtgcctggctaccggcttctaccccgaccatgtggaactgtcttggtgggtcaacggcaaagaggtgcacagcggcgtgtgtaccgacccccagccactgaaagaacagcccgccctgaacgacagccggtactgcctgagcagcagactgagagtgtccgccaccttctggcagaacccccggaaccacttcagatgccaggtgcagttctacggcctgagcgagaacgacgagtggacccaggacagagccaagcccgtgacccagatcgtgtctgccgaagcctggggcagagccgattgcggctttaccagcgagagctaccagcagggcgtgctgagcgccaccatcctgtacgagatcctgctgggcaaggccaccctgtacgccgtgctggtgtctgccctggtgctgatggctatggtcaagcggaaggacagccggggaagggccaagcgatctggatctggagcaacaaacttctcactactcaaacaagcaggtgacgtggaggagaatcccgggcctactagtatggactggatttggcgcatccttttccttgtcggcgctgctaccggcgcgcattccttcgaagaagtgcagctggttgaatcaggtggcggcctggttcaacctggcggatctctgagactgagctgtgccgccagcggctacaccttcagcgactactttatgagctgggtccgacaggcccctggcaaaggacttgaatgggtcgccaccatcagcaatggcggcacctacacttactaccccgacagcgtgaagggcagattcaccatctccagagacaacagcaagaacaccctgtacctccagatgaactccctgagagccgaggacaccgccgtgtactactgcgccagattcgacggctacatcttcgactattggggccagggcaccctggtcacagtctcttctacgcgtatccagaaccctgatcctgccgtgtaccagctgcgggatagcaagagcagcgacaagagcgtgtgtctgttcaccgacttcgacagccagaccaacgtgtcccagagcaaggactccgacgtgtacatcaccgataagtgcgtgctggacatgcggagcatggacttcaagagcaactccgccgtggcctggtccaacaagtccgatttcgcctgcgccaacgccttcaacaacagcattatccccgaggacacattcttcccaagccccgagagcagctgcgacgtgaagctggtggaaaagagcttcgagacagacaccaacctgaacttccagaacctgagcgtgatcggcttcagaatcctgctgctgaaagtggccggctttaacctgctgatgaccctgcggctgtggtccagc

SEQ ID NO: 10571 - DNA, 2271 bp, Artificial Sequence
  Synthetic Polynucloetide
atggccttaccagtgaccgccttgctcctgccgctggccttgctgctccacgccgccaggccggaagtgcagctggttgaatctggcggaggactggttcagcctggcggatctctgagactgtcttgtgccgccagcggcttcagcttcagcgacttttggatgagctgggtccgacaggcccctggcaaaggacttgaatgggtcgccacaatcagccaggccggcagcgagaaggactacgtggactctgtgaagggcagattcaccatcagccgggacaacgccaagaagtccctgtacctccagatgaacagcctgagagccgaggacaccgccgtgtactattgtgcctctggcgtgtacagcttcgactacagaggccagggcaccctggtcacagtctcttctggtaccggcggaggcggatctggcggcggaggtagcggtggcggaggatctgaattcgacatccagatgacacagagccctagcagcctgtctgccagcgtgggagacagagtgaccatcacctgtagagccagccaggacatcagcaactacctgaactggtatcagcagaagcccggcaaggcccctaagctgctgatctactacaccagcagactgcacagcggcgtgcccagcagattttctggctctggcagcggcaccgacttcaccctgacaatatctagcctccagcctgaggacttcgccacctactattgccagcagggcaacaccctgccttacacatttggacagggcaccaaggtggaaatcaagagactcgagatccagaaccctgatcctgccgtgtaccagctgcgggatagcaagagcagcgacaagagcgtgtgtctgttcaccgacttcgacagccagaccaacgtgtcccagagcaaggactccgacgtgtacatcaccgataagtgcgtgctggacatgcggagcatggacttcaagagcaactccgccgtggcctggtccaacaagtccgatttcgcctgcgccaacgccttcaacaacagcattatccccgaggacacattcttcccaagccccgagagcagctgcgacgtgaagctggtggaaaagagcttcgagacagacaccaacctgaacttccagaacctgagcgtgatcggcttcagaatcctgctgctgaaagtggccggctttaacctgctgatgaccctgcggctgtggtccagccgcgccaagagaagcggatctggcgtgaagcagaccctgaatttcgacctgctgaagctggctggcgacgtggaatccaacccaggccctactagtatggactggatttggcgcatccttttccttgtcggcgctgctaccggcgcgcattccttcgaagaagtgcagctggttgaatcaggtggcggcctggttcaacctggcggatctctgagactgagctgtgccgccagcggctacaccttcagcgactactttatgagctgggtccgacaggcccctggcaaaggacttgaatgggtcgccaccatcagcaatggcggcacctacacttactaccccgacagcgtgaagggcagattcaccatctccagagacaacagcaagaacaccctgtacctccagatgaactccctgagagccgaggacaccgccgtgtactactgcgccagattcgacggctacatcttcgactattggggccagggcaccctggtcacagtctcttctacgcgtgaggacctgaagaacgtgttcccacctgaggtggccgtgttcgagcctagcgaggccgagatcagccacacccagaaagccaccctcgtgtgcctggctaccggcttctaccccgaccatgtggaactgtcttggtgggtcaacggcaaagaggtgcacagcggcgtgtgtaccgacccccagccactgaaagaacagcccgccctgaacgacagccggtactgcctgagcagcagactgagagtgtccgccaccttctggcagaacccccggaaccacttcagatgccaggtgcagttctacggcctgagcgagaacgacgagtggacccaggacagagccaagcccgtgacccagatcgtgtctgccgaagcctggggcagagccgattgcggctttaccagcgagagctaccagcagggcgtgctgagcgccaccatcctgtacgagatcctgctgggcaaggccaccctgtacgccgtgctggtgtctgccctggtgctgatggctatggtcaagcggaaggacagccgggga

SEQ ID NO: 10572 - DNA, 2847 bp, Artificial Sequence
  Synthetic Polynucloetide
atggccttaccagtgaccgccttgctcctgccgctggccttgctgctccacgccgccaggccggaagtgcagctggttgaatctggcggaggactggttcagcctggcggatctctgagactgtcttgtgccgccagcggcttcagcttcagcgacttttggatgagctgggtccgacaggcccctggcaaaggacttgaatgggtcgccacaatcagccaggccggcagcgagaaggactacgtggactctgtgaagggcagattcaccatcagccgggacaacgccaagaagtccctgtacctccagatgaacagcctgagagccgaggacaccgccgtgtactattgtgcctctggcgtgtacagcttcgactacagaggccagggcaccctggtcacagtctcttctggtaccggcggaggcggatctggcggcggaggtagcggtggcggaggatctgaattcgacatccagatgacacagagccctagcagcctgtctgccagcgtgggagacagagtgaccatcacctgtagagccagccaggacatcagcaactacctgaactggtatcagcagaagcccggcaaggcccctaagctgctgatctactacaccagcagactgcacagcggcgtgcccagcagattttctggctctggcagcggcaccgacttcaccctgacaatatctagcctccagcctgaggacttcgccacctactattgccagcagggcaacaccctgccttacacatttggacagggcaccaaggtggaaatcaagagactcgaggacctgaagaacgtgttcccacctgaggtggccgtgttcgagcctagcgaggccgagatcagccacacccagaaagccaccctcgtgtgcctggctaccggcttctaccccgaccatgtggaactgtcttggtgggtcaacggcaaagaggtgcacagcggcgtgtctaccgacccccagccactgaaagaacagcccgccctgaacgacagccggtactgcctgagcagcagactgagagtgtccgccaccttctggcagaacccccggaaccacttcagatgccaggtgcagttctacggcctgagcgagaacgacgagtggacccaggacagagccaagcccgtgacccagatcgtgtctgccgaagcctggggcagagccgattgcggatcccagagcttcggcctgctggaccccaagctgtgctacctgctggatggcatcctgttcatctacggcgtgatcctgaccgccctgttcctgagagtgaagttcagcagaagcgccgacgcccctgcctaccagcagggacagaaccaactgtacaacgagctgaacctgggcagacgggaagagtacgacgtgctggacaagcggagaggcagggaccctgagatgggcggaaagccccagcggagaaagaacccccaggaaggactgtataacgaactccagaaagacaagatggccgaagcctacagcgagatcggcatgaagggcgagcggagaagaggcaagggccacgatggcctgtaccagggcctgagcaccgccaccaaggacacctatgacgccctgcacatgcaggccctgcctccaagaagggccaagcgatctggatctggagcaacaaacttctcactactcaaacaagcaggtgacgtggaggagaatcccgggcctactagtatggactggatttggcgcatccttttccttgtcggcgctgctaccggcgcgcattccttcgaagaagtgcagctggttgaatcaggtggcggcctggttcaacctggcggatctctgagactgagctgtgccgccagcggctacaccttcagcgactactttatgagctgggtccgacaggcccctggcaaaggacttgaatgggtcgccaccatcagcaatggcggcacctacacttactaccccgacagcgtgaagggcagattcaccatctccagagacaacagcaagaacaccctgtacctccagatgaactccctgagagccgaggacaccgccgtgtactactgcgccagattcgacggctacatcttcgactattggggccagggcaccctggtcacagtctcttctacgcgtatccagaaccctgatcctgccgtgtaccagctgcgggatagcaagagcagcgacaagagcgtgtgtctgttcaccgacttcgacagccagaccaacgtgtcccagagcaaggactccgacgtgtacatcaccgataagaccgtgctggacatgcggagcatggacttcaagagcaactccgccgtggcctggtccaacaagtccgatttcgcctgcgccaacgccttcaacaacagcattatccccgaggacacattcttcccaagccccgagagcagctgcggtacccagagttttgggttgttggaccctaaattgtgctatctgttggacggaatcctgttcatttacggagtgatcctgaccgcattgttcctgcgggttaagttttccagatccgcagacgcacccgcttaccaacaagggcagaaccaactctacaatgaacttaatttggggcggagggaagagtacgacgttctggacaaaaggaggggacgagatcccgagatgggcggaaagcctcagcgaaggaagaatccgcaagaggggctttataacgaactccagaaagataaaatggcagaagcctatagtgagattgggatgaagggagaaaggaggaggggtaaaggtcacgatgggttgtaccaaggattgagcacagccactaaagatacctatgatgcgctccacatgcaggccctgccgccaaga

SEQ ID NO: 10573 - DNA, 2337 bp, Artificial Sequence
  Synthetic Polynucloetide
atggccttaccagtgaccgccttgctcctgccgctggccttgctgctccacgccgccaggccggaagtgcagctggttgaatctggcggaggactggttcagcctggcggatctctgagactgtcttgtgccgccagcggcttcagcttcagcgacttttggatgagctgggtccgacaggcccctggcaaaggacttgaatgggtcgccacaatcagccaggccggcagcgagaaggactacgtggactctgtgaagggcagattcaccatcagccgggacaacgccaagaagtccctgtacctccagatgaacagcctgagagccgaggacaccgccgtgtactattgtgcctctggcgtgtacagcttcgactacagaggccagggcaccctggtcacagtctcttctggtaccggcggaggcggatctggcggcggaggtagcggtggcggaggatctgaattcgacatccagatgacacagagccctagcagcctgtctgccagcgtgggagacagagtgaccatcacctgtagagccagccaggacatcagcaactacctgaactggtatcagcagaagcccggcaaggcccctaagctgctgatctactacaccagcagactgcacagcggcgtgcccagcagattttctggctctggcagcggcaccgacttcaccctgacaatatctagcctccagcctgaggacttcgccacctactattgccagcagggcaacaccctgccttacacatttggacagggcaccaaggtggaaatcaagagactcgagggacagcctaaggccaatcctaccgtgacactgttccctccaagcagcgaagaactccaggccaacaaggccacacttgtgtgcctgatctccgacttctaccctggggctgtgacagtggcttggaaggccgatggatctcctgtgaaagccggcgtggaaaccaccaagccatccaagcagagcaacaacaaatacgccgccagctcctacctgagcctgacacctgagcagtggaagtcccacagatcctacagctgccaagtgacccacgaaggcagcaccgtggaaaagacagtggcccctacagagtgcagccccatcaagaccgatgtgattacaatggaccccaaggacaactgctccaaggacgccaacgataccctgctgctccagctgaccaacaccagcgcctactacatgtacttgttgctgctgctgaagtccgtggtgtacttcgccatcatcacatgctgcctgctgcggagaaccgccttctgctgcaacggcgagaagtctagggccaagcgatctggatctggagcaacaaacttctcactactcaaacaagcaggtgacgtggaggagaatcccgggcctactagtatggactggatttggcgcatccttttccttgtcggcgctgctaccggcgcgcattccttcgaagaagtgcagctggttgaatcaggtggcggcctggttcaacctggcggatctctgagactgagctgtgccgccagcggctacaccttcagcgactactttatgagctgggtccgacaggcccctggcaaaggacttgaatgggtcgccaccatcagcaatggcggcacctacacttactaccccgacagcgtgaagggcagattcaccatctccagagacaacagcaagaacaccctgtacctccagatgaactccctgagagccgaggacaccgccgtgtactactgcgccagattcgacggctacatcttcgactattggggccagggcaccctggtcacagtctcttctacgcgtgcctctacaaagggaccctccgtgtttcctctggctcccagcagcaagtctacaagcggaggaacagccgctctgggctgcctggtcaaggattactttcccgagcctgtgaccgtgtcctggaatagcggagcactgacaagcggcgtgcacacctttccagccgtgctgcaaagcagcggcctgtactctctgagcagcgtggtcacagtgcctagctctagcctgggcacccagacctacatctgcaatgtgaaccacaagcctagcaacaccaaggtggacaagagagtggaacccaagagctgtgaagtgaaaaccgactccaccgaccacgtgaagcccaaagagacagagaacaccaagcagcccagcaagagctgccacaagcccaaggccatcgtgcacaccgagaaagtgaacatgatgagcctgaccgtgctgggcctgcggatgctgttcgccaaaaccgtggccgtgaacttcctgctgaccgccaagctgttcttcctc

SEQ ID NO: 10574 - DNA, 2280 bp, Artificial Sequence
  Synthetic Polynucloetide
atggccttaccagtgaccgccttgctcctgccgctggccttgctgctccacgccgccaggccggaagtgcagctggttgaatctggcggaggactggttcagcctggcggatctctgagactgtcttgtgccgccagcggcttcagcttcagcgacttttggatgagctgggtccgacaggcccctggcaaaggacttgaatgggtcgccacaatcagccaggccggcagcgagaaggactacgtggactctgtgaagggcagattcaccatcagccgggacaacgccaagaagtccctgtacctccagatgaacagcctgagagccgaggacaccgccgtgtactattgtgcctctggcgtgtacagcttcgactacagaggccagggcaccctggtcacagtctcttctggtaccggcggaggcggatctggcggcggaggtagcggtggcggaggatctgaattcgacatccagatgacacagagccctagcagcctgtctgccagcgtgggagacagagtgaccatcacctgtagagccagccaggacatcagcaactacctgaactggtatcagcagaagcccggcaaggcccctaagctgctgatctactacaccagcagactgcacagcggcgtgcccagcagattttctggctctggcagcggcaccgacttcaccctgacaatatctagcctccagcctgaggacttcgccacctactattgccagcagggcaacaccctgccttacacatttggacagggcaccaaggtggaaatcaagagactcgagggacagcctaaggccaatcctaccgtgacactgttccctccaagcagcgaagaactccaggccaacaaggccacacttgtgtgcctgatctccgacttctaccctggggctgtgacagtggcttggaaggccgatggatctcctgtgaaagccggcgtggaaaccaccaagccatccaagcagagcaacaacaaatacgccgccagctcctacctgagcctgacacctgagcagtggaagtcccacagatcctacagctgccaagtgacccacgaaggcagcaccgtggaaaagacagtggcccctacagagtgcagcggcagagccgattgcggctttaccagcgagagctaccagcagggcgtgctgagcgccaccatcctgtacgagatcctgctgggcaaggccaccctgtacgccgtgctggtgtctgccctggtgctgatggctatggtcaagcggaaggacagccggggacgcgccaagagaagcggatctggcgtgaagcagaccctgaatttcgacctgctgaagctggctggcgacgtggaatccaacccaggccctactagtatggactggatttggcgcatccttttccttgtcggcgctgctaccggcgcgcattccttcgaagaagtgcagctggttgaatcaggtggcggcctggttcaacctggcggatctctgagactgagctgtgccgccagcggctacaccttcagcgactactttatgagctgggtccgacaggcccctggcaaaggacttgaatgggtcgccaccatcagcaatggcggcacctacacttactaccccgacagcgtgaagggcagattcaccatctccagagacaacagcaagaacaccctgtacctccagatgaactccctgagagccgaggacaccgccgtgtactactgcgccagattcgacggctacatcttcgactattggggccagggcaccctggtcacagtctcttctacgcgtgcctctacaaagggaccctccgtgtttcctctggctcccagcagcaagtctacaagcggaggaacagccgctctgggctgcctggtcaaggattactttcccgagcctgtgaccgtgtcctggaatagcggagcactgacaagcggcgtgcacacctttccagccgtgctgcaaagcagcggcctgtactctctgagcagcgtggtcacagtgcctagctctagcctgggcacccagacctacatctgcaatgtgaaccacaagcctagcaacaccaaggtggacaagagagtggaacccaagagctgtatccccgaggacacattcttcccaagccccgagagcagctgcgacgtgaagctggtggaaaagagcttcgagacagacaccaacctgaacttccagaacctgagcgtgatcggcttcagaatcctgctgctgaaagtggccggctttaacctgctgatgaccctgcggctgtggtccagc

SEQ ID NO: 10575 - DNA, 2682 bp, Artificial Sequence
  Synthetic Polynucloetide
atggccttaccagtgaccgccttgctcctgccgctggccttgctgctccacgccgccaggccggaagtgcagctggttgaatctggcggaggactggttcagcctggcggatctctgagactgtcttgtgccgccagcggcttcagcttcagcgacttttggatgagctgggtccgacaggcccctggcaaaggacttgaatgggtcgccacaatcagccaggccggcagcgagaaggactacgtggactctgtgaagggcagattcaccatcagccgggacaacgccaagaagtccctgtacctccagatgaacagcctgagagccgaggacaccgccgtgtactattgtgcctctggcgtgtacagcttcgactacagaggccagggcaccctggtcacagtctcttctggtaccggcggaggcggatctggcggcggaggtagcggtggcggaggatctgaattcgacatccagatgacacagagccctagcagcctgtctgccagcgtgggagacagagtgaccatcacctgtagagccagccaggacatcagcaactacctgaactggtatcagcagaagcccggcaaggcccctaagctgctgatctactacaccagcagactgcacagcggcgtgcccagcagattttctggctctggcagcggcaccgacttcaccctgacaatatctagcctccagcctgaggacttcgccacctactattgccagcagggcaacaccctgccttacacatttggacagggcaccaaggtggaaatcaagagactcgagatccagaaccctgatcctgccgtgtaccagctgcgggatagcaagagcagcgacaagagcgtgtgtctgttcaccgacttcgacagccagaccaacgtgtcccagagcaaggactccgacgtgtacatcaccgataagtgcgtgctggacatgcggagcatggacttcaagagcaactccgccgtggcctggtccaacaagtccgatttcgcctgcgccaacgccttcaacaacagcattatccccgaggacacattcttcccaagccccgagagcagctgcgacgtgaagctggtggaaaagagcttcgagacagacaccaacctgaacttccagaacctgagcgtgatcggcttcagaatcctgctgctgaaagtggccggctttaacctgctgatgaccctgcggctgtggtccagccgcgccaagagaagcggatctggcgtgaagcagaccctgaatttcgacctgctgaagctggctggcgacgtggaatccaacccaggccctactagtatggactggatttggcgcatccttttccttgtcggcgctgctaccggcgcgcattccgggccccagctccagctgcaagagtctggacctggcctggtcaagcctagcgagacactgagcctgacctgtaccgtgtccggcgatagcatcagcagcggcgattactactggggctggatcagacagcctcctggcaaaggactggaatggatcggccacatctactacagcggcgtgacctactacaaccccagcctgaagtccagagtgaccatcagcgtggacaccagccggaaccagttctccctgaagctgtctagcgtgacagccgccgataccgccgtgtactactgcaccagagaggacagcagcaactggcggagtagaggccagggaacactggtcacagttagctctggatccggcggaggcggaagtggaggcggaggatctggcggcggaggctctttcgaagaagtgcagctggttgaatcaggtggcggcctggttcaacctggcggatctctgagactgagctgtgccgccagcggctacaccttcagcgactactttatgagctgggtccgacaggcccctggcaaaggacttgaatgggtcgccaccatcagcaatggcggcacctacacttactaccccgacagcgtgaagggcagattcaccatctccagagacaacagcaagaacaccctgtacctccagatgaactccctgagagccgaggacaccgccgtgtactactgcgccagattcgacggctacatcttcgactattggggccagggcaccctggtcacagtctcttctacgcgtgaggacctgaagaacgtgttcccacctgaggtggccgtgttcgagcctagcgaggccgagatcagccacacccagaaagccaccctcgtgtgcctggctaccggcttctaccccgaccatgtggaactgtcttggtgggtcaacggcaaagaggtgcacagcggcgtgtgtaccgacccccagccactgaaagaacagcccgccctgaacgacagccggtactgcctgagcagcagactgagagtgtccgccaccttctggcagaacccccggaaccacttcagatgccaggtgcagttctacggcctgagcgagaacgacgagtggacccaggacagagccaagcccgtgacccagatcgtgtctgccgaagcctggggcagagccgattgcggctttaccagcgagagctaccagcagggcgtgctgagcgccaccatcctgtacgagatcctgctgggcaaggccaccctgtacgccgtgctggtgtctgccctggtgctgatggctatggtcaagcggaaggacagccgggga

SEQ ID NO: 10576 - DNA, 3258 bp, Artificial Sequence
  Synthetic Polynucloetide
atggccttaccagtgaccgccttgctcctgccgctggccttgctgctccacgccgccaggccggaagtgcagctggttgaatctggcggaggactggttcagcctggcggatctctgagactgtcttgtgccgccagcggcttcagcttcagcgacttttggatgagctgggtccgacaggcccctggcaaaggacttgaatgggtcgccacaatcagccaggccggcagcgagaaggactacgtggactctgtgaagggcagattcaccatcagccgggacaacgccaagaagtccctgtacctccagatgaacagcctgagagccgaggacaccgccgtgtactattgtgcctctggcgtgtacagcttcgactacagaggccagggcaccctggtcacagtctcttctggtaccggcggaggcggatctggcggcggaggtagcggtggcggaggatctgaattcgacatccagatgacacagagccctagcagcctgtctgccagcgtgggagacagagtgaccatcacctgtagagccagccaggacatcagcaactacctgaactggtatcagcagaagcccggcaaggcccctaagctgctgatctactacaccagcagactgcacagcggcgtgcccagcagattttctggctctggcagcggcaccgacttcaccctgacaatatctagcctccagcctgaggacttcgccacctactattgccagcagggcaacaccctgccttacacatttggacagggcaccaaggtggaaatcaagagactcgaggacctgaagaacgtgttcccacctgaggtggccgtgttcgagcctagcgaggccgagatcagccacacccagaaagccaccctcgtgtgcctggctaccggcttctaccccgaccatgtggaactgtcttggtgggtcaacggcaaagaggtgcacagcggcgtgtctaccgacccccagccactgaaagaacagcccgccctgaacgacagccggtactgcctgagcagcagactgagagtgtccgccaccttctggcagaacccccggaaccacttcagatgccaggtgcagttctacggcctgagcgagaacgacgagtggacccaggacagagccaagcccgtgacccagatcgtgtctgccgaagcctggggcagagccgattgcggatcccagagcttcggcctgctggaccccaagctgtgctacctgctggatggcatcctgttcatctacggcgtgatcctgaccgccctgttcctgagagtgaagttcagcagaagcgccgacgcccctgcctaccagcagggacagaaccaactgtacaacgagctgaacctgggcagacgggaagagtacgacgtgctggacaagcggagaggcagggaccctgagatgggcggaaagccccagcggagaaagaacccccaggaaggactgtataacgaactccagaaagacaagatggccgaagcctacagcgagatcggcatgaagggcgagcggagaagaggcaagggccacgatggcctgtaccagggcctgagcaccgccaccaaggacacctatgacgccctgcacatgcaggccctgcctccaagaagggccaagcgatctggatctggagcaacaaacttctcactactcaaacaagcaggtgacgtggaggagaatcccgggcctactagtatggactggatttggcgcatccttttccttgtcggcgctgctaccggcgcgcattccgggccccagctccagctgcaagagtctggacctggcctggtcaagcctagcgagacactgagcctgacctgtaccgtgtccggcgatagcatcagcagcggcgattactactggggctggatcagacagcctcctggcaaaggactggaatggatcggccacatctactacagcggcgtgacctactacaaccccagcctgaagtccagagtgaccatcagcgtggacaccagccggaaccagttctccctgaagctgtctagcgtgacagccgccgataccgccgtgtactactgcaccagagaggacagcagcaactggcggagtagaggccagggaacactggtcacagttagctctggatccggcggaggcggaagtggaggcggaggatctggcggcggaggctctttcgaagaagtgcagctggttgaatcaggtggcggcctggttcaacctggcggatctctgagactgagctgtgccgccagcggctacaccttcagcgactactttatgagctgggtccgacaggcccctggcaaaggacttgaatgggtcgccaccatcagcaatggcggcacctacacttactaccccgacagcgtgaagggcagattcaccatctccagagacaacagcaagaacaccctgtacctccagatgaactccctgagagccgaggacaccgccgtgtactactgcgccagattcgacggctacatcttcgactattggggccagggcaccctggtcacagtctcttctacgcgtatccagaaccctgatcctgccgtgtaccagctgcgggatagcaagagcagcgacaagagcgtgtgtctgttcaccgacttcgacagccagaccaacgtgtcccagagcaaggactccgacgtgtacatcaccgataagaccgtgctggacatgcggagcatggacttcaagagcaactccgccgtggcctggtccaacaagtccgatttcgcctgcgccaacgccttcaacaacagcattatccccgaggacacattcttcccaagccccgagagcagctgcggtacccagagttttgggttgttggaccctaaattgtgctatctgttggacggaatcctgttcatttacggagtgatcctgaccgcattgttcctgcgggttaagttttccagatccgcagacgcacccgcttaccaacaagggcagaaccaactctacaatgaacttaatttggggcggagggaagagtacgacgttctggacaaaaggaggggacgagatcccgagatgggcggaaagcctcagcgaaggaagaatccgcaagaggggctttataacgaactccagaaagataaaatggcagaagcctatagtgagattgggatgaagggagaaaggaggaggggtaaaggtcacgatgggttgtaccaaggattgagcacagccactaaagatacctatgatgcgctccacatgcaggccctgccgccaaga

SEQ ID NO: 10577 - DNA, 2748 bp, Artificial Sequence
  Synthetic Polynucloetide
atggccttaccagtgaccgccttgctcctgccgctggccttgctgctccacgccgccaggccggaagtgcagctggttgaatctggcggaggactggttcagcctggcggatctctgagactgtcttgtgccgccagcggcttcagcttcagcgacttttggatgagctgggtccgacaggcccctggcaaaggacttgaatgggtcgccacaatcagccaggccggcagcgagaaggactacgtggactctgtgaagggcagattcaccatcagccgggacaacgccaagaagtccctgtacctccagatgaacagcctgagagccgaggacaccgccgtgtactattgtgcctctggcgtgtacagcttcgactacagaggccagggcaccctggtcacagtctcttctggtaccggcggaggcggatctggcggcggaggtagcggtggcggaggatctgaattcgacatccagatgacacagagccctagcagcctgtctgccagcgtgggagacagagtgaccatcacctgtagagccagccaggacatcagcaactacctgaactggtatcagcagaagcccggcaaggcccctaagctgctgatctactacaccagcagactgcacagcggcgtgcccagcagattttctggctctggcagcggcaccgacttcaccctgacaatatctagcctccagcctgaggacttcgccacctactattgccagcagggcaacaccctgccttacacatttggacagggcaccaaggtggaaatcaagagactcgagggacagcctaaggccaatcctaccgtgacactgttccctccaagcagcgaagaactccaggccaacaaggccacacttgtgtgcctgatctccgacttctaccctggggctgtgacagtggcttggaaggccgatggatctcctgtgaaagccggcgtggaaaccaccaagccatccaagcagagcaacaacaaatacgccgccagctcctacctgagcctgacacctgagcagtggaagtcccacagatcctacagctgccaagtgacccacgaaggcagcaccgtggaaaagacagtggcccctacagagtgcagccccatcaagaccgatgtgattacaatggaccccaaggacaactgctccaaggacgccaacgataccctgctgctccagctgaccaacaccagcgcctactacatgtacttgttgctgctgctgaagtccgtggtgtacttcgccatcatcacatgctgcctgctgcggagaaccgccttctgctgcaacggcgagaagtctagggccaagcgatctggatctggagcaacaaacttctcactactcaaacaagcaggtgacgtggaggagaatcccgggcctactagtatggactggatttggcgcatccttttccttgtcggcgctgctaccggcgcgcattccgggccccagctccagctgcaagagtctggacctggcctggtcaagcctagcgagacactgagcctgacctgtaccgtgtccggcgatagcatcagcagcggcgattactactggggctggatcagacagcctcctggcaaaggactggaatggatcggccacatctactacagcggcgtgacctactacaaccccagcctgaagtccagagtgaccatcagcgtggacaccagccggaaccagttctccctgaagctgtctagcgtgacagccgccgataccgccgtgtactactgcaccagagaggacagcagcaactggcggagtagaggccagggaacactggtcacagttagctctggatccggcggaggcggaagtggaggcggaggatctggcggcggaggctctttcgaagaagtgcagctggttgaatcaggtggcggcctggttcaacctggcggatctctgagactgagctgtgccgccagcggctacaccttcagcgactactttatgagctgggtccgacaggcccctggcaaaggacttgaatgggtcgccaccatcagcaatggcggcacctacacttactaccccgacagcgtgaagggcagattcaccatctccagagacaacagcaagaacaccctgtacctccagatgaactccctgagagccgaggacaccgccgtgtactactgcgccagattcgacggctacatcttcgactattggggccagggcaccctggtcacagtctcttctacgcgtgcctctacaaagggaccctccgtgtttcctctggctcccagcagcaagtctacaagcggaggaacagccgctctgggctgcctggtcaaggattactttcccgagcctgtgaccgtgtcctggaatagcggagcactgacaagcggcgtgcacacctttccagccgtgctgcaaagcagcggcctgtactctctgagcagcgtggtcacagtgcctagctctagcctgggcacccagacctacatctgcaatgtgaaccacaagcctagcaacaccaaggtggacaagagagtggaacccaagagctgtgaagtgaaaaccgactccaccgaccacgtgaagcccaaagagacagagaacaccaagcagcccagcaagagctgccacaagcccaaggccatcgtgcacaccgagaaagtgaacatgatgagcctgaccgtgctgggcctgcggatgctgttcgccaaaaccgtggccgtgaacttcctgctgaccgccaagctgttcttcctc

SEQ ID NO: 10578 - DNA, 2691 bp, Artificial Sequence
  Synthetic Polynucloetide
atggccttaccagtgaccgccttgctcctgccgctggccttgctgctccacgccgccaggccggaagtgcagctggttgaatctggcggaggactggttcagcctggcggatctctgagactgtcttgtgccgccagcggcttcagcttcagcgacttttggatgagctgggtccgacaggcccctggcaaaggacttgaatgggtcgccacaatcagccaggccggcagcgagaaggactacgtggactctgtgaagggcagattcaccatcagccgggacaacgccaagaagtccctgtacctccagatgaacagcctgagagccgaggacaccgccgtgtactattgtgcctctggcgtgtacagcttcgactacagaggccagggcaccctggtcacagtctcttctggtaccggcggaggcggatctggcggcggaggtagcggtggcggaggatctgaattcgacatccagatgacacagagccctagcagcctgtctgccagcgtgggagacagagtgaccatcacctgtagagccagccaggacatcagcaactacctgaactggtatcagcagaagcccggcaaggcccctaagctgctgatctactacaccagcagactgcacagcggcgtgcccagcagattttctggctctggcagcggcaccgacttcaccctgacaatatctagcctccagcctgaggacttcgccacctactattgccagcagggcaacaccctgccttacacatttggacagggcaccaaggtggaaatcaagagactcgagggacagcctaaggccaatcctaccgtgacactgttccctccaagcagcgaagaactccaggccaacaaggccacacttgtgtgcctgatctccgacttctaccctggggctgtgacagtggcttggaaggccgatggatctcctgtgaaagccggcgtggaaaccaccaagccatccaagcagagcaacaacaaatacgccgccagctcctacctgagcctgacacctgagcagtggaagtcccacagatcctacagctgccaagtgacccacgaaggcagcaccgtggaaaagacagtggcccctacagagtgcagcggcagagccgattgcggctttaccagcgagagctaccagcagggcgtgctgagcgccaccatcctgtacgagatcctgctgggcaaggccaccctgtacgccgtgctggtgtctgccctggtgctgatggctatggtcaagcggaaggacagccggggacgcgccaagagaagcggatctggcgtgaagcagaccctgaatttcgacctgctgaagctggctggcgacgtggaatccaacccaggccctactagtatggactggatttggcgcatccttttccttgtcggcgctgctaccggcgcgcattccgggccccagctccagctgcaagagtctggacctggcctggtcaagcctagcgagacactgagcctgacctgtaccgtgtccggcgatagcatcagcagcggcgattactactggggctggatcagacagcctcctggcaaaggactggaatggatcggccacatctactacagcggcgtgacctactacaaccccagcctgaagtccagagtgaccatcagcgtggacaccagccggaaccagttctccctgaagctgtctagcgtgacagccgccgataccgccgtgtactactgcaccagagaggacagcagcaactggcggagtagaggccagggaacactggtcacagttagctctggatccggcggaggcggaagtggaggcggaggatctggcggcggaggctctttcgaagaagtgcagctggttgaatcaggtggcggcctggttcaacctggcggatctctgagactgagctgtgccgccagcggctacaccttcagcgactactttatgagctgggtccgacaggcccctggcaaaggacttgaatgggtcgccaccatcagcaatggcggcacctacacttactaccccgacagcgtgaagggcagattcaccatctccagagacaacagcaagaacaccctgtacctccagatgaactccctgagagccgaggacaccgccgtgtactactgcgccagattcgacggctacatcttcgactattggggccagggcaccctggtcacagtctcttctacgcgtgcctctacaaagggaccctccgtgtttcctctggctcccagcagcaagtctacaagcggaggaacagccgctctgggctgcctggtcaaggattactttcccgagcctgtgaccgtgtcctggaatagcggagcactgacaagcggcgtgcacacctttccagccgtgctgcaaagcagcggcctgtactctctgagcagcgtggtcacagtgcctagctctagcctgggcacccagacctacatctgcaatgtgaaccacaagcctagcaacaccaaggtggacaagagagtggaacccaagagctgtatccccgaggacacattcttcccaagccccgagagcagctgcgacgtgaagctggtggaaaagagcttcgagacagacaccaacctgaacttccagaacctgagcgtgatcggcttcagaatcctgctgctgaaagtggccggctttaacctgctgatgaccctgcggctgtggtccagc

SEQ ID NO: 10579 - DNA, 2262 bp, Artificial Sequence
  Synthetic Polynucloetide
atggccttaccagtgaccgccttgctcctgccgctggccttgctgctccacgccgccaggccggaagtgcaggttttggagtctggcggaggactggttcagcctggcggatctctgagactgtcttgtgccgccagcggcttcaccttcagcaactttgccatgagctgggtccgacaggcccctggcaaaggacttgaatgggtgtccacaatcagcggcagcgccggcacaacagattacgccgattctgtgaagggcagattcaccatcagccgggacaacagcaagaaaaccctgtacctccagatgaacagcctgcgcgtggaagataccgccgtgtactactgtgccgatggcagaggccccttcttcgattatcgcggccagggcacactggtcaccgtttcttctggtaccggcggaggcggatctggcggcggaggtagcggtggcggaggatctgaattcgacatccagatgacacagagccctagcagcctgtctgccagcgtgggagacagagtgaccatcacctgtagagccagccaggacatcagcaactacctgaactggtatcagcagaagcccggcaaggcccctaagctgctgatctactacaccagcagactgcacagcggcgtgcccagcagattttctggctctggcagcggcaccgacttcaccctgacaatatctagcctccagcctgaggacttcgccacctactattgccagcagggcaacaccctgccttacacatttggacagggcaccaaggtggaaatcaagagactcgaggacctgaagaacgtgttcccacctgaggtggccgtgttcgagcctagcgaggccgagatcagccacacccagaaagccaccctcgtgtgcctggctaccggcttctaccccgaccatgtggaactgtcttggtgggtcaacggcaaagaggtgcacagcggcgtgtgtaccgacccccagccactgaaagaacagcccgccctgaacgacagccggtactgcctgagcagcagactgagagtgtccgccaccttctggcagaacccccggaaccacttcagatgccaggtgcagttctacggcctgagcgagaacgacgagtggacccaggacagagccaagcccgtgacccagatcgtgtctgccgaagcctggggcagagccgattgcggctttaccagcgagagctaccagcagggcgtgctgagcgccaccatcctgtacgagatcctgctgggcaaggccaccctgtacgccgtgctggtgtctgccctggtgctgatggctatggtcaagcggaaggacagccggggaagggccaagcgatctggatctggagcaacaaacttctcactactcaaacaagcaggtgacgtggaggagaatcccgggcctactagtatggactggatttggcgcatccttttccttgtcggcgctgctaccggcgcgcattccttcgaagaagtgcagctggttgaatcaggtggcggcctggttcaacctggcggatctctgagactgagctgtgccgccagcggctacaccttcagcgactactttatgagctgggtccgacaggcccctggcaaaggacttgaatgggtcgccaccatcagcaatggcggcacctacacttactaccccgacagcgtgaagggcagattcaccatctccagagacaacagcaagaacaccctgtacctccagatgaactccctgagagccgaggacaccgccgtgtactactgcgccagattcgacggctacatcttcgactattggggccagggcaccctggtcacagtctcttctacgcgtatccagaaccctgatcctgccgtgtaccagctgcgggatagcaagagcagcgacaagagcgtgtgtctgttcaccgacttcgacagccagaccaacgtgtcccagagcaaggactccgacgtgtacatcaccgataagtgcgtgctggacatgcggagcatggacttcaagagcaactccgccgtggcctggtccaacaagtccgatttcgcctgcgccaacgccttcaacaacagcattatccccgaggacacattcttcccaagccccgagagcagctgcgacgtgaagctggtggaaaagagcttcgagacagacaccaacctgaacttccagaacctgagcgtgatcggcttcagaatcctgctgctgaaagtggccggctttaacctgctgatgaccctgcggctgtggtccagc

SEQ ID NO: 10580 - DNA, 2265 bp, Artificial Sequence
  Synthetic Polynucloetide
atggccttaccagtgaccgccttgctcctgccgctggccttgctgctccacgccgccaggccggacatccagatgacacagagccctagcagcctgtctgccagcgtgggagacagagtgaccatcacctgtagagccagccaggacatcagcaactacctgaactggtatcagcagaagcccggcaaggcccctaagctgctgatctactacaccagcagactgcacagcggcgtgcccagcagattttctggctctggcagcggcaccgacttcaccctgacaatatctagcctccagcctgaggacttcgccacctactattgccagcagggcaacaccctgccttacacatttggacagggcaccaaggtggaaatcaagagactcgaggacctgaagaacgtgttcccacctgaggtggccgtgttcgagcctagcgaggccgagatcagccacacccagaaagccaccctcgtgtgcctggctaccggcttctaccccgaccatgtggaactgtcttggtgggtcaacggcaaagaggtgcacagcggcgtgtgtaccgacccccagccactgaaagaacagcccgccctgaacgacagccggtactgcctgagcagcagactgagagtgtccgccaccttctggcagaacccccggaaccacttcagatgccaggtgcagttctacggcctgagcgagaacgacgagtggacccaggacagagccaagcccgtgacccagatcgtgtctgccgaagcctggggcagagccgattgcggctttaccagcgagagctaccagcagggcgtgctgagcgccaccatcctgtacgagatcctgctgggcaaggccaccctgtacgccgtgctggtgtctgccctggtgctgatggctatggtcaagcggaaggacagccggggaagggccaagcgatctggatctggagcaacaaacttctcactactcaaacaagcaggtgacgtggaggagaatcccgggcctactagtatggactggatttggcgcatccttttccttgtcggcgctgctaccggcgcccattccgggcccgaagtgcagctggttgaatctggcggaggactggttcaggctggcggatctctgagactgtcttgtgccgccagcggcagaacctttagcatgggctggtttagacaggcccctggcaaagagagagagttcgtcgccgccatcacatactctggcggcagcccttactacgccgactctgtgaagggcagattcaccatcagccgggacaacgccaagaacaccgtgtacctccagatgaacagcctgaagcctgaggacaccgccgtgtactactgcgccgccaatccaacatacggcagcgactggaacgccgagaattggggccagggaacccaagtgacagtgtctagcggatccggcggcggaggatctggcggaggcggatctgggggcggaggctctttcgaagaagtgcagctggttgaatcaggtggcggcctggttcaacctggcggatctctgagactgagctgtgccgccagcggctacaccttcagcgactactttatgagctgggtccgacaggcccctggcaaaggacttgaatgggtcgccaccatcagcaatggcggcacctacacttactaccccgacagcgtgaagggcagattcaccatctccagagacaacagcaagaacaccctgtacctccagatgaactccctgagagccgaggacaccgccgtgtactactgcgccagattcgacggctacatcttcgactattggggccagggcaccctggtcacagtctcttctacgcgtatccagaaccctgatcctgccgtgtaccagctgcgggatagcaagagcagcgacaagagcgtgtgtctgttcaccgacttcgacagccagaccaacgtgtcccagagcaaggactccgacgtgtacatcaccgataagtgcgtgctggacatgcggagcatggacttcaagagcaactccgccgtggcctggtccaacaagtccgatttcgcctgcgccaacgccttcaacaacagcattatccccgaggacacattcttcccaagccccgagagcagctgcgacgtgaagctggtggaaaagagcttcgagacagacaccaacctgaacttccagaacctgagcgtgatcggcttcagaatcctgctgctgaaagtggccggctttaacctgctgatgaccctgcggctgtggtccagc

SEQ ID NO: 10581 - DNA, 2646 bp, Artificial Sequence
  Synthetic Polynucloetide
atggccttaccagtgaccgccttgctcctgccgctggccttgctgctccacgccgccaggccggacatccagatgacacagagccctagcagcctgtctgccagcgtgggagacagagtgaccatcacctgtagagccagccaggacatcagcaactacctgaactggtatcagcagaagcccggcaaggcccctaagctgctgatctactacaccagcagactgcacagcggcgtgcccagcagattttctggctctggcagcggcaccgacttcaccctgacaatatctagcctccagcctgaggacttcgccacctactattgccagcagggcaacaccctgccttacacatttggacagggcaccaaggtggaaatcaagagactcgaggacctgaagaacgtgttcccacctgaggtggccgtgttcgagcctagcgaggccgagatcagccacacccagaaagccaccctcgtgtgcctggctaccggcttctaccccgaccatgtggaactgtcttggtgggtcaacggcaaagaggtgcacagcggcgtgtgtaccgacccccagccactgaaagaacagcccgccctgaacgacagccggtactgcctgagcagcagactgagagtgtccgccaccttctggcagaacccccggaaccacttcagatgccaggtgcagttctacggcctgagcgagaacgacgagtggacccaggacagagccaagcccgtgacccagatcgtgtctgccgaagcctggggcagagccgattgcggctttaccagcgagagctaccagcagggcgtgctgagcgccaccatcctgtacgagatcctgctgggcaaggccaccctgtacgccgtgctggtgtctgccctggtgctgatggctatggtcaagcggaaggacagccggggaagggccaagcgatctggatctggagcaacaaacttctcactactcaaacaagcaggtgacgtggaggagaatcccgggcctactagtatggactggatttggcgcatccttttccttgtcggcgctgctaccggcgcccattcccaactgcaactgcaagagtctggccctggcctggtcaagccttctgaaaccctgagcctgacctgtaccgtgtccggcggctctatcagcagcggcgattactactggggctggatcagacagcctccaggcaagggactcgaatggatcggcagcatcagctacagcggctccacctactacaacccaagcctgaagtccagagtgaccatcagcgtggacaccagcagaaaccagttctccctgaagctgagcagcgtgacagccgccgatacagccgtgtattattgcaccagagaggacagcagcaactggcggagtagaggacagggcacactggtcacagtgtcctcttctggaggcggtggaagcggtggaggaggatctgaagtgcagctggttgaatctggcggaggactggttcaggctggcggatctctgagactgtcttgtgccgccagcggcagaacctttagcatgggctggtttagacaggcccctggcaaagagagagagttcgtcgccgccatcacatactctggcggcagcccttactacgccgactctgtgaagggcagattcaccatcagccgggacaacgccaagaacaccgtgtacctccagatgaacagcctgaagcctgaggacaccgccgtgtactactgcgccgccaatccaacatacggcagcgactggaacgccgagaattggggccagggaacccaagtgacagtgtctagcggatccggcggcggaggatctggcggaggcggatctgggggcggaggctctttcgaagaagtgcagctggttgaatcaggtggcggcctggttcaacctggcggatctctgagactgagctgtgccgccagcggctacaccttcagcgactactttatgagctgggtccgacaggcccctggcaaaggacttgaatgggtcgccaccatcagcaatggcggcacctacacttactaccccgacagcgtgaagggcagattcaccatctccagagacaacagcaagaacaccctgtacctccagatgaactccctgagagccgaggacaccgccgtgtactactgcgccagattcgacggctacatcttcgactattggggccagggcaccctggtcacagtctcttctacgcgtatccagaaccctgatcctgccgtgtaccagctgcgggatagcaagagcagcgacaagagcgtgtgtctgttcaccgacttcgacagccagaccaacgtgtcccagagcaaggactccgacgtgtacatcaccgataagtgcgtgctggacatgcggagcatggacttcaagagcaactccgccgtggcctggtccaacaagtccgatttcgcctgcgccaacgccttcaacaacagcattatccccgaggacacattcttcccaagccccgagagcagctgcgacgtgaagctggtggaaaagagcttcgagacagacaccaacctgaacttccagaacctgagcgtgatcggcttcagaatcctgctgctgaaagtggccggctttaacctgctgatgaccctgcggctgtggtccagc

SEQ ID NO: 10582 - DNA, 2673 bp, Artificial Sequence
  Synthetic Polynucloetide
atggccttaccagtgaccgccttgctcctgccgctggccttgctgctccacgccgccaggccggaagtgcaggttttggagtctggcggaggactggttcagcctggcggatctctgagactgtcttgtgccgccagcggcttcaccttcagcaactttgccatgagctgggtccgacaggcccctggcaaaggacttgaatgggtgtccacaatcagcggcagcgccggcacaacagattacgccgattctgtgaagggcagattcaccatcagccgggacaacagcaagaaaaccctgtacctccagatgaacagcctgcgcgtggaagataccgccgtgtactactgtgccgatggcagaggccccttcttcgattatcgcggccagggcacactggtcaccgtttcttctggtaccggcggaggcggatctggcggcggaggtagcggtggcggaggatctgaattcgacatccagatgacacagagccctagcagcctgtctgccagcgtgggagacagagtgaccatcacctgtagagccagccaggacatcagcaactacctgaactggtatcagcagaagcccggcaaggcccctaagctgctgatctactacaccagcagactgcacagcggcgtgcccagcagattttctggctctggcagcggcaccgacttcaccctgacaatatctagcctccagcctgaggacttcgccacctactattgccagcagggcaacaccctgccttacacatttggacagggcaccaaggtggaaatcaagagactcgaggacctgaagaacgtgttcccacctgaggtggccgtgttcgagcctagcgaggccgagatcagccacacccagaaagccaccctcgtgtgcctggctaccggcttctaccccgaccatgtggaactgtcttggtgggtcaacggcaaagaggtgcacagcggcgtgtgtaccgacccccagccactgaaagaacagcccgccctgaacgacagccggtactgcctgagcagcagactgagagtgtccgccaccttctggcagaacccccggaaccacttcagatgccaggtgcagttctacggcctgagcgagaacgacgagtggacccaggacagagccaagcccgtgacccagatcgtgtctgccgaagcctggggcagagccgattgcggctttaccagcgagagctaccagcagggcgtgctgagcgccaccatcctgtacgagatcctgctgggcaaggccaccctgtacgccgtgctggtgtctgccctggtgctgatggctatggtcaagcggaaggacagccggggaagggccaagcgatctggatctggagcaacaaacttctcactactcaaacaagcaggtgacgtggaggagaatcccgggcctactagtatggactggatttggcgcatccttttccttgtcggcgctgctaccggcgcccattccgggcccgaagtgcagctggttgaatctggcggaggactggttcaggctggcggatctctgagactgtcttgtgccgccagcggcagaacctttagcatgggctggtttagacaggcccctggcaaagagagagagttcgtcgccgccatcacatacagcggcggcagcccttactacgcctcttctgtcagaggccggttcaccatcagccgggacaacgccaagaacaccgtgtacctccagatgaacagcctgaagccagaggacaccgccgtgtactactgtgccgccaatccaacctacggcagcgactggaatgccgagaattggggccagggcacccaagtgacagtgtctagtggatccggcggcggaggatctggcggaggcggatctgggggcggaggctctttcgaagaagtgcagctggttgaatcaggtggcggcctggttcaacctggcggatctctgagactgagctgtgccgccagcggctacaccttcagcgactactttatgagctgggtccgacaggcccctggcaaaggacttgaatgggtcgccaccatcagcaatggcggcacctacacttactaccccgacagcgtgaagggcagattcaccatctccagagacaacagcaagaacaccctgtacctccagatgaactccctgagagccgaggacaccgccgtgtactactgcgccagattcgacggctacatcttcgactattggggccagggcaccctggtcacagtctcttctacgcgtatccagaaccctgatcctgccgtgtaccagctgcgggatagcaagagcagcgacaagagcgtgtgtctgttcaccgacttcgacagccagaccaacgtgtcccagagcaaggactccgacgtgtacatcaccgataagtgcgtgctggacatgcggagcatggacttcaagagcaactccgccgtggcctggtccaacaagtccgatttcgcctgcgccaacgccttcaacaacagcattatccccgaggacacattcttcccaagccccgagagcagctgcgacgtgaagctggtggaaaagagcttcgagacagacaccaacctgaacttccagaacctgagcgtgatcggcttcagaatcctgctgctgaaagtggccggctttaacctgctgatgaccctgcggctgtggtccagc

SEQ ID NO: 10583 - DNA, 2169 bp, Artificial Sequence
  Synthetic Polynucloetide
atggccttaccagtgaccgccttgctcctgccgctggccttgctgctccacgccgccaggccggacatccagatgacacagagccctagcagcctgtctgccagcgtgggagacagagtgaccatcacctgtagagccagccaggacatcagcagctacctgaactggtatcagcagaagcccggcaaggcccctaagctgctgatctactacaccagcagactgcacagcggcgtgcccagcagattttctggctctggcagcggcaccgacttcaccctgacaatatctagcctccagcctgaggacttcgccacctactattgccagcagggcaacaccctgccttacacatttggacagggcaccaaggtggaaatcaagagaggcggaggcggaagtggaggcggaggatctggcggcggaggctctgaagtgcagctggttgaatcaggtggcggcctggttcaacctggcggatctctgagactgagctgtgccgccagcggcttcaccttcagcgactactttatgagctgggtccgacaggcccctggcaaaggacttgaatgggtcgccaccatcagcaatggcggcacctacacttactaccccgacagcgtgaagggcagattcaccatctccagagacaacagcaagaacaccctgtacctccagatgaactccctgagagccgaggacaccgccgtgtactactgcgccagattcgacggctacatcttcgactattggggccagggcaccctggtcacagtctcttctacgcgtgagcagaaactgatctcggaagaggatctggcgaagcccaccacgacgccagcgccgcgaccaccaacaccggcgcccaccatcgcgtcgcagcccctgtccctgcgcccagaggcgtgccggccagcggcggggggcgcagtgcacacgagggggctggacttcgcctgtgacatctacatctgggcgcccttggccgggacttgtggggtccttctcctgtcactggttatcaccctttactgcaaacggggcagaaagaaactcctgtatatattcaaacaaccatttatgagaccagtacaaactactcaagaggaagatggctgtagctgccgatttccagaagaagaagaaggaggatgtgaactgagagtgaagttcagcaggagcgcagacgcccccgcgtaccagcagggccagaaccagctctataacgagctgaatctaggacgaagagaggagtacgatgttttggacaagagacgtggccgggaccctgagatggggggaaagccgagaaggaagaaccctcaggaaggcctgtacaatgaactgcagaaagataagatggcggaggcctacagtgagattgggatgaaaggcgagcgccggaggggcaaggggcacgatggcctttaccagggtctcagtacagccaccaaggacacctacgacgcccttcacatgcaggccctgccccctcgctctagtggctccggcgagggcagaggaagtctactaacctgcggagatgtggaagaaaatcctggcccacatatgaccgagtacaagcccacggtgcgcctcgccacccgcgacgacgtccccagggccgtacgcaccctcgccgccgcgttcgccgactaccccgccacgcgccacaccgtcgatccggaccgccacatcgagcgggtcaccgagctgcaagaactcttcctcacgcgcgtcgggctcgacatcggcaaggtgtgggtcgcggacgacggcgccgcggtggcggtctggaccacgccggagagcgtcgaagcgggggcggtgttcgccgagatcggcccgcgcatggccgagttgagcggttcccggctggccgcgcagcaacagatggaaggcctcctggcgccgcaccggcccaaggagcccgcgtggttcctggccaccgtcggcgtctcgcccgaccaccagggcaagggtctgggcagcgccgtcgtgctccccggagtggaggcggccgagcgcgccggggtgcccgccttcctggagacctccgcgccccgcaacctccccttctacgagcggctcggcttcaccgtcaccgccgacgtcgaggtgcccgaaggaccgcgcacctggtgcatgacccgcaagcccggtgcctga

SEQ ID NO: 10584 - DNA, 2151 bp, Artificial Sequence
  Synthetic Polynucloetide
atggccttaccagtgaccgccttgctcctgccgctggccttgctgctccacgccgccaggccggacatccagatgacacagagccctagcagcctgtctgccagcgtgggagacagagtgaccatcacctgtagagccagccaggacatcagcagctacctgaactggtatcagcagaagcccggcaaggcccctaagctgctgatctactacaccagcagactgcacagcggcgtgcccagcagattttctggctctggcagcggcaccgacttcaccctgacaatatctagcctccagcctgaggacttcgccacctactattgccagcagggcaacaccctgccttacacatttggacagggcaccaaggtggaaatcaagagaggcggaggcggaagtggaggcggaggatctggcggcggaggctctgaagtgcagctggttgaatcaggtggcggcctggttcaacctggcggatctctgagactgagctgtgccgccagcggcttcaccttcagcgactactttatgagctgggtccgacaggcccctggcaaaggacttgaatgggtcgccaccatcagcaatggcggcacctacacttactaccccgacagcgtgaagggcagattcaccatctccagagacaacagcaagaacaccctgtacctccagatgaactccctgagagccgaggacaccgccgtgtactactgcgccagattcgacggctacatcttcgactattggggccagggcaccctggtcacagtctcttctacgcgtgagcagaaactgatctcggaagaggatctgaaaattgaagttatgtatcctcctccttacctagacaatgagaagagcaatggaaccattatccatgtgaaagggaaacacctttgtccaagtcccctatttcccggaccttctaagcccttttgggtgctggtggtggttgggggagtcctggcttgctatagcttgctagtaacagtggcctttattattttctgggtgaggagtaagaggagcaggctcctgcacagtgactacatgaacatgactccacgccgccccggacccacccgcaagcattaccagccctatgccccaccacgcgacttcgcagcctatcgctccagagtgaagttcagcaggagcgcagacgcccccgcgtaccagcagggccagaaccagctctataacgagctcaatctaggacgaagagaggagtacgatgttttggacaagagacgtggccgggaccctgagatggggggaaagccgagaaggaagaaccctcaggaaggcctgtacaatgaactgcagaaagataagatggcggaggcctacagtgagattgggatgaaaggcgagcgccggaggggcaaggggcacgatggcctttaccagggtctcagtacagccaccaaggacacctacgacgcccttcacatgcaggccctgccccctcgctctagtggctccggcgagggcagaggaagtctactaacctgcggagatgtggaagaaaatcctggcccacatatgaccgagtacaagcccacggtgcgcctcgccacccgcgacgacgtccccagggccgtacgcaccctcgccgccgcgttcgccgactaccccgccacgcgccacaccgtcgatccggaccgccacatcgagcgggtcaccgagctgcaagaactcttcctcacgcgcgtcgggctcgacatcggcaaggtgtgggtcgcggacgacggcgccgcggtggcggtctggaccacgccggagagcgtcgaagcgggggcggtgttcgccgagatcggcccgcgcatggccgagttgagcggttcccggctggccgcgcagcaacagatggaaggcctcctggcgccgcaccggcccaaggagcccgcgtggttcctggccaccgtcggcgtctcgcccgaccaccagggcaagggtctgggcagcgccgtcgtgctccccggagtggaggcggccgagcgcgccggggtgcccgccttcctggagacctccgcgccccgcaacctccccttctacgagcggctcggcttcaccgtcaccgccgacgtcgaggtgcccgaaggaccgcgcacctggtgcatgacccgcaagcccggtgcctga

SEQ ID NO: 10585 - DNA, 1479 bp, Artificial Sequence
  Synthetic Polynucloetide
atggccttaccagtgaccgccttgctcctgccgctggccttgctgctccacgccgccaggccggacatccagatgacacagagccctagcagcctgtctgccagcgtgggagacagagtgaccatcacctgtagagccagccaggacatcagcagctacctgaactggtatcagcagaagcccggcaaggcccctaagctgctgatctactacaccagcagactgcacagcggcgtgcccagcagattttctggctctggcagcggcaccgacttcaccctgacaatatctagcctccagcctgaggacttcgccacctactattgccagcagggcaacaccctgccttacacatttggacagggcaccaaggtggaaatcaagagaggcggaggcggaagtggaggcggaggatctggcggcggaggctctgaagtgcagctggttgaatcaggtggcggcctggttcaacctggcggatctctgagactgagctgtgccgccagcggcttcaccttcagcgactactttatgagctgggtccgacaggcccctggcaaaggacttgaatgggtcgccaccatcagcaatggcggcacctacacttactaccccgacagcgtgaagggcagattcaccatctccagagacaacagcaagaacaccctgtacctccagatgaactccctgagagccgaggacaccgccgtgtactactgcgccagattcgacggctacatcttcgactattggggccagggcaccctggtcacagtctcttctacgcgtgagcagaaactgatctcggaagaggatctgaaaattgaagttatgtatcctcctccttacctagacaatgagaagagcaatggaaccattatccatgtgaaagggaaacacctttgtccaagtcccctatttcccggaccttctaagcccttttgggtgctggtggtggttgggggagtcctggcttgctatagcttgctagtaacagtggcctttattattttctgggtgaggagtaagaggagcaggctcctgcacagtgactacatgaacatgactccacgccgccccggacccacccgcaagcattaccagccctatgccccaccacgcgacttcgcagcctatcgctccagagtgaagttcagcaggagcgcagacgcccccgcgtaccagcagggccagaaccagctctataacgagctcaatctaggacgaagagaggagtacgatgttttggacaagagacgtggccgggaccctgagatggggggaaagccgagaaggaagaaccctcaggaaggcctgtacaatgaactgcagaaagataagatggcggaggcctacagtgagattgggatgaaaggcgagcgccggaggggcaaggggcacgatggcctttaccagggtctcagtacagccaccaaggacacctacgacgcccttcacatgcaggccctgccccctcgc

SEQ ID NO: 10586 - DNA, 1500 bp, Artificial Sequence
  Synthetic Polynucloetide
atggccttaccagtgaccgccttgctcctgccgctggccttgctgctccacgccgccaggccggacatccagatgacacagagccctagcagcctgtctgccagcgtgggagacagagtgaccatcacctgtagagccagccaggacatcagcagctacctgaactggtatcagcagaagcccggcaaggcccctaagctgctgatctactacaccagcagactgcacagcggcgtgcccagcagattttctggctctggcagcggcaccgacttcaccctgacaatatctagcctccagcctgaggacttcgccacctactattgccagcagggcaacaccctgccttacacatttggacagggcaccaaggtggaaatcaagagaggcggaggcggaagtggaggcggaggatctggcggcggaggctctgaagtgcagctggttgaatcaggtggcggcctggttcaacctggcggatctctgagactgagctgtgccgccagcggcttcaccttcagcgactactttatgagctgggtccgacaggcccctggcaaaggacttgaatgggtcgccaccatcagcaatggcggcacctacacttactaccccgacagcgtgaagggcagattcaccatctccagagacaacagcaagaacaccctgtacctccagatgaactccctgagagccgaggacaccgccgtgtactactgcgccagattcgacggctacatcttcgactattggggccagggcaccctggtcacagtctcttctacgcgtgagcagaaactgatctcggaagaggatctggcgaagcccaccacgacgccagcgccgcgaccaccaacaccggcgcccaccatcgcgtcgcagcccctgtccctgcgcccagaggcgtgccggccagcggcggggggcgcagtgcacacgagggggctggacttcgcctgtgacatctacatctgggcgcccttggccgggacttgtggggtccttctcctgtcactggttatcaccctttactgcaaacggggcagaaagaaactcctgtatatattcaaacaaccatttatgagaccagtacaaactactcaagaggaagatggctgtagctgccgatttccagaagaagaagaaggaggatgtgaactgagagtgaagttcagcaggagcgcagacgcccccgcgtaccagcagggccagaaccagctctataacgagctgaatctaggacgaagagaggagtacgatgttttggacaagagacgtggccgggaccctgagatggggggaaagccgagaaggaagaaccctcaggaaggcctgtacaatgaactgcagaaagataagatggcggaggcctacagtgagattgggatgaaaggcgagcgccggaggggcaaggggcacgatggcctttaccagggtctcagtacagccaccaaggacacctacgacgcccttcacatgcaggccctgccccctcgctga

SEQ ID NO: 10587 - DNA, 1500 bp, Artificial Sequence
  Synthetic Polynucloetide
atggccttaccagtgaccgccttgctcctgccgctggccttgctgctccacgccgccaggccggaagtgcagctggttgaatcaggtggcggcctggttcaacctggcggatctctgagactgagctgtgccgccagcggcttcaccttcagcgactactttatgagctgggtccgacaggcccctggcaaaggacttgaatgggtcgccaccatcagcaatggcggcacctacacttactaccccgacagcgtgaagggcagattcaccatctccagagacaacagcaagaacaccctgtacctccagatgaactccctgagagccgaggacaccgccgtgtactactgcgccagattcgacggctacatcttcgactattggggccagggcaccctggtcacagtctcttctggcggaggcggaagtggaggcggaggatctggcggcggaggctctgacatccagatgacacagagccctagcagcctgtctgccagcgtgggagacagagtgaccatcacctgtagagccagccaggacatcagcagctacctgaactggtatcagcagaagcccggcaaggcccctaagctgctgatctactacaccagcagactgcacagcggcgtgcccagcagattttctggctctggcagcggcaccgacttcaccctgacaatatctagcctccagcctgaggacttcgccacctactattgccagcagggcaacaccctgccttacacatttggacagggcaccaaggtggaaatcaagagaacgcgtgagcagaaactgatctcggaagaggatctggcgaagcccaccacgacgccagcgccgcgaccaccaacaccggcgcccaccatcgcgtcgcagcccctgtccctgcgcccagaggcgtgccggccagcggcggggggcgcagtgcacacgagggggctggacttcgcctgtgacatctacatctgggcgcccttggccgggacttgtggggtccttctcctgtcactggttatcaccctttactgcaaacggggcagaaagaaactcctgtatatattcaaacaaccatttatgagaccagtacaaactactcaagaggaagatggctgtagctgccgatttccagaagaagaagaaggaggatgtgaactgagagtgaagttcagcaggagcgcagacgcccccgcgtaccagcagggccagaaccagctctataacgagctgaatctaggacgaagagaggagtacgatgttttggacaagagacgtggccgggaccctgagatggggggaaagccgagaaggaagaaccctcaggaaggcctgtacaatgaactgcagaaagataagatggcggaggcctacagtgagattgggatgaaaggcgagcgccggaggggcaaggggcacgatggcctttaccagggtctcagtacagccaccaaggacacctacgacgcccttcacatgcaggccctgccccctcgctga

SEQ ID NO: 10588 - DNA, 2739 bp, Artificial Sequence
  Synthetic Polynucloetide
atggccttaccagtgaccgccttgctcctgccgctggccttgctgctccacgccgccaggccggacatccagatgacacagagccctagcagcctgtctgccagcgtgggagacagagtgaccatcacctgtagagccagccaggacatcagcagctacctgaactggtatcagcagaagcccggcaaggcccctaagctgctgatctactacaccagcagactgcacagcggcgtgcccagcagattttctggctctggcagcggcaccgacttcaccctgacaatatctagcctccagcctgaggacttcgccacctactattgccagcagggcaacaccctgccttacacatttggacagggcaccaaggtggaaatcaagagaggcggaggcggaagtggaggcggaggatctggcggcggaggctctgaagtgcagctggttgaatcaggtggcggcctggttcaacctggcggatctctgagactgagctgtgccgccagcggcttcaccttcagcgactactttatgagctgggtccgacaggcccctggcaaaggacttgaatgggtcgccaccatcagcaatggcggcacctacacttactaccccgacagcgtgaagggcagattcaccatctccagagacaacagcaagaacaccctgtacctccagatgaactccctgagagccgaggacaccgccgtgtactactgcgccagattcgacggctacatcttcgactattggggccagggcaccctggtcacagtctcttctacgcgtgagcagaaactgatctcggaagaggatctggcgaagcccaccacgacgccagcgccgcgaccaccaacaccggcgcccaccatcgcgtcgcagcccctgtccctgcgcccagaggcgtgccggccagcggcggggggcgcagtgcacacgagggggctggacttcgcctgtgacatctacatctgggcgcccttggccgggacttgtggggtccttctcctgtcactggttatcaccctttactgcgggcgcgccagagtgaagttcagcaggagcgcagacgcccccgcgtaccagcagggccagaaccagctctataacgagctgaatctaggacgaagagaggagtacgatgttttggacaagagacgtggccgggaccctgagatggggggaaagccgagaaggaagaaccctcaggaaggcctgtacaatgaactgcagaaagataagatggcggaggcctacagtgagattgggatgaaaggcgagcgccggaggggcaaggggcacgatggcctttaccagggtctcagtacagccaccaaggacacctacgacgcccttcacatgcaggccctgccccctcgctctagaggatctggagcaacaaacttctcactactcaaacaagcaggtgacgtggaggagaatcccgggcctgggatccacatggccacttacgaggttctctgtgaggtggcgcggaaactgggcacggatgacagggaagtggtattgttcctcctaaacgtgttcatacctcaacccacactggcccaattaattggagctcttagagctttaaaggaggagggcaggttaacgtttcccctgttagcggaatgtctgtttcgtgcaggtcgcagagacctcttgcgcgacctgcttcacttagacccgcgttttttagagcgccacctagcgggcacaatgagttatttcagcccttatcagctcactgttctccacgtagacggggagctgtgtgcgagggatattaggtctttgatatttttaagcaaggacactatagggtctcgcagcacaccacagacattcttacactgggtgtactgtatggaaaacttagacctactgggtcccactgacgtggatgccctaatgtcaatgcttagatctttgtcaagagtagacctacagcgccaagtgcaaaccctaatgggccttcacctttccggcccatcacactcccaacactatcgccatacaccactcgagaccgatttctacgactacaaggacgacgatgacaagactagtggctccggcgagggcagaggaagtctactaacctgcggagatgtggaagaaaatcctggcccacatatgaccgagtacaagcccacggtgcgcctcgccacccgcgacgacgtccccagggccgtacgcaccctcgccgccgcgttcgccgactaccccgccacgcgccacaccgtcgatccggaccgccacatcgagcgggtcaccgagctgcaagaactcttcctcacgcgcgtcgggctcgacatcggcaaggtgtgggtcgcggacgacggcgccgcggtggcggtctggaccacgccggagagcgtcgaagcgggggcggtgttcgccgagatcggcccgcgcatggccgagttgagcggttcccggctggccgcgcagcaacagatggaaggcctcctggcgccgcaccggcccaaggagcccgcgtggttcctggccaccgtcggcgtctcgcccgaccaccagggcaagggtctgggcagcgccgtcgtgctccccggagtggaggcggccgagcgcgccggggtgcccgccttcctggagacctccgcgccccgcaacctccccttctacgagcggctcggcttcaccgtcaccgccgacgtcgaggtgcccgaaggaccgcgcacctggtgcatgacccgcaagcccggtgcctga

SEQ ID NO: 10589 - DNA, 2559 bp, Artificial Sequence
  Synthetic Polynucloetide
atggccttaccagtgaccgccttgctcctgccgctggccttgctgctccacgccgccaggccggacatccagatgacacagagccctagcagcctgtctgccagcgtgggagacagagtgaccatcacctgtagagccagccaggacatcagcagctacctgaactggtatcagcagaagcccggcaaggcccctaagctgctgatctactacaccagcagactgcacagcggcgtgcccagcagattttctggctctggcagcggcaccgacttcaccctgacaatatctagcctccagcctgaggacttcgccacctactattgccagcagggcaacaccctgccttacacatttggacagggcaccaaggtggaaatcaagagactcgagatccagaaccctgatcctgccgtgtaccagctgcgggatagcaagagcagcgacaagagcgtgtgtctgttcaccgacttcgacagccagaccaacgtgtcccagagcaaggactccgacgtgtacatcaccgataagtgcgtgctggacatgcggagcatggacttcaagagcaactccgccgtggcctggtccaacaagtccgatttcgcctgcgccaacgccttcaacaacagcattatccccgaggacacattcttcccaagcagcgacgtgccctgcgacgtgaagctggtggaaaagagcttcgagacagacaccaacctgaacttccagaacctgagcgtgatcggcttcagaatcctgctgctgaaagtggccggctttaacctgctgatgaccctgcggctgtggtccagccgcgccaagagaagcggatctggcgtgaagcagaccctgaatttcgacctgctgaagctggctggcgacgtggaatccaacccaggccctactagtatggactggatttggcgcatccttttccttgtcggcgctgctaccggcgcgcattccttcgaagaagtgcagctggttgaatcaggtggcggcctggttcaacctggcggatctctgagactgagctgtgccgccagcggcttcaccttcagcgactactttatgagctgggtccgacaggcccctggcaaaggacttgaatgggtcgccaccatcagcaatggcggcacctacacttactaccccgacagcgtgaagggcagattcaccatctccagagacaacagcaagaacaccctgtacctccagatgaactccctgagagccgaggacaccgccgtgtactactgcgccagattcgacggctacatcttcgactattggggccagggcaccctggtcacagtctcttctacgcgtgaggacctgaagaacgtgttcccacctgaggtggccgtgttcgagcctagcaaggccgagatcgcccacacccagaaagccaccctcgtgtgcctggctaccggcttctaccccgaccatgtggaactgtcttggtgggtcaacggcaaagaggtgcacagcggcgtgtgtaccgacccccagccactgaaagaacagcccgccctgaacgacagccggtactgcctgagcagcagactgagagtgtccgccaccttctggcagaacccccggaaccacttcagatgccaggtgcagttctacggcctgagcgagaacgacgagtggacccaggacagagccaagcccgtgacccagatcgtgtctgccgaagcctggggcagagccgattgcggcatcaccagcgccagctaccaccagggcgtgctgagcgccaccatcctgtacgagatcctgctgggcaaggccaccctgtacgccgtgctggtgtctgccctggtgctgatggctatggtcaagcggaaggacagccggggaagggccaagcgatctggatctggagcaacaaacttctcactactcaaacaagcaggtgacgtggaggagaatcccgggccttctagaggccatatgaccgagtacaagcccacggtgcgcctcgccacccgcgacgacgtccccagggccgtacgcaccctcgccgccgcgttcgccgactaccccgccacgcgccacaccgtcgatccggaccgccacatcgagcgggtcaccgagctgcaagaactcttcctcacgcgcgtcgggctcgacatcggcaaggtgtgggtcgcggacgacggcgccgcggtggcggtctggaccacgccggagagcgtcgaagcgggggcggtgttcgccgagatcggcccgcgcatggccgagttgagcggttcccggctggccgcgcagcaacagatggaaggcctcctggcgccgcaccggcccaaggagcccgcgtggttcctggccaccgtcggcgtctcgcccgaccaccagggcaagggtctgggcagcgccgtcgtgctccccggagtggaggcggccgagcgcgccggggtgcccgccttcctggagacctccgcgccccgcaacctccccttctacgagcggctcggcttcaccgtcaccgccgacgtcgaggtgcccgaaggaccgcgcacctggtgcatgacccgcaagcccggtgcctga

SEQ ID NO: 10590 - DNA, 2556 bp, Artificial Sequence
  Synthetic Polynucloetide
atggccttaccagtgaccgccttgctcctgccgctggccttgctgctccacgccgccaggccggacatccagatgacacagagccctagcagcctgtctgccagcgtgggagacagagtgaccatcacctgtagagccagccaggacatcagcagctacctgaactggtatcagcagaagcccggcaaggcccctaagctgctgatctactacaccagcagactgcacagcggcgtgcccagcagattttctggctctggcagcggcaccgacttcaccctgacaatatctagcctccagcctgaggacttcgccacctactattgccagcagggcaacaccctgccttacacatttggacagggcaccaaggtggaaatcaagagactcgaggacctgaagaacgtgttcccacctgaggtggccgtgttcgagcctagcaaggccgagatcgcccacacccagaaagccaccctcgtgtgcctggctaccggcttctaccccgaccatgtggaactgtcttggtgggtcaacggcaaagaggtgcacagcggcgtgtgtaccgacccccagccactgaaagaacagcccgccctgaacgacagccggtactgcctgagcagcagactgagagtgtccgccaccttctggcagaacccccggaaccacttcagatgccaggtgcagttctacggcctgagcgagaacgacgagtggacccaggacagagccaagcccgtgacccagatcgtgtctgccgaagcctggggcagagccgattgcggcatcaccagcgccagctaccaccagggcgtgctgagcgccaccatcctgtacgagatcctgctgggcaaggccaccctgtacgccgtgctggtgtctgccctggtgctgatggctatggtcaagcggaaggacagccggggaagggccaagcgatctggatctggagcaacaaacttctcactactcaaacaagcaggtgacgtggaggagaatcccgggcctactagtatggactggatttggcgcatccttttccttgtcggcgctgctaccggcgcgcattccttcgaagaagtgcagctggttgaatcaggtggcggcctggttcaacctggcggatctctgagactgagctgtgccgccagcggcttcaccttcagcgactactttatgagctgggtccgacaggcccctggcaaaggacttgaatgggtcgccaccatcagcaatggcggcacctacacttactaccccgacagcgtgaagggcagattcaccatctccagagacaacagcaagaacaccctgtacctccagatgaactccctgagagccgaggacaccgccgtgtactactgcgccagattcgacggctacatcttcgactattggggccagggcaccctggtcacagtctcttctacgcgtatccagaaccctgatcctgccgtgtaccagctgcgggatagcaagagcagcgacaagagcgtgtgtctgttcaccgacttcgacagccagaccaacgtgtcccagagcaaggactccgacgtgtacatcaccgataagtgcgtgctggacatgcggagcatggacttcaagagcaactccgccgtggcctggtccaacaagtccgatttcgcctgcgccaacgccttcaacaacagcattatccccgaggacacattcttcccaagcagcgacgtgccctgcgacgtgaagctggtggaaaagagcttcgagacagacaccaacctgaacttccagaacctgagcgtgatcggcttcagaatcctgctgctgaaagtggccggctttaacctgctgatgaccctgcggctgtggtccagccgcgccaagagaagcggatctggcgtgaagcagaccctgaatttcgacctgctgaagctggctggcgacgtggaatccaacccaggcccttctagaggccatatgaccgagtacaagcccacggtgcgcctcgccacccgcgacgacgtccccagggccgtacgcaccctcgccgccgcgttcgccgactaccccgccacgcgccacaccgtcgatccggaccgccacatcgagcgggtcaccgagctgcaagaactcttcctcacgcgcgtcgggctcgacatcggcaaggtgtgggtcgcggacgacggcgccgcggtggcggtctggaccacgccggagagcgtcgaagcgggggcggtgttcgccgagatcggcccgcgcatggccgagttgagcggttcccggctggccgcgcagcaacagatggaaggcctcctggcgccgcaccggcccaaggagcccgcgtggttcctggccaccgtcggcgtctcgcccgaccaccagggcaagggtctgggcagcgccgtcgtgctccccggagtggaggcggccgagcgcgccggggtgcccgccttcctggagacctccgcgccccgcaacctccccttctacgagcggctcggcttcaccgtcaccgccgacgtcgaggtgcccgaaggaccgcgcacctggtgcatgacccgcaagcccggtgcctga

SEQ ID NO: 10591 - DNA, 1854 bp, Artificial Sequence
  Synthetic Polynucloetide
atggccttaccagtgaccgccttgctcctgccgctggccttgctgctccacgccgccaggccggacatccagatgacacagagccctagcagcctgtctgccagcgtgggagacagagtgaccatcacctgtagagccagccaggacatcagcagctacctgaactggtatcagcagaagcccggcaaggcccctaagctgctgatctactacaccagcagactgcacagcggcgtgcccagcagattttctggctctggcagcggcaccgacttcaccctgacaatatctagcctccagcctgaggacttcgccacctactattgccagcagggcaacaccctgccttacacatttggacagggcaccaaggtggaaatcaagagactcgaggacctgaagaacgtgttcccacctgaggtggccgtgttcgagcctagcgaggccgagatcagccacacccagaaagccaccctcgtgtgcctggctaccggcttctaccccgaccatgtggaactgtcttggtgggtcaacggcaaagaggtgcacagcggcgtgtgtaccgacccccagccactgaaagaacagcccgccctgaacgacagccggtactgcctgagcagcagactgagagtgtccgccaccttctggcagaacccccggaaccacttcagatgccaggtgcagttctacggcctgagcgagaacgacgagtggacccaggacagagccaagcccgtgacccagatcgtgtctgccgaagcctggggcagagccgattgcggctttaccagcgagagctaccagcagggcgtgctgagcgccaccatcctgtacgagatcctgctgggcaaggccaccctgtacgccgtgctggtgtctgccctggtgctgatggctatggtcaagcggaaggacagccggggaagggccaagcgatctggatctggagcaacaaacttctcactactcaaacaagcaggtgacgtggaggagaatcccgggcctactagtatggactggatttggcgcatccttttccttgtcggcgctgctaccggcgcgcattccttcgaagaagtgcagctggttgaatcaggtggcggcctggttcaacctggcggatctctgagactgagctgtgccgccagcggcttcaccttcagcgactactttatgagctgggtccgacaggcccctggcaaaggacttgaatgggtcgccaccatcagcaatggcggcacctacacttactaccccgacagcgtgaagggcagattcaccatctccagagacaacagcaagaacaccctgtacctccagatgaactccctgagagccgaggacaccgccgtgtactactgcgccagattcgacggctacatcttcgactattggggccagggcaccctggtcacagtctcttctacgcgtatccagaaccctgatcctgccgtgtaccagctgcgggatagcaagagcagcgacaagagcgtgtgtctgttcaccgacttcgacagccagaccaacgtgtcccagagcaaggactccgacgtgtacatcaccgataagtgcgtgctggacatgcggagcatggacttcaagagcaactccgccgtggcctggtccaacaagtccgatttcgcctgcgccaacgccttcaacaacagcattatccccgaggacacattcttcccaagccccgagagcagctgcgacgtgaagctggtggaaaagagcttcgagacagacaccaacctgaacttccagaacctgagcgtgatcggcttcagaatcctgctgctgaaagtggccggctttaacctgctgatgaccctgcggctgtggtccagc

SEQ ID NO: 10592 - DNA, 2529 bp, Artificial Sequence
  Synthetic Polynucloetide
atggccttaccagtgaccgccttgctcctgccgctggccttgctgctccacgccgccaggccggacatccagatgacacagagccctagcagcctgtctgccagcgtgggagacagagtgaccatcacctgtagagccagccaggacatcagcagctacctgaactggtatcagcagaagcccggcaaggcccctaagctgctgatctactacaccagcagactgcacagcggcgtgcccagcagattttctggctctggcagcggcaccgacttcaccctgacaatatctagcctccagcctgaggacttcgccacctactattgccagcagggcaacaccctgccttacacatttggacagggcaccaaggtggaaatcaagagactcgaggacctgaagaacgtgttcccacctgaggtggccgtgttcgagcctagcgaggccgagatcagccacacccagaaagccaccctcgtgtgcctggctaccggcttctaccccgaccatgtggaactgtcttggtgggtcaacggcaaagaggtgcacagcggcgtgtgtaccgacccccagccactgaaagaacagcccgccctgaacgacagccggtactgcctgagcagcagactgagagtgtccgccaccttctggcagaacccccggaaccacttcagatgccaggtgcagttctacggcctgagcgagaacgacgagtggacccaggacagagccaagcccgtgacccagatcgtgtctgccgaagcctggggcagagccgattgcggctttaccagcgagagctaccagcagggcgtgctgagcgccaccatcctgtacgagatcctgctgggcaaggccaccctgtacgccgtgctggtgtctgccctggtgctgatggctatggtcaagcggaaggacagccggggaagggccaagcgatctggatctggagcaacaaacttctcactactcaaacaagcaggtgacgtggaggagaatcccgggcctactagtatggactggatttggcgcatccttttccttgtcggcgctgctaccggcgcgcattccttcgaagaagtgcagctggttgaatcaggtggcggcctggttcaacctggcggatctctgagactgagctgtgccgccagcggcttcaccttcagcgactactttatgagctgggtccgacaggcccctggcaaaggacttgaatgggtcgccaccatcagcaatggcggcacctacacttactaccccgacagcgtgaagggcagattcaccatctccagagacaacagcaagaacaccctgtacctccagatgaactccctgagagccgaggacaccgccgtgtactactgcgccagattcgacggctacatcttcgactattggggccagggcaccctggtcacagtctcttctacgcgtatccagaaccctgatcctgccgtgtaccagctgcgggatagcaagagcagcgacaagagcgtgtgtctgttcaccgacttcgacagccagaccaacgtgtcccagagcaaggactccgacgtgtacatcaccgataagtgcgtgctggacatgcggagcatggacttcaagagcaactccgccgtggcctggtccaacaagtccgatttcgcctgcgccaacgccttcaacaacagcattatccccgaggacacattcttcccaagccccgagagcagctgcgacgtgaagctggtggaaaagagcttcgagacagacaccaacctgaacttccagaacctgagcgtgatcggcttcagaatcctgctgctgaaagtggccggctttaacctgctgatgaccctgcggctgtggtccagccgcgccaagagaagcggatctggcgtgaagcagaccctgaatttcgacctgctgaagctggctggcgacgtggaatccaacccaggcccttctagaggcgggatccacaccatggctacctacgaggtgctgtgcgaggtggcaagaaagctgggcaccgacgacagagaagtggtgctgttcctgctgaacgtgttcatccctcagcctacactggcccagctgatcggtgcactgagagccctgaaagaggaaggccggctgacctttcctctgctggccgaatgcctgttcagagccggaagaagggatctgctgcgggacctgctgcatctggaccccagatttctggaaagacacctggccggcaccatgagctacttcagcccttaccagctgaccgtgctgcacgttgacggcgaactgtgcgccagagatattcggagcctgatcttcctgagcaaggacaccatcggcagccggtctacccctcagacatttctgcactgggtgtactgcatggaaaacctggacctgctcggccccacagatgtggatgccctgatgtccatgctgagaagcctgagcagagtggacctccagagacaggtgcagacactgatgggactgcacctgagcggacctagccacagccagcactacagacacacccct

SEQ ID NO: 10593 - DNA, 1866 bp, Artificial Sequence
  Synthetic Polynucloetide
atggccttaccagtgaccgccttgctcctgccgctggccttgctgctccacgccgccaggccggacatccagatgacacagagccctagcagcctgtctgccagcgtgggagacagagtgaccatcacctgtagagccagccaggacatcagcagctacctgaactggtatcagcagaagcccggcaaggcccctaagctgctgatctactacaccagcagactgcacagcggcgtgcccagcagattttctggctctggcagcggcaccgacttcaccctgacaatatctagcctccagcctgaggacttcgccacctactattgccagcagggcaacaccctgccttacacatttggacagggcaccaaggtggaaatcaagagactcgagatccagaaccctgatcctgccgtgtaccagctgcgggatagcaagagcagcgacaagagcgtgtgtctgttcaccgacttcgacagccagaccaacgtgtcccagagcaaggactccgacgtgtacatcaccgataagtgcgtgctggacatgcggagcatggacttcaagagcaactccgccgtggcctggtccaacaagtccgatttcgcctgcgccaacgccttcaacaacagcattatccccgaggacacattcttcccaagccccgagagcagctgcgacgtgaagctggtggaaaagagcttcgagacagacaccaacctgaacttccagaacctgagcgtgatcggcttcagaatcctgctgctgaaagtggccggctttaacctgctgatgaccctgcggctgtggtccagccgcgccaagagaagcggatctggcgtgaagcagaccctgaatttcgacctgctgaagctggctggcgacgtggaatccaacccaggccctactagtatggactggatttggcgcatccttttccttgtcggcgctgctaccggcgcgcattccttcgaagaagtgcagctggttgaatcaggtggcggcctggttcaacctggcggatctctgagactgagctgtgccgccagcggcttcaccttcagcgactactttatgagctgggtccgacaggcccctggcaaaggacttgaatgggtcgccaccatcagcaatggcggcacctacacttactaccccgacagcgtgaagggcagattcaccatctccagagacaacagcaagaacaccctgtacctccagatgaactccctgagagccgaggacaccgccgtgtactactgcgccagattcgacggctacatcttcgactattggggccagggcaccctggtcacagtctcttctacgcgtgaggacctgaagaacgtgttcccacctgaggtggccgtgttcgagcctagcgaggccgagatcagccacacccagaaagccaccctcgtgtgcctggctaccggcttctaccccgaccatgtggaactgtcttggtgggtcaacggcaaagaggtgcacagcggcgtgtgtaccgacccccagccactgaaagaacagcccgccctgaacgacagccggtactgcctgagcagcagactgagagtgtccgccaccttctggcagaacccccggaaccacttcagatgccaggtgcagttctacggcctgagcgagaacgacgagtggacccaggacagagccaagcccgtgacccagatcgtgtctgccgaagcctggggcagagccgattgcggctttaccagcgagagctaccagcagggcgtgctgagcgccaccatcctgtacgagatcctgctgggcaaggccaccctgtacgccgtgctggtgtctgccctggtgctgatggctatggtcaagcggaaggacagccgggga

SEQ ID NO: 10594 - DNA, 2532 bp, Artificial Sequence
  Synthetic Polynucloetide
atggccttaccagtgaccgccttgctcctgccgctggccttgctgctccacgccgccaggccggacatccagatgacacagagccctagcagcctgtctgccagcgtgggagacagagtgaccatcacctgtagagccagccaggacatcagcagctacctgaactggtatcagcagaagcccggcaaggcccctaagctgctgatctactacaccagcagactgcacagcggcgtgcccagcagattttctggctctggcagcggcaccgacttcaccctgacaatatctagcctccagcctgaggacttcgccacctactattgccagcagggcaacaccctgccttacacatttggacagggcaccaaggtggaaatcaagagactcgagatccagaaccctgatcctgccgtgtaccagctgcgggatagcaagagcagcgacaagagcgtgtgtctgttcaccgacttcgacagccagaccaacgtgtcccagagcaaggactccgacgtgtacatcaccgataagtgcgtgctggacatgcggagcatggacttcaagagcaactccgccgtggcctggtccaacaagtccgatttcgcctgcgccaacgccttcaacaacagcattatccccgaggacacattcttcccaagccccgagagcagctgcgacgtgaagctggtggaaaagagcttcgagacagacaccaacctgaacttccagaacctgagcgtgatcggcttcagaatcctgctgctgaaagtggccggctttaacctgctgatgaccctgcggctgtggtccagccgcgccaagagaagcggatctggcgtgaagcagaccctgaatttcgacctgctgaagctggctggcgacgtggaatccaacccaggccctactagtatggactggatttggcgcatccttttccttgtcggcgctgctaccggcgcgcattccttcgaagaagtgcagctggttgaatcaggtggcggcctggttcaacctggcggatctctgagactgagctgtgccgccagcggcttcaccttcagcgactactttatgagctgggtccgacaggcccctggcaaaggacttgaatgggtcgccaccatcagcaatggcggcacctacacttactaccccgacagcgtgaagggcagattcaccatctccagagacaacagcaagaacaccctgtacctccagatgaactccctgagagccgaggacaccgccgtgtactactgcgccagattcgacggctacatcttcgactattggggccagggcaccctggtcacagtctcttctacgcgtgaggacctgaagaacgtgttcccacctgaggtggccgtgttcgagcctagcgaggccgagatcagccacacccagaaagccaccctcgtgtgcctggctaccggcttctaccccgaccatgtggaactgtcttggtgggtcaacggcaaagaggtgcacagcggcgtgtgtaccgacccccagccactgaaagaacagcccgccctgaacgacagccggtactgcctgagcagcagactgagagtgtccgccaccttctggcagaacccccggaaccacttcagatgccaggtgcagttctacggcctgagcgagaacgacgagtggacccaggacagagccaagcccgtgacccagatcgtgtctgccgaagcctggggcagagccgattgcggctttaccagcgagagctaccagcagggcgtgctgagcgccaccatcctgtacgagatcctgctgggcaaggccaccctgtacgccgtgctggtgtctgccctggtgctgatggctatggtcaagcggaaggacagccggggaagggccaagcgatctggatctggagcaacaaacttctcactactcaaacaagcaggtgacgtggaggagaatcccgggccttctagaggcgggatccacaccatggctacctacgaggtgctgtgcgaggtggcaagaaagctgggcaccgacgacagagaagtggtgctgttcctgctgaacgtgttcatccctcagcctacactggcccagctgatcggtgcactgagagccctgaaagaggaaggccggctgacctttcctctgctggccgaatgcctgttcagagccggaagaagggatctgctgcgggacctgctgcatctggaccccagatttctggaaagacacctggccggcaccatgagctacttcagcccttaccagctgaccgtgctgcacgttgacggcgaactgtgcgccagagatattcggagcctgatcttcctgagcaaggacaccatcggcagccggtctacccctcagacatttctgcactgggtgtactgcatggaaaacctggacctgctcggccccacagatgtggatgccctgatgtccatgctgagaagcctgagcagagtggacctccagagacaggtgcagacactgatgggactgcacctgagcggacctagccacagccagcactacagacacacccct

SEQ ID NO: 10595 - DNA, 2691 bp, Artificial Sequence
  Synthetic Polynucloetide
atggccttaccagtgaccgccttgctcctgccgctggccttgctgctccacgccgccaggccgctcgaggggaaaccaattcccaaccctcttctgggactggattcaaccggcagcggcgaggacctgaagaacgtgttcccacctgaggtggccgtgttcgagcctagcaaggccgagatcgcccacacccagaaagccaccctcgtgtgcctggctaccggcttctaccccgaccatgtggaactgtcttggtgggtcaacggcaaagaggtgcacagcggcgtgtgtaccgacccccagccactgaaagaacagcccgccctgaacgacagccggtactgcctgagcagcagactgagagtgtccgccaccttctggcagaacccccggaaccacttcagatgccaggtgcagttctacggcctgagcgagaacgacgagtggacccaggacagagccaagcccgtgacccagatcgtgtctgccgaagcctggggcagagccgattgcggcatcaccagcgccagctaccaccagggcgtgctgagcgccaccatcctgtacgagatcctgctgggcaaggccaccctgtacgccgtgctggtgtctgccctggtgctgatggctatggtcaagcggaaggacagccggggaagggccaagcgatctggatctggagcaacaaacttctcactactcaaacaagcaggtgacgtggaggagaatcccgggcctactagcatggccttaccagtgaccgccttgctcctgccgctggccttgctgctccacgccgccaggccggacatccagatgacacagagccctagcagcctgtctgccagcgtgggagacagagtgaccatcacctgtagagccagccaggacatcagcagctacctgaactggtatcagcagaagcccggcaaggcccctaagctgctgatctactacaccagcagactgcacagcggcgtgcccagcagattttctggctctggcagcggcaccgacttcaccctgacaatatctagcctccagcctgaggacttcgccacctactattgccagcagggcaacaccctgccttacacatttggacagggcaccaaggtggaaatcaagagaggcggaggcggaagtggaggcggaggatctggcggcggaggctctgaagtgcagctggttgaatcaggtggcggcctggttcaacctggcggatctctgagactgagctgtgccgccagcggcttcaccttcagcgactactttatgagctgggtccgacaggcccctggcaaaggacttgaatgggtcgccaccatcagcaatggcggcacctacacttactaccccgacagcgtgaagggcagattcaccatctccagagacaacagcaagaacaccctgtacctccagatgaactccctgagagccgaggacaccgccgtgtactactgcgccagattcgacggctacatcttcgactattggggccagggcaccctggtcacagtctcttctacgcgtgagcagaaactgatctcggaagaggatgggagcggcatccagaaccctgatcctgccgtgtaccagctgcgggatagcaagagcagcgacaagagcgtgtgtctgttcaccgacttcgacagccagaccaacgtgtcccagagcaaggactccgacgtgtacatcaccgataagtgcgtgctggacatgcggagcatggacttcaagagcaactccgccgtggcctggtccaacaagtccgatttcgcctgcgccaacgccttcaacaacagcattatccccgaggacacattcttcccaagcagcgacgtgccctgcgacgtgaagctggtggaaaagagcttcgagacagacaccaacctgaacttccagaacctgagcgtgatcggcttcagaatcctgctgctgaaagtggccggctttaacctgctgatgaccctgcggctgtggtccagccgcgccaagagaagcggatctggcgtgaagcagaccctgaatttcgacctgctgaagctggctggcgacgtggaatccaacccaggcccttctagaggccatatgaccgagtacaagcccacggtgcgcctcgccacccgcgacgacgtccccagggccgtacgcaccctcgccgccgcgttcgccgactaccccgccacgcgccacaccgtcgatccggaccgccacatcgagcgggtcaccgagctgcaagaactcttcctcacgcgcgtcgggctcgacatcggcaaggtgtgggtcgcggacgacggcgccgcggtggcggtctggaccacgccggagagcgtcgaagcgggggcggtgttcgccgagatcggcccgcgcatggccgagttgagcggttcccggctggccgcgcagcaacagatggaaggcctcctggcgccgcaccggcccaaggagcccgcgtggttcctggccaccgtcggcgtctcgcccgaccaccagggcaagggtctgggcagcgccgtcgtgctccccggagtggaggcggccgagcgcgccggggtgcccgccttcctggagacctccgcgccccgcaacctccccttctacgagcggctcggcttcaccgtcaccgccgacgtcgaggtgcccgaaggaccgcgcacctggtgcatgacccgcaagcccggtgcctga

SEQ ID NO: 10596 - DNA, 2694 bp, Artificial Sequence
  Synthetic Polynucloetide
atggccttaccagtgaccgccttgctcctgccgctggccttgctgctccacgccgccaggccgctcgagcagaaactgatctcggaagaggatctgggctccggcgatcgccctgatcctgccgtgtaccagctgcgggatagcaagagcagcgacaagagcgtgtgtctgttcaccgacttcgacagccagaccaacgtgtcccagagcaaggactccgacgtgtacatcaccgataagtgcgtgctggacatgcggagcatggacttcaagagcaactccgccgtggcctggtccaacaagtccgatttcgcctgcgccaacgccttcaacaacagcattatccccgaggacacattcttcccaagccccgagagcagctgcgacgtgaagctggtggaaaagagcttcgagacagacaccaacctgaacttccagaacctgagcgtgatcggcttcagaatcctgctgctgaaagtggccggctttaacctgctgatgaccctgcggctgtggtccagctctagtcgcgccaagagaagcggatctggcgtgaagcagaccctgaatttcgacctgctgaagctggctggcgacgtggaatccaacccaggccccactagcatggccttaccagtgaccgccttgctcctgccgctggccttgctgctccacgccgccaggccggacatccagatgacacagagccctagcagcctgtctgccagcgtgggagacagagtgaccatcacctgtagagccagccaggacatcagcagctacctgaactggtatcagcagaagcccggcaaggcccctaagctgctgatctactacaccagcagactgcacagcggcgtgcccagcagattttctggctctggcagcggcaccgacttcaccctgacaatatctagcctccagcctgaggacttcgccacctactattgccagcagggcaacaccctgccttacacatttggacagggcaccaaggtggaaatcaagagaggcggaggcggaagtggaggcggaggatctggcggcggaggctctgaagtgcagctggttgaatcaggtggcggcctggttcaacctggcggatctctgagactgagctgtgccgccagcggcttcaccttcagcgactactttatgagctgggtccgacaggcccctggcaaaggacttgaatgggtcgccaccatcagcaatggcggcacctacacttactaccccgacagcgtgaagggcagattcaccatctccagagacaacagcaagaacaccctgtacctccagatgaactccctgagagccgaggacaccgccgtgtactactgcgccagattcgacggctacatcttcgactattggggccagggcaccctggtcacagtctcttctacgcgtgggaaaccaattcccaaccctcttctgggactggattcaaccggcagcggcgaggacctgaagaacgtgttcccacctgaggtggccgtgttcgagcctagcgaggccgagatcagccacacccagaaagccaccctcgtgtgcctggctaccggcttctaccccgaccatgtggaactgtcttggtgggtcaacggcaaagaggtgcacagcggcgtgtgtaccgacccccagccactgaaagaacagcccgccctgaacgacagccggtactgcctgagcagcagactgagagtgtccgccaccttctggcagaacccccggaaccacttcagatgccaggtgcagttctacggcctgagcgagaacgacgagtggacccaggacagagccaagcccgtgacccagatcgtgtctgccgaagcctggggcagagccgattgcggctttaccagcgagagctaccagcagggcgtgctgagcgccaccatcctgtacgagatcctgctgggcaaggccaccctgtacgccgtgctggtgtctgccctggtgctgatggctatggtcaagcggaaggacagccggggaagggccaagcgatctggatctggagcaacaaacttctcactactcaaacaagcaggtgacgtggaggagaatcccgggccttctagaggccatatgaccgagtacaagcccacggtgcgcctcgccacccgcgacgacgtccccagggccgtacgcaccctcgccgccgcgttcgccgactaccccgccacgcgccacaccgtcgatccggaccgccacatcgagcgggtcaccgagctgcaagaactcttcctcacgcgcgtcgggctcgacatcggcaaggtgtgggtcgcggacgacggcgccgcggtggcggtctggaccacgccggagagcgtcgaagcgggggcggtgttcgccgagatcggcccgcgcatggccgagttgagcggttcccggctggccgcgcagcaacagatggaaggcctcctggcgccgcaccggcccaaggagcccgcgtggttcctggccaccgtcggcgtctcgcccgaccaccagggcaagggtctgggcagcgccgtcgtgctccccggagtggaggcggccgagcgcgccggggtgcccgccttcctggagacctccgcgccccgcaacctccccttctacgagcggctcggcttcaccgtcaccgccgacgtcgaggtgcccgaaggaccgcgcacctggtgcatgacccgcaagcccggtgcctga

SEQ ID NO: 10597 - DNA, 2556 bp, Artificial Sequence
  Synthetic Polynucloetide
atggccttaccagtgaccgccttgctcctgccgctggccttgctgctccacgccgccaggccggacatccagatgacacagagccctagcagcctgtctgccagcgtgggagacagagtgaccatcacctgtagagccagccaggacatcagcagctacctgaactggtatcagcagaagcccggcaaggcccctaagctgctgatctactacaccagcagactgcacagcggcgtgcccagcagattttctggctctggcagcggcaccgacttcaccctgacaatatctagcctccagcctgaggacttcgccacctactattgccagcagggcaacaccctgccttacacatttggacagggcaccaaggtggaaatcaagagactcgaggacctgaagaacgtgttcccacctgaggtggccgtgttcgagcctagcgaggccgagatcagccacacccagaaagccaccctcgtgtgcctggctaccggcttctaccccgaccatgtggaactgtcttggtgggtcaacggcaaagaggtgcacagcggcgtgtctaccgacccccagccactgaaagaacagcccgccctgaacgacagccggtactgcctgagcagcagactgagagtgtccgccaccttctggcagaacccccggaaccacttcagatgccaggtgcagttctacggcctgagcgagaacgacgagtggacccaggacagagccaagcccgtgacccagatcgtgtctgccgaagcctggggcagagccgattgcggctttaccagcgagagctaccagcagggcgtgctgagcgccaccatcctgtacgagatcctgctgggcaaggccaccctgtacgccgtgctggtgtctgccctggtgctgatggctatggtcaagcggaaggacagccggggaagggccaagcgatctggatctggagcaacaaacttctcactactcaaacaagcaggtgacgtggaggagaatcccgggcctactagtatggactggatttggcgcatccttttccttgtcggcgctgctaccggcgcgcattccttcgaagaagtgcagctggttgaatcaggtggcggcctggttcaacctggcggatctctgagactgagctgtgccgccagcggcttcaccttcagcgactactttatgagctgggtccgacaggcccctggcaaaggacttgaatgggtcgccaccatcagcaatggcggcacctacacttactaccccgacagcgtgaagggcagattcaccatctccagagacaacagcaagaacaccctgtacctccagatgaactccctgagagccgaggacaccgccgtgtactactgcgccagattcgacggctacatcttcgactattggggccagggcaccctggtcacagtctcttctacgcgtatccagaaccctgatcctgccgtgtaccagctgcgggatagcaagagcagcgacaagagcgtgtgtctgttcaccgacttcgacagccagaccaacgtgtcccagagcaaggactccgacgtgtacatcaccgataagaccgtgctggacatgcggagcatggacttcaagagcaactccgccgtggcctggtccaacaagtccgatttcgcctgcgccaacgccttcaacaacagcattatccccgaggacacattcttcccaagccccgagagcagctgcgacgtgaagctggtggaaaagagcttcgagacagacaccaacctgaacttccagaacctgagcgtgatcggcttcagaatcctgctgctgaaagtggccggctttaacctgctgatgaccctgcggctgtggtccagccgcgccaagagaagcggatctggcgtgaagcagaccctgaatttcgacctgctgaagctggctggcgacgtggaatccaacccaggcccttctagaggccatatgaccgagtacaagcccacggtgcgcctcgccacccgcgacgacgtccccagggccgtacgcaccctcgccgccgcgttcgccgactaccccgccacgcgccacaccgtcgatccggaccgccacatcgagcgggtcaccgagctgcaagaactcttcctcacgcgcgtcgggctcgacatcggcaaggtgtgggtcgcggacgacggcgccgcggtggcggtctggaccacgccggagagcgtcgaagcgggggcggtgttcgccgagatcggcccgcgcatggccgagttgagcggttcccggctggccgcgcagcaacagatggaaggcctcctggcgccgcaccggcccaaggagcccgcgtggttcctggccaccgtcggcgtctcgcccgaccaccagggcaagggtctgggcagcgccgtcgtgctccccggagtggaggcggccgagcgcgccggggtgcccgccttcctggagacctccgcgccccgcaacctccccttctacgagcggctcggcttcaccgtcaccgccgacgtcgaggtgcccgaaggaccgcgcacctggtgcatgacccgcaagcccggtgcctga

SEQ ID NO: 10598 - DNA, 2802 bp, Artificial Sequence
  Synthetic Polynucloetide
atggccttaccagtgaccgccttgctcctgccgctggccttgctgctccacgccgccaggccggacatccagatgacacagagccctagcagcctgtctgccagcgtgggagacagagtgaccatcacctgtagagccagccaggacatcagcagctacctgaactggtatcagcagaagcccggcaaggcccctaagctgctgatctactacaccagcagactgcacagcggcgtgcccagcagattttctggctctggcagcggcaccgacttcaccctgacaatatctagcctccagcctgaggacttcgccacctactattgccagcagggcaacaccctgccttacacatttggacagggcaccaaggtggaaatcaagagactcgaggacctgaagaacgtgttcccacctgaggtggccgtgttcgagcctagcgaggccgagatcagccacacccagaaagccaccctcgtgtgcctggctaccggcttctaccccgaccatgtggaactgtcttggtgggtcaacggcaaagaggtgcacagcggcgtgtctaccgacccccagccactgaaagaacagcccgccctgaacgacagccggtactgcctgagcagcagactgagagtgtccgccaccttctggcagaacccccggaaccacttcagatgccaggtgcagttctacggcctgagcgagaacgacgagtggacccaggacagagccaagcccgtgacccagatcgtgtctgccgaagcctggggcagagccgattgcggctttaccagcgagagctaccagcagggcgtgctgagcgccaccatcctgtacgagatcctgctgggcaaggccaccctgtacgccgtgctggtgtctgccctggtgctgatggctatggtcaagcggaaggacagccggggaagggccaagcgatctggatctggagcaacaaacttctcactactcaaacaagcaggtgacgtggaggagaatcccgggcctactagtatggactggatttggcgcatccttttccttgtcggcgctgctaccggcgcgcattccttcgaagaagtgcagctggttgaatcaggtggcggcctggttcaacctggcggatctctgagactgagctgtgccgccagcggcttcaccttcagcgactactttatgagctgggtccgacaggcccctggcaaaggacttgaatgggtcgccaccatcagcaatggcggcacctacacttactaccccgacagcgtgaagggcagattcaccatctccagagacaacagcaagaacaccctgtacctccagatgaactccctgagagccgaggacaccgccgtgtactactgcgccagattcgacggctacatcttcgactattggggccagggcaccctggtcacagtctcttctacgcgtgagcagaaactgatctcggaagaggatgggagcggcaccccattcccttctctggcccctcccatcatgctgctggtggacggcaagcagcagatggtggtcgtgtgcctggtgctggatgtggccccacctggactggacagccccatctggtttagcgccggcaatggctctgccctggacgcctttacctacggcccaagccctgccaccgatggcacctggacaaatctggcccacctgagcctgcccagcgaggaactggcttcttgggagcctctcgtgtgccacacaggacctggcgctgagggacacagcagatccacccagcctatgcacctgtctggcgaggccagcaccgccagaacctgtcctcaggaacctctgagaggcacccctggcggagcactgtggctgggagtgctgagactgctgctgttcaagctgctgctgtttgacctgctgctgacctgctcctgtctgtgcgatcctgccggccctctgccttctcctgccaccaccacaagactgagagccctgggcagccacagactgcaccctgccacagagacaggcggcagagaggccacaagcagccctagaccccagcccagagacagaagatggggcgataccccccctggcagaaagcctggatctccagtccgcgccaagagaagcggatctggcgtgaagcagaccctgaatttcgacctgctgaagctggctggcgacgtggaatccaacccaggcccttctagaggccatatgaccgagtacaagcccacggtgcgcctcgccacccgcgacgacgtccccagggccgtacgcaccctcgccgccgcgttcgccgactaccccgccacgcgccacaccgtcgatccggaccgccacatcgagcgggtcaccgagctgcaagaactcttcctcacgcgcgtcgggctcgacatcggcaaggtgtgggtcgcggacgacggcgccgcggtggcggtctggaccacgccggagagcgtcgaagcgggggcggtgttcgccgagatcggcccgcgcatggccgagttgagcggttcccggctggccgcgcagcaacagatggaaggcctcctggcgccgcaccggcccaaggagcccgcgtggttcctggccaccgtcggcgtctcgcccgaccaccagggcaagggtctgggcagcgccgtcgtgctccccggagtggaggcggccgagcgcgccggggtgcccgccttcctggagacctccgcgccccgcaacctccccttctacgagcggctcggcttcaccgtcaccgccgacgtcgaggtgcccgaaggaccgcgcacctggtgcatgacccgcaagcccggtgcctga

SEQ ID NO: 10599 - DNA, 2856 bp, Artificial Sequence
  Synthetic Polynucloetide
atggccttaccagtgaccgccttgctcctgccgctggccttgctgctccacgccgccaggccgctcgaggacctgaagaacgtgttcccacctgaggtggccgtgttcgagcctagcgaggccgagatcagccacacccagaaagccaccctcgtgtgcctggctaccggcttctaccccgaccatgtggaactgtcttggtgggtcaacggcaaagaggtgcacagcggcgtgtctaccgacccccagccactgaaagaacagcccgccctgaacgacagccggtactgcctgagcagcagactgagagtgtccgccaccttctggcagaacccccggaaccacttcagatgccaggtgcagttctacggcctgagcgagaacgacgagtggacccaggacagagccaagcccgtgacccagatcgtgtctgccgaagcctggggcagagccgattgcggctttaccagcgagagctaccagcagggcgtgctgagcgccaccatcctgtacgagatcctgctgggcaaggccaccctgtacgccgtgctggtgtctgccctggtgctgatggctatggtcaagcggaaggacagccggggaagggccaagcgatctggatctggagcaacaaacttctcactactcaaacaagcaggtgacgtggaggagaatcccgggcctactagcatggccttaccagtgaccgccttgctcctgccgctggccttgctgctccacgccgccaggccggacatccagatgacacagagccctagcagcctgtctgccagcgtgggagacagagtgaccatcacctgtagagccagccaggacatcagcagctacctgaactggtatcagcagaagcccggcaaggcccctaagctgctgatctactacaccagcagactgcacagcggcgtgcccagcagattttctggctctggcagcggcaccgacttcaccctgacaatatctagcctccagcctgaggacttcgccacctactattgccagcagggcaacaccctgccttacacatttggacagggcaccaaggtggaaatcaagagaggcggaggcggaagtggaggcggaggatctggcggcggaggctctgaagtgcagctggttgaatcaggtggcggcctggttcaacctggcggatctctgagactgagctgtgccgccagcggcttcaccttcagcgactactttatgagctgggtccgacaggcccctggcaaaggacttgaatgggtcgccaccatcagcaatggcggcacctacacttactaccccgacagcgtgaagggcagattcaccatctccagagacaacagcaagaacaccctgtacctccagatgaactccctgagagccgaggacaccgccgtgtactactgcgccagattcgacggctacatcttcgactattggggccagggcaccctggtcacagtctcttctacgcgtgagcagaaactgatctcggaagaggatctggggagcggcaccccattcccttctctggcccctcccatcatgctgctggtggacggcaagcagcagatggtggtcgtgtgcctggtgctggatgtggccccacctggactggacagccccatctggtttagcgccggcaatggctctgccctggacgcctttacctacggcccaagccctgccaccgatggcacctggacaaatctggcccacctgagcctgcccagcgaggaactggcttcttgggagcctctcgtgtgccacacaggacctggcgctgagggacacagcagatccacccagcctatgcacctgtctggcgaggccagcaccgccagaacctgtcctcaggaacctctgagaggcacccctggcggagcactgtggctgggagtgctgagactgctgctgttcaagctgctgctgtttgacctgctgctgacctgctcctgtctgtgcgatcctgccggccctctgccttctcctgccaccaccacaagactgagagccctgggcagccacagactgcaccctgccacagagacaggcggcagagaggccacaagcagccctagaccccagcccagagacagaagatggggcgataccccccctggcagaaagcctggatctccagtccgcgccaagagaagcggatctggcgtgaagcagaccctgaatttcgacctgctgaagctggctggcgacgtggaatccaacccaggcccttctagatctagaggccatatgaccgagtacaagcccacggtgcgcctcgccacccgcgacgacgtccccagggccgtacgcaccctcgccgccgcgttcgccgactaccccgccacgcgccacaccgtcgatccggaccgccacatcgagcgggtcaccgagctgcaagaactcttcctcacgcgcgtcgggctcgacatcggcaaggtgtgggtcgcggacgacggcgccgcggtggcggtctggaccacgccggagagcgtcgaagcgggggcggtgttcgccgagatcggcccgcgcatggccgagttgagcggttcccggctggccgcgcagcaacagatggaaggcctcctggcgccgcaccggcccaaggagcccgcgtggttcctggccaccgtcggcgtctcgcccgaccaccagggcaagggtctgggcagcgccgtcgtgctccccggagtggaggcggccgagcgcgccggggtgcccgccttcctggagacctccgcgccccgcaacctccccttctacgagcggctcggcttcaccgtcaccgccgacgtcgaggtgcccgaaggaccgcgcacctggtgcatgacccgcaagcccggtgcctga

SEQ ID NO: 10600 - DNA, 2667 bp, Artificial Sequence
  Synthetic Polynucloetide
atggccttaccagtgaccgccttgctcctgccgctggccttgctgctccacgccgccaggccggacatccagatgacacagagccctagcagcctgtctgccagcgtgggagacagagtgaccatcacctgtagagccagccaggacatcagcagctacctgaactggtatcagcagaagcccggcaaggcccctaagctgctgatctactacaccagcagactgcacagcggcgtgcccagcagattttctggctctggcagcggcaccgacttcaccctgacaatatctagcctccagcctgaggacttcgccacctactattgccagcagggcaacaccctgccttacacatttggacagggcaccaaggtggaaatcaagagactcgaggggaaaccaattcccaaccctcttctgggactggattcaaccggcagcggcgacaagcagctggacgccgacgtgtcccccaagcctaccatcttcctgccctctatcgccgagacaaagctccagaaggccggcacctacctgtgcctgctggaaaagttcttcccagatgtgattaagatccactggcaggaaaagaagtccaacaccatcctgggcagccaggaaggcaacaccatgaagaccaacgacacctacatgaagttcagctggctgaccgtgcccgagaagtccctggacaaagaacacagatgcatcgtgcggcacgaaaacaacaagaacggcgtggaccaggaaatcatcttcccacccatcaagaccgatgtgattacaatggaccccaaggacaactgctccaaggacgccaacgataccctgctgctccagctgaccaacaccagcgcctactacatgtacttgttgctgctgctgaagtccgtggtgtacttcgccatcatcacatgctgcctgctgcggagaaccgccttctgctgcaacggcgagaagtctagggccaagcgatctggatctggagcaacaaacttctcactactcaaacaagcaggtgacgtggaggagaatcccgggcctactagtatggactggatttggcgcatccttttccttgtcggcgctgctaccggcgcgcattccttcgaagaagtgcagctggttgaatcaggtggcggcctggttcaacctggcggatctctgagactgagctgtgccgccagcggcttcaccttcagcgactactttatgagctgggtccgacaggcccctggcaaaggacttgaatgggtcgccaccatcagcaatggcggcacctacacttactaccccgacagcgtgaagggcagattcaccatctccagagacaacagcaagaacaccctgtacctccagatgaactccctgagagccgaggacaccgccgtgtactactgcgccagattcgacggctacatcttcgactattggggccagggcaccctggtcacagtctcttctacgcgtgagcagaaactgatctcggaagaggatgggagcggcagccagcctcacaccaagcccagcgtgttcgtgatgaagaacggcaccaacgtggcctgcctcgtgaaagagttctaccccaaggacatcaggatcaacctggtgtccagcaagaagatcaccgagttcgaccccgccatcgtgatctcccccagcggcaagtacaacgccgtgaagctggggaagtacgaggacagcaacagcgtgacctgctccgtgcagcacgacaacaagaccgtgcacagcaccgactttgaagtgaaaaccgactccaccgaccacgtgaagcccaaagagacagagaacaccaagcagcccagcaagagctgccacaagcccaaggccatcgtgcacaccgagaaagtgaacatgatgagcctgaccgtgctgggcctgcggatgctgttcgccaaaaccgtggccgtgaacttcctgctgaccgccaagctgttcttcctccgcgccaagagaagcggatctggcgtgaagcagaccctgaatttcgacctgctgaagctggctggcgacgtggaatccaacccaggcccttctagaggccatatgaccgagtacaagcccacggtgcgcctcgccacccgcgacgacgtccccagggccgtacgcaccctcgccgccgcgttcgccgactaccccgccacgcgccacaccgtcgatccggaccgccacatcgagcgggtcaccgagctgcaagaactcttcctcacgcgcgtcgggctcgacatcggcaaggtgtgggtcgcggacgacggcgccgcggtggcggtctggaccacgccggagagcgtcgaagcgggggcggtgttcgccgagatcggcccgcgcatggccgagttgagcggttcccggctggccgcgcagcaacagatggaaggcctcctggcgccgcaccggcccaaggagcccgcgtggttcctggccaccgtcggcgtctcgcccgaccaccagggcaagggtctgggcagcgccgtcgtgctccccggagtggaggcggccgagcgcgccggggtgcccgccttcctggagacctccgcgccccgcaacctccccttctacgagcggctcggcttcaccgtcaccgccgacgtcgaggtgcccgaaggaccgcgcacctggtgcatgacccgcaagcccggtgcctga

SEQ ID NO: 10601 - DNA, 1878 bp, Artificial Sequence
  Synthetic Polynucloetide
atggccttaccagtgaccgccttgctcctgccgctggccttgctgctccacgccgccaggccggacatccagatgacacagagccctagcagcctgtctgccagcgtgggagacagagtgaccatcacctgtagagccagccaggacatcagcagctacctgaactggtatcagcagaagcccggcaaggcccctaagctgctgatctactacaccagcagactgcacagcggcgtgcccagcagattttctggctctggcagcggcaccgacttcaccctgacaatatctagcctccagcctgaggacttcgccacctactattgccagcagggcaacaccctgccttacacatttggacagggcaccaaggtggaaatcaagagactcgagagccagcctcacaccaagcccagcgtgttcgtgatgaagaacggcaccaacgtggcctgcctcgtgaaagagttctaccccaaggacatcaggatcaacctggtgtccagcaagaagatcaccgagttcgaccccgccatcgtgatctcccccagcggcaagtacaacgccgtgaagctggggaagtacgaggacagcaacagcgtgacctgctccgtgcagcacgacaacaagaccgtgcacagcaccgactttgaagtgaaaaccgactccaccgaccacgtgaagcccaaagagacagagaacaccaagcagcccagcaagagctgccacaagcccaaggccatcgtgcacaccgagaaagtgaacatgatgagcctgaccgtgctgggcctgcggatgctgttcgccaaaaccgtggccgtgaacttcctgctgaccgccaagctgttcttcctcagggccaagcgatctggatctggagcaacaaacttctcactactcaaacaagcaggtgacgtggaggagaatcccgggcctactagtatggactggatttggcgcatccttttccttgtcggcgctgctaccggcgcgcattccttcgaagaagtgcagctggttgaatcaggtggcggcctggttcaacctggcggatctctgagactgagctgtgccgccagcggcttcaccttcagcgactactttatgagctgggtccgacaggcccctggcaaaggacttgaatgggtcgccaccatcagcaatggcggcacctacacttactaccccgacagcgtgaagggcagattcaccatctccagagacaacagcaagaacaccctgtacctccagatgaactccctgagagccgaggacaccgccgtgtactactgcgccagattcgacggctacatcttcgactattggggccagggcaccctggtcacagtctcttctacgcgtgacaagcagctggacgccgacgtgtcccccaagcctaccatcttcctgccctctatcgccgagacaaagctccagaaggccggcacctacctgtgcctgctggaaaagttcttcccagatgtgattaagatccactggcaggaaaagaagtccaacaccatcctgggcagccaggaaggcaacaccatgaagaccaacgacacctacatgaagttcagctggctgaccgtgcccgagaagtccctggacaaagaacacagatgcatcgtgcggcacgaaaacaacaagaacggcgtggaccaggaaatcatcttcccacccatcaagaccgatgtgattacaatggaccccaaggacaactgctccaaggacgccaacgataccctgctgctccagctgaccaacaccagcgcctactacatgtacttgttgctgctgctgaagtccgtggtgtacttcgccatcatcacatgctgcctgctgcggagaaccgccttctgctgcaacggcgagaagtct

SEQ ID NO: 10602 - DNA, 2712 bp, Artificial Sequence
  Synthetic Polynucloetide
atggccttaccagtgaccgccttgctcctgccgctggccttgctgctccacgccgccaggccgctcgaggggaaaccaattcccaaccctcttctgggactggattcaaccggcagcggcgacaagcagctggacgccgacgtgtcccccaagcctaccatcttcctgccctctatcgccgagacaaagctccagaaggccggcacctacctgtgcctgctggaaaagttcttcccagatgtgattaagatccactggcaggaaaagaagtccaacaccatcctgggcagccaggaaggcaacaccatgaagaccaacgacacctacatgaagttcagctggctgaccgtgcccgagaagtccctggacaaagaacacagatgcatcgtgcggcacgaaaacaacaagaacggcgtggaccaggaaatcatcttcccacccatcaagaccgatgtgattacaatggaccccaaggacaactgctccaaggacgccaacgataccctgctgctccagctgaccaacaccagcgcctactacatgtacttgttgctgctgctgaagtccgtggtgtacttcgccatcatcacatgctgcctgctgcggagaaccgccttctgctgcaacggcgagaagtctagggccaagcgatctggatctggagcaacaaacttctcactactcaaacaagcaggtgacgtggaggagaatcccgggcctactagcatggccttaccagtgaccgccttgctcctgccgctggccttgctgctccacgccgccaggccggacatccagatgacacagagccctagcagcctgtctgccagcgtgggagacagagtgaccatcacctgtagagccagccaggacatcagcagctacctgaactggtatcagcagaagcccggcaaggcccctaagctgctgatctactacaccagcagactgcacagcggcgtgcccagcagattttctggctctggcagcggcaccgacttcaccctgacaatatctagcctccagcctgaggacttcgccacctactattgccagcagggcaacaccctgccttacacatttggacagggcaccaaggtggaaatcaagagaggcggaggcggaagtggaggcggaggatctggcggcggaggctctgaagtgcagctggttgaatcaggtggcggcctggttcaacctggcggatctctgagactgagctgtgccgccagcggcttcaccttcagcgactactttatgagctgggtccgacaggcccctggcaaaggacttgaatgggtcgccaccatcagcaatggcggcacctacacttactaccccgacagcgtgaagggcagattcaccatctccagagacaacagcaagaacaccctgtacctccagatgaactccctgagagccgaggacaccgccgtgtactactgcgccagattcgacggctacatcttcgactattggggccagggcaccctggtcacagtctcttctacgcgtgagcagaaactgatctcggaagaggatgggagcggcagccagcctcacaccaagcccagcgtgttcgtgatgaagaacggcaccaacgtggcctgcctcgtgaaagagttctaccccaaggacatcaggatcaacctggtgtccagcaagaagatcaccgagttcgaccccgccatcgtgatctcccccagcggcaagtacaacgccgtgaagctggggaagtacgaggacagcaacagcgtgacctgctccgtgcagcacgacaacaagaccgtgcacagcaccgactttgaagtgaaaaccgactccaccgaccacgtgaagcccaaagagacagagaacaccaagcagcccagcaagagctgccacaagcccaaggccatcgtgcacaccgagaaagtgaacatgatgagcctgaccgtgctgggcctgcggatgctgttcgccaaaaccgtggccgtgaacttcctgctgaccgccaagctgttcttcctccgcgccaagagaagcggatctggcgtgaagcagaccctgaatttcgacctgctgaagctggctggcgacgtggaatccaacccaggcccttctagaggccatatgaccgagtacaagcccacggtgcgcctcgccacccgcgacgacgtccccagggccgtacgcaccctcgccgccgcgttcgccgactaccccgccacgcgccacaccgtcgatccggaccgccacatcgagcgggtcaccgagctgcaagaactcttcctcacgcgcgtcgggctcgacatcggcaaggtgtgggtcgcggacgacggcgccgcggtggcggtctggaccacgccggagagcgtcgaagcgggggcggtgttcgccgagatcggcccgcgcatggccgagttgagcggttcccggctggccgcgcagcaacagatggaaggcctcctggcgccgcaccggcccaaggagcccgcgtggttcctggccaccgtcggcgtctcgcccgaccaccagggcaagggtctgggcagcgccgtcgtgctccccggagtggaggcggccgagcgcgccggggtgcccgccttcctggagacctccgcgccccgcaacctccccttctacgagcggctcggcttcaccgtcaccgccgacgtcgaggtgcccgaaggaccgcgcacctggtgcatgacccgcaagcccggtgcctga

SEQ ID NO: 10603 - DNA, 3087 bp, Artificial Sequence
  Synthetic Polynucloetide
atggccttaccagtgaccgccttgctcctgccgctggccttgctgctccacgccgccaggccggacatccagatgacacagagccctagcagcctgtctgccagcgtgggagacagagtgaccatcacctgtagagccagccaggacatcagcagctacctgaactggtatcagcagaagcccggcaaggcccctaagctgctgatctactacaccagcagactgcacagcggcgtgcccagcagattttctggctctggcagcggcaccgacttcaccctgacaatatctagcctccagcctgaggacttcgccacctactattgccagcagggcaacaccctgccttacacatttggacagggcaccaaggtggaaatcaagagaggacagcctaaggccaatcctaccgtgacactgttccctccaagcagcgaagaactccaggccaacaaggccacacttgtgtgcctgatctccgacttctaccctggggctgtgacagtggcttggaaggccgatggatctcctgtgaaagccggcgtggaaaccaccaagccatccaagcagagcaacaacaaatacgccgccagctcctacctgagcctgacacctgagcagtggaagtcccacagatcctacagctgccaagtgacccacgaaggcagcaccgtggaaaagacagtggcccctacagagtgcagcggatcccagagcttcggcctgctggaccccaagctgtgctacctgctggatggcatcctgttcatctacggcgtgatcctgaccgccctgttcctgagagtgaagttcagcagaagcgccgacgcccctgcctaccagcagggacagaaccaactgtacaacgagctgaacctgggcagacgggaagagtacgacgtgctggacaagcggagaggcagggaccctgagatgggcggaaagccccagcggagaaagaacccccaggaaggactgtataacgaactccagaaagacaagatggccgaagcctacagcgagatcggcatgaagggcgagcggagaagaggcaagggccacgatggcctgtaccagggcctgagcaccgccaccaaggacacctatgacgccctgcacatgcaggccctgcctccaagaagggccaagcgatctggatctggagcaacaaacttctcactactcaaacaagcaggtgacgtggaggagaatcccgggcctactagtatggactggatttggcgcatccttttccttgtcggcgctgctaccggcgcgcattccttcgaagaagtgcagctggttgaatcaggtggcggcctggttcaacctggcggatctctgagactgagctgtgccgccagcggcttcaccttcagcgactactttatgagctgggtccgacaggcccctggcaaaggacttgaatgggtcgccaccatcagcaatggcggcacctacacttactaccccgacagcgtgaagggcagattcaccatctccagagacaacagcaagaacaccctgtacctccagatgaactccctgagagccgaggacaccgccgtgtactactgcgccagattcgacggctacatcttcgactattggggccagggcaccctggtcacagtctcttctgcctctacaaagggaccctccgtgtttcctctggctcccagcagcaagtctacaagcggaggaacagccgctctgggctgcctggtcaaggattactttcccgagcctgtgaccgtgtcctggaatagcggagcactgacaagcggcgtgcacacctttccagccgtgctgcaaagcagcggcctgtactctctgagcagcgtggtcacagtgcctagctctagcctgggcacccagacctacatctgcaatgtgaaccacaagcctagcaacaccaaggtggacaagagagtggaacccaagagctgtggtacccagagttttgggttgttggaccctaaattgtgctatctgttggacggaatcctgttcatttacggagtgatcctgaccgcattgttcctgcgggttaagttttccagatccgcagacgcacccgcttaccaacaagggcagaaccaactctacaatgaacttaatttggggcggagggaagagtacgacgttctggacaaaaggaggggacgagatcccgagatgggcggaaagcctcagcgaaggaagaatccgcaagaggggctttataacgaactccagaaagataaaatggcagaagcctatagtgagattgggatgaagggagaaaggaggaggggtaaaggtcacgatgggttgtaccaaggattgagcacagccactaaagatacctatgatgcgctccacatgcaggccctgccgccaagacgcgccaagagaagcggatctggcgtgaagcagaccctgaatttcgacctgctgaagctggctggcgacgtggaatccaacccaggcccttctagaggccatatgaccgagtacaagcccacggtgcgcctcgccacccgcgacgacgtccccagggccgtacgcaccctcgccgccgcgttcgccgactaccccgccacgcgccacaccgtcgatccggaccgccacatcgagcgggtcaccgagctgcaagaactcttcctcacgcgcgtcgggctcgacatcggcaaggtgtgggtcgcggacgacggcgccgcggtggcggtctggaccacgccggagagcgtcgaagcgggggcggtgttcgccgagatcggcccgcgcatggccgagttgagcggttcccggctggccgcgcagcaacagatggaaggcctcctggcgccgcaccggcccaaggagcccgcgtggttcctggccaccgtcggcgtctcgcccgaccaccagggcaagggtctgggcagcgccgtcgtgctccccggagtggaggcggccgagcgcgccggggtgcccgccttcctggagacctccgcgccccgcaacctccccttctacgagcggctcggcttcaccgtcaccgccgacgtcgaggtgcccgaaggaccgcgcacctggtgcatgacccgcaagcccggtgcctga

SEQ ID NO: 10604 - DNA, 2442 bp, Artificial Sequence
  Synthetic Polynucloetide
atggccttaccagtgaccgccttgctcctgccgctggccttgctgctccacgccgccaggccggacatccagatgacacagagccctagcagcctgtctgccagcgtgggagacagagtgaccatcacctgtagagccagccaggacatcagcagctacctgaactggtatcagcagaagcccggcaaggcccctaagctgctgatctactacaccagcagactgcacagcggcgtgcccagcagattttctggctctggcagcggcaccgacttcaccctgacaatatctagcctccagcctgaggacttcgccacctactattgccagcagggcaacaccctgccttacacatttggacagggcaccaaggtggaaatcaagagactcgaggacctgaagaacgtgttcccacctgaggtggccgtgttcgagcctagcgaggccgagatcagccacacccagaaagccaccctcgtgtgcctggctaccggcttctaccccgaccatgtggaactgtcttggtgggtcaacggcaaagaggtgcacagcggcgtgtctaccgacccccagccactgaaagaacagcccgccctgaacgacagccggtactgcctgagcagcagactgagagtgtccgccaccttctggcagaacccccggaaccacttcagatgccaggtgcagttctacggcctgagcgagaacgacgagtggacccaggacagagccaagcccgtgacccagatcgtgtctgccgaagcctggggcagagccgattgcggatcccagagcttcggcctgctggaccccaagctgtgctacctgctggatggcatcctgttcatctacggcgtgatcctgaccgccctgttcctgagagtgaagttcagcagaagcgccgacgcccctgcctaccagcagggacagaaccaactgtacaacgagctgaacctgggcagacgggaagagtacgacgtgctggacaagcggagaggcagggaccctgagatgggcggaaagccccagcggagaaagaacccccaggaaggactgtataacgaactccagaaagacaagatggccgaagcctacagcgagatcggcatgaagggcgagcggagaagaggcaagggccacgatggcctgtaccagggcctgagcaccgccaccaaggacacctatgacgccctgcacatgcaggccctgcctccaagaagggccaagcgatctggatctggagcaacaaacttctcactactcaaacaagcaggtgacgtggaggagaatcccgggcctactagtatggactggatttggcgcatccttttccttgtcggcgctgctaccggcgcgcattccttcgaagaagtgcagctggttgaatcaggtggcggcctggttcaacctggcggatctctgagactgagctgtgccgccagcggcttcaccttcagcgactactttatgagctgggtccgacaggcccctggcaaaggacttgaatgggtcgccaccatcagcaatggcggcacctacacttactaccccgacagcgtgaagggcagattcaccatctccagagacaacagcaagaacaccctgtacctccagatgaactccctgagagccgaggacaccgccgtgtactactgcgccagattcgacggctacatcttcgactattggggccagggcaccctggtcacagtctcttctacgcgtatccagaaccctgatcctgccgtgtaccagctgcgggatagcaagagcagcgacaagagcgtgtgtctgttcaccgacttcgacagccagaccaacgtgtcccagagcaaggactccgacgtgtacatcaccgataagaccgtgctggacatgcggagcatggacttcaagagcaactccgccgtggcctggtccaacaagtccgatttcgcctgcgccaacgccttcaacaacagcattatccccgaggacacattcttcccaagccccgagagcagctgcggtacccagagttttgggttgttggaccctaaattgtgctatctgttggacggaatcctgttcatttacggagtgatcctgaccgcattgttcctgcgggttaagttttccagatccgcagacgcacccgcttaccaacaagggcagaaccaactctacaatgaacttaatttggggcggagggaagagtacgacgttctggacaaaaggaggggacgagatcccgagatgggcggaaagcctcagcgaaggaagaatccgcaagaggggctttataacgaactccagaaagataaaatggcagaagcctatagtgagattgggatgaagggagaaaggaggaggggtaaaggtcacgatgggttgtaccaaggattgagcacagccactaaagatacctatgatgcgctccacatgcaggccctgccgccaaga

SEQ ID NO: 10605 - DNA, 2442 bp, Artificial Sequence
  Synthetic Polynucloetide
atggccttaccagtgaccgccttgctcctgccgctggccttgctgctccacgccgccaggccggacatccagatgacacagagccctagcagcctgtctgccagcgtgggagacagagtgaccatcacctgtagagccagccaggacatcagcagctacctgaactggtatcagcagaagcccggcaaggcccctaagctgctgatctactacaccagcagactgcacagcggcgtgcccagcagattttctggctctggcagcggcaccgacttcaccctgacaatatctagcctccagcctgaggacttcgccacctactattgccagcagggcaacaccctgccttacacatttggacagggcaccaaggtggaaatcaagagactcgaggacctgaagaacgtgttcccacctgaggtggccgtgttcgagcctagcaaggccgagatcgcccacacccagaaagccaccctcgtgtgcctggctaccggcttctaccccgaccatgtggaactgtcttggtgggtcaacggcaaagaggtgcacagcggcgtgtgtaccgacccccagccactgaaagaacagcccgccctgaacgacagccggtactgcctgagcagcagactgagagtgtccgccaccttctggcagaacccccggaaccacttcagatgccaggtgcagttctacggcctgagcgagaacgacgagtggacccaggacagagccaagcccgtgacccagatcgtgtctgccgaagcctggggcagagccgattgcggatcccagagcttcggcctgctggaccccaagctgtgctacctgctggatggcatcctgttcatctacggcgtgatcctgaccgccctgttcctgagagtgaagttcagcagaagcgccgacgcccctgcctaccagcagggacagaaccaactgtacaacgagctgaacctgggcagacgggaagagtacgacgtgctggacaagcggagaggcagggaccctgagatgggcggaaagccccagcggagaaagaacccccaggaaggactgtataacgaactccagaaagacaagatggccgaagcctacagcgagatcggcatgaagggcgagcggagaagaggcaagggccacgatggcctgtaccagggcctgagcaccgccaccaaggacacctatgacgccctgcacatgcaggccctgcctccaagaagggccaagcgatctggatctggagcaacaaacttctcactactcaaacaagcaggtgacgtggaggagaatcccgggcctactagtatggactggatttggcgcatccttttccttgtcggcgctgctaccggcgcgcattccttcgaagaagtgcagctggttgaatcaggtggcggcctggttcaacctggcggatctctgagactgagctgtgccgccagcggcttcaccttcagcgactactttatgagctgggtccgacaggcccctggcaaaggacttgaatgggtcgccaccatcagcaatggcggcacctacacttactaccccgacagcgtgaagggcagattcaccatctccagagacaacagcaagaacaccctgtacctccagatgaactccctgagagccgaggacaccgccgtgtactactgcgccagattcgacggctacatcttcgactattggggccagggcaccctggtcacagtctcttctacgcgtatccagaaccctgatcctgccgtgtaccagctgcgggatagcaagagcagcgacaagagcgtgtgtctgttcaccgacttcgacagccagaccaacgtgtcccagagcaaggactccgacgtgtacatcaccgataagtgcgtgctggacatgcggagcatggacttcaagagcaactccgccgtggcctggtccaacaagtccgatttcgcctgcgccaacgccttcaacaacagcattatccccgaggacacattcttcccaagcagcgacgtgccctgcggtacccagagttttgggttgttggaccctaaattgtgctatctgttggacggaatcctgttcatttacggagtgatcctgaccgcattgttcctgcgggttaagttttccagatccgcagacgcacccgcttaccaacaagggcagaaccaactctacaatgaacttaatttggggcggagggaagagtacgacgttctggacaaaaggaggggacgagatcccgagatgggcggaaagcctcagcgaaggaagaatccgcaagaggggctttataacgaactccagaaagataaaatggcagaagcctatagtgagattgggatgaagggagaaaggaggaggggtaaaggtcacgatgggttgtaccaaggattgagcacagccactaaagatacctatgatgcgctccacatgcaggccctgccgccaaga

SEQ ID NO: 10606 - DNA, 2655 bp, Artificial Sequence
  Synthetic Polynucloetide
atggccttaccagtgaccgccttgctcctgccgctggccttgctgctccacgccgccaggccggacatccagatgacacagagccctagcagcctgtctgccagcgtgggagacagagtgaccatcacctgtagagccagccaggacatcagcagctacctgaactggtatcagcagaagcccggcaaggcccctaagctgctgatctactacaccagcagactgcacagcggcgtgcccagcagattttctggctctggcagcggcaccgacttcaccctgacaatatctagcctccagcctgaggacttcgccacctactattgccagcagggcaacaccctgccttacacatttggacagggcaccaaggtggaaatcaagagactcgaggggaaaccaattcccaaccctcttctgggactggattcaaccggcagcggcgaggacctgaagaacgtgttcccacctgaggtggccgtgttcgagcctagcgaggccgagatcagccacacccagaaagccaccctcgtgtgcctggctaccggcttctaccccgaccatgtggaactgtcttggtgggtcaacggcaaagaggtgcacagcggcgtgtctaccgacccccagccactgaaagaacagcccgccctgaacgacagccggtactgcctgagcagcagactgagagtgtccgccaccttctggcagaacccccggaaccacttcagatgccaggtgcagttctacggcctgagcgagaacgacgagtggacccaggacagagccaagcccgtgacccagatcgtgtctgccgaagcctggggcagagccgattgcggatcccagagcttcggcctgctggaccccaagctgtgctacctgctggatggcatcctgttcatctacggcgtgatcctgaccgccctgttcctgagagtgaagttcagcagaagcgccgacgcccctgcctaccagcagggacagaaccaactgtacaacgagctgaacctgggcagacgggaagagtacgacgtgctggacaagcggagaggcagggaccctgagatgggcggaaagccccagcggagaaagaacccccaggaaggactgtataacgaactccagaaagacaagatggccgaagcctacagcgagatcggcatgaagggcgagcggagaagaggcaagggccacgatggcctgtaccagggcctgagcaccgccaccaaggacacctatgacgccctgcacatgcaggccctgcctccaagaagggccaagcgatctggatctggagcaacaaacttctcactactcaaacaagcaggtgacgtggaggagaatcccgggcctactagtatggactggatttggcgcatccttttccttgtcggcgctgctaccggcgcgcattccttcgaagaagtgcagctggttgaatcaggtggcggcctggttcaacctggcggatctctgagactgagctgtgccgccagcggcttcaccttcagcgactactttatgagctgggtccgacaggcccctggcaaaggacttgaatgggtcgccaccatcagcaatggcggcacctacacttactaccccgacagcgtgaagggcagattcaccatctccagagacaacagcaagaacaccctgtacctccagatgaactccctgagagccgaggacaccgccgtgtactactgcgccagattcgacggctacatcttcgactattggggccagggcaccctggtcacagtctcttctacgcgtgagcagaaactgatctcggaagaggatgggagcggcatccagaaccctgatcctgccgtgtaccagctgcgggatagcaagagcagcgacaagagcgtgtgtctgttcaccgacttcgacagccagaccaacgtgtcccagagcaaggactccgacgtgtacatcaccgataagaccgtgctggacatgcggagcatggacttcaagagcaactccgccgtggcctggtccaacaagtccgatttcgcctgcgccaacgccttcaacaacagcattatccccgaggacacattcttcccaagccccgagagcagctgcggtacccagagttttgggttgttggaccctaaattgtgctatctgttggacggaatcctgttcatttacggagtgatcctgaccgcattgttcctgaggagcaagcggtcacggctgctccacagcgattacatgaatatgacaccacgaagaccgggtcctactcgcaaacactaccaaccctacgcacctccccgcgactttgcagcgtaccgatctcgggttaagttttccagatccgcagacgcacccgcttaccaacaagggcagaaccaactctacaatgaacttaatttggggcggagggaagagtacgacgttctggacaaaaggaggggacgagatcccgagatgggcggaaagcctcagcgaaggaagaatccgcaagaggggctttataacgaactccagaaagataaaatggcagaagcctatagtgagattgggatgaagggagaaaggaggaggggtaaaggtcacgatgggttgtaccaaggattgagcacagccactaaagatacctatgatgcgctccacatgcaggccctgccgccaaga

SEQ ID NO: 10607 - DNA, 2778 bp, Artificial Sequence
  Synthetic Polynucloetide
atggccttaccagtgaccgccttgctcctgccgctggccttgctgctccacgccgccaggccggacatccagatgacacagagccctagcagcctgtctgccagcgtgggagacagagtgaccatcacctgtagagccagccaggacatcagcagctacctgaactggtatcagcagaagcccggcaaggcccctaagctgctgatctactacaccagcagactgcacagcggcgtgcccagcagattttctggctctggcagcggcaccgacttcaccctgacaatatctagcctccagcctgaggacttcgccacctactattgccagcagggcaacaccctgccttacacatttggacagggcaccaaggtggaaatcaagagactcgaggggaaaccaattcccaaccctcttctgggactggattcaaccggcagcggcgaggacctgaagaacgtgttcccacctgaggtggccgtgttcgagcctagcgaggccgagatcagccacacccagaaagccaccctcgtgtgcctggctaccggcttctaccccgaccatgtggaactgtcttggtgggtcaacggcaaagaggtgcacagcggcgtgtctaccgacccccagccactgaaagaacagcccgccctgaacgacagccggtactgcctgagcagcagactgagagtgtccgccaccttctggcagaacccccggaaccacttcagatgccaggtgcagttctacggcctgagcgagaacgacgagtggacccaggacagagccaagcccgtgacccagatcgtgtctgccgaagcctggggcagagccgattgcggatcccagagcttcggcctgctggaccccaagctgtgctacctgctggatggcatcctgttcatctacggcgtgatcctgaccgccctgttcctgaggagtaagaggagcaggctcctgcacagtgactacatgaacatgactccacgccgccccggacccacccgcaagcattaccagccctatgccccaccacgcgacttcgcagcctatcgctccagagtgaagttcagcagaagcgccgacgcccctgcctaccagcagggacagaaccaactgtacaacgagctgaacctgggcagacgggaagagtacgacgtgctggacaagcggagaggcagggaccctgagatgggcggaaagccccagcggagaaagaacccccaggaaggactgtataacgaactccagaaagacaagatggccgaagcctacagcgagatcggcatgaagggcgagcggagaagaggcaagggccacgatggcctgtaccagggcctgagcaccgccaccaaggacacctatgacgccctgcacatgcaggccctgcctccaagaagggccaagcgatctggatctggagcaacaaacttctcactactcaaacaagcaggtgacgtggaggagaatcccgggcctactagtatggactggatttggcgcatccttttccttgtcggcgctgctaccggcgcgcattccttcgaagaagtgcagctggttgaatcaggtggcggcctggttcaacctggcggatctctgagactgagctgtgccgccagcggcttcaccttcagcgactactttatgagctgggtccgacaggcccctggcaaaggacttgaatgggtcgccaccatcagcaatggcggcacctacacttactaccccgacagcgtgaagggcagattcaccatctccagagacaacagcaagaacaccctgtacctccagatgaactccctgagagccgaggacaccgccgtgtactactgcgccagattcgacggctacatcttcgactattggggccagggcaccctggtcacagtctcttctacgcgtgagcagaaactgatctcggaagaggatgggagcggcatccagaaccctgatcctgccgtgtaccagctgcgggatagcaagagcagcgacaagagcgtgtgtctgttcaccgacttcgacagccagaccaacgtgtcccagagcaaggactccgacgtgtacatcaccgataagaccgtgctggacatgcggagcatggacttcaagagcaactccgccgtggcctggtccaacaagtccgatttcgcctgcgccaacgccttcaacaacagcattatccccgaggacacattcttcccaagccccgagagcagctgcggtacccagagttttgggttgttggaccctaaattgtgctatctgttggacggaatcctgttcatttacggagtgatcctgaccgcattgttcctgaggagcaagcggtcacggctgctccacagcgattacatgaatatgacaccacgaagaccgggtcctactcgcaaacactaccaaccctacgcacctccccgcgactttgcagcgtaccgatctcgggttaagttttccagatccgcagacgcacccgcttaccaacaagggcagaaccaactctacaatgaacttaatttggggcggagggaagagtacgacgttctggacaaaaggaggggacgagatcccgagatgggcggaaagcctcagcgaaggaagaatccgcaagaggggctttataacgaactccagaaagataaaatggcagaagcctatagtgagattgggatgaagggagaaaggaggaggggtaaaggtcacgatgggttgtaccaaggattgagcacagccactaaagatacctatgatgcgctccacatgcaggccctgccgccaaga

SEQ ID NO: 10608 - DNA, 2661 bp, Artificial Sequence
  Synthetic Polynucloetide
atggccttaccagtgaccgccttgctcctgccgctggccttgctgctccacgccgccaggccggacatccagatgacacagagccctagcagcctgtctgccagcgtgggagacagagtgaccatcacctgtagagccagccaggacatcagcagctacctgaactggtatcagcagaagcccggcaaggcccctaagctgctgatctactacaccagcagactgcacagcggcgtgcccagcagattttctggctctggcagcggcaccgacttcaccctgacaatatctagcctccagcctgaggacttcgccacctactattgccagcagggcaacaccctgccttacacatttggacagggcaccaaggtggaaatcaagagactcgaggggaaaccaattcccaaccctcttctgggactggattcaaccggcagcggcgaggacctgaagaacgtgttcccacctgaggtggccgtgttcgagcctagcgaggccgagatcagccacacccagaaagccaccctcgtgtgcctggctaccggcttctaccccgaccatgtggaactgtcttggtgggtcaacggcaaagaggtgcacagcggcgtgtctaccgacccccagccactgaaagaacagcccgccctgaacgacagccggtactgcctgagcagcagactgagagtgtccgccaccttctggcagaacccccggaaccacttcagatgccaggtgcagttctacggcctgagcgagaacgacgagtggacccaggacagagccaagcccgtgacccagatcgtgtctgccgaagcctggggcagagccgattgcggatcccagagcttcggcctgctggaccccaagctgtgctacctgctggatggcatcctgttcatctacggcgtgatcctgaccgccctgttcctgagagtgaagttcagcagaagcgccgacgcccctgcctaccagcagggacagaaccaactgtacaacgagctgaacctgggcagacgggaagagtacgacgtgctggacaagcggagaggcagggaccctgagatgggcggaaagccccagcggagaaagaacccccaggaaggactgtataacgaactccagaaagacaagatggccgaagcctacagcgagatcggcatgaagggcgagcggagaagaggcaagggccacgatggcctgtaccagggcctgagcaccgccaccaaggacacctatgacgccctgcacatgcaggccctgcctccaagaagggccaagcgatctggatctggagcaacaaacttctcactactcaaacaagcaggtgacgtggaggagaatcccgggcctactagtatggactggatttggcgcatccttttccttgtcggcgctgctaccggcgcgcattccttcgaagaagtgcagctggttgaatcaggtggcggcctggttcaacctggcggatctctgagactgagctgtgccgccagcggcttcaccttcagcgactactttatgagctgggtccgacaggcccctggcaaaggacttgaatgggtcgccaccatcagcaatggcggcacctacacttactaccccgacagcgtgaagggcagattcaccatctccagagacaacagcaagaacaccctgtacctccagatgaactccctgagagccgaggacaccgccgtgtactactgcgccagattcgacggctacatcttcgactattggggccagggcaccctggtcacagtctcttctacgcgtgagcagaaactgatctcggaagaggatctggggagcggcatccagaaccctgatcctgccgtgtaccagctgcgggatagcaagagcagcgacaagagcgtgtgtctgttcaccgacttcgacagccagaccaacgtgtcccagagcaaggactccgacgtgtacatcaccgataagaccgtgctggacatgcggagcatggacttcaagagcaactccgccgtggcctggtccaacaagtccgatttcgcctgcgccaacgccttcaacaacagcattatccccgaggacacattcttcccaagccccgagagcagctgcggtacccagagttttgggttgttggaccctaaattgtgctatctgttggacggaatcctgttcatttacggagtgatcctgaccgcattgttcctgaagagaggccggaagaagctgctgtacatcttcaagcagcctttcatgcggcccgtgcagaccacccaggaagaggacggctgctcctgccggttccccgaggaagaagaaggcggctgcgagctgcgggttaagttttccagatccgcagacgcacccgcttaccaacaagggcagaaccaactctacaatgaacttaatttggggcggagggaagagtacgacgttctggacaaaaggaggggacgagatcccgagatgggcggaaagcctcagcgaaggaagaatccgcaagaggggctttataacgaactccagaaagataaaatggcagaagcctatagtgagattgggatgaagggagaaaggaggaggggtaaaggtcacgatgggttgtaccaaggattgagcacagccactaaagatacctatgatgcgctccacatgcaggccctgccgccaaga

SEQ ID NO: 10609 - DNA, 2787 bp, Artificial Sequence
  Synthetic Polynucloetide
atggccttaccagtgaccgccttgctcctgccgctggccttgctgctccacgccgccaggccggacatccagatgacacagagccctagcagcctgtctgccagcgtgggagacagagtgaccatcacctgtagagccagccaggacatcagcagctacctgaactggtatcagcagaagcccggcaaggcccctaagctgctgatctactacaccagcagactgcacagcggcgtgcccagcagattttctggctctggcagcggcaccgacttcaccctgacaatatctagcctccagcctgaggacttcgccacctactattgccagcagggcaacaccctgccttacacatttggacagggcaccaaggtggaaatcaagagactcgaggggaaaccaattcccaaccctcttctgggactggattcaaccggcagcggcgaggacctgaagaacgtgttcccacctgaggtggccgtgttcgagcctagcgaggccgagatcagccacacccagaaagccaccctcgtgtgcctggctaccggcttctaccccgaccatgtggaactgtcttggtgggtcaacggcaaagaggtgcacagcggcgtgtctaccgacccccagccactgaaagaacagcccgccctgaacgacagccggtactgcctgagcagcagactgagagtgtccgccaccttctggcagaacccccggaaccacttcagatgccaggtgcagttctacggcctgagcgagaacgacgagtggacccaggacagagccaagcccgtgacccagatcgtgtctgccgaagcctggggcagagccgattgcggatcccagagcttcggcctgctggaccccaagctgtgctacctgctggatggcatcctgttcatctacggcgtgatcctgaccgccctgttcctgaaacggggcagaaagaaactcctgtatatattcaaacaaccatttatgagaccagtacaaactactcaagaggaagatggctgtagctgccgatttccagaagaagaagaaggaggatgtgaactgagagtgaagttcagcagaagcgccgacgcccctgcctaccagcagggacagaaccaactgtacaacgagctgaacctgggcagacgggaagagtacgacgtgctggacaagcggagaggcagggaccctgagatgggcggaaagccccagcggagaaagaacccccaggaaggactgtataacgaactccagaaagacaagatggccgaagcctacagcgagatcggcatgaagggcgagcggagaagaggcaagggccacgatggcctgtaccagggcctgagcaccgccaccaaggacacctatgacgccctgcacatgcaggccctgcctccaagaagggccaagcgatctggatctggagcaacaaacttctcactactcaaacaagcaggtgacgtggaggagaatcccgggcctactagtatggactggatttggcgcatccttttccttgtcggcgctgctaccggcgcgcattccttcgaagaagtgcagctggttgaatcaggtggcggcctggttcaacctggcggatctctgagactgagctgtgccgccagcggcttcaccttcagcgactactttatgagctgggtccgacaggcccctggcaaaggacttgaatgggtcgccaccatcagcaatggcggcacctacacttactaccccgacagcgtgaagggcagattcaccatctccagagacaacagcaagaacaccctgtacctccagatgaactccctgagagccgaggacaccgccgtgtactactgcgccagattcgacggctacatcttcgactattggggccagggcaccctggtcacagtctcttctacgcgtgagcagaaactgatctcggaagaggatctggggagcggcatccagaaccctgatcctgccgtgtaccagctgcgggatagcaagagcagcgacaagagcgtgtgtctgttcaccgacttcgacagccagaccaacgtgtcccagagcaaggactccgacgtgtacatcaccgataagaccgtgctggacatgcggagcatggacttcaagagcaactccgccgtggcctggtccaacaagtccgatttcgcctgcgccaacgccttcaacaacagcattatccccgaggacacattcttcccaagccccgagagcagctgcggtacccagagttttgggttgttggaccctaaattgtgctatctgttggacggaatcctgttcatttacggagtgatcctgaccgcattgttcctgaagagaggccggaagaagctgctgtacatcttcaagcagcctttcatgcggcccgtgcagaccacccaggaagaggacggctgctcctgccggttccccgaggaagaagaaggcggctgcgagctgcgggttaagttttccagatccgcagacgcacccgcttaccaacaagggcagaaccaactctacaatgaacttaatttggggcggagggaagagtacgacgttctggacaaaaggaggggacgagatcccgagatgggcggaaagcctcagcgaaggaagaatccgcaagaggggctttataacgaactccagaaagataaaatggcagaagcctatagtgagattgggatgaagggagaaaggaggaggggtaaaggtcacgatgggttgtaccaaggattgagcacagccactaaagatacctatgatgcgctccacatgcaggccctgccgccaaga

SEQ ID NO: 10610 - DNA, 2460 bp, Artificial Sequence
  Synthetic Polynucloetide
atggccttaccagtgaccgccttgctcctgccgctggccttgctgctccacgccgccaggccggacatccagatgacacagagccctagcagcctgtctgccagcgtgggagacagagtgaccatcacctgtagagccagccaggacatcagcagctacctgaactggtatcagcagaagcccggcaaggcccctaagctgctgatctactacaccagcagactgcacagcggcgtgcccagcagattttctggctctggcagcggcaccgacttcaccctgacaatatctagcctccagcctgaggacttcgccacctactattgccagcagggcaacaccctgccttacacatttggacagggcaccaaggtggaaatcaagagactcgagcagagcttcggcctgctggaccccaagctgtgctacctgctggatggcatcctgttcatctacggcgtgatcctgaccgccctgttcctgagagtgaagttcagcagaagcgccgacgcccctgcctaccagcagggacagaaccaactgtacaacgagctgaacctgggcagacgggaagagtacgacgtgctggacaagcggagaggcagggaccctgagatgggcggaaagccccagcggagaaagaacccccaggaaggactgtataacgaactccagaaagacaagatggccgaagcctacagcgagatcggcatgaagggcgagcggagaagaggcaagggccacgatggcctgtaccagggcctgagcaccgccaccaaggacacctatgacgccctgcacatgcaggccctgcctccaagaagggccaagcgatctggatctggagcaacaaacttctcactactcaaacaagcaggtgacgtggaggagaatcccgggcctactagtatggactggatttggcgcatccttttccttgtcggcgctgctaccggcgcgcattccttcgaagaagtgcagctggttgaatcaggtggcggcctggttcaacctggcggatctctgagactgagctgtgccgccagcggcttcaccttcagcgactactttatgagctgggtccgacaggcccctggcaaaggacttgaatgggtcgccaccatcagcaatggcggcacctacacttactaccccgacagcgtgaagggcagattcaccatctccagagacaacagcaagaacaccctgtacctccagatgaactccctgagagccgaggacaccgccgtgtactactgcgccagattcgacggctacatcttcgactattggggccagggcaccctggtcacagtctcttctacgcgtcagagttttgggttgttggaccctaaattgtgctatctgttggacggaatcctgttcatttacggagtgatcctgaccgcattgttcctgcgggttaagttttccagatccgcagacgcacccgcttaccaacaagggcagaaccaactctacaatgaacttaatttggggcggagggaagagtacgacgttctggacaaaaggaggggacgagatcccgagatgggcggaaagcctcagcgaaggaagaatccgcaagaggggctttataacgaactccagaaagataaaatggcagaagcctatagtgagattgggatgaagggagaaaggaggaggggtaaaggtcacgatgggttgtaccaaggattgagcacagccactaaagatacctatgatgcgctccacatgcaggccctgccgccaagacgcgccaagagaagcggatctggcgtgaagcagaccctgaatttcgacctgctgaagctggctggcgacgtggaatccaacccaggcccttctagaggccatatgaccgagtacaagcccacggtgcgcctcgccacccgcgacgacgtccccagggccgtacgcaccctcgccgccgcgttcgccgactaccccgccacgcgccacaccgtcgatccggaccgccacatcgagcgggtcaccgagctgcaagaactcttcctcacgcgcgtcgggctcgacatcggcaaggtgtgggtcgcggacgacggcgccgcggtggcggtctggaccacgccggagagcgtcgaagcgggggcggtgttcgccgagatcggcccgcgcatggccgagttgagcggttcccggctggccgcgcagcaacagatggaaggcctcctggcgccgcaccggcccaaggagcccgcgtggttcctggccaccgtcggcgtctcgcccgaccaccagggcaagggtctgggcagcgccgtcgtgctccccggagtggaggcggccgagcgcgccggggtgcccgccttcctggagacctccgcgccccgcaacctccccttctacgagcggctcggcttcaccgtcaccgccgacgtcgaggtgcccgaaggaccgcgcacctggtgcatgacccgcaagcccggtgcctga

SEQ ID NO: 10611 - DNA, 1932 bp, Artificial Sequence
  Synthetic Polynucloetide
atggccttaccagtgaccgccttgctcctgccgctggccttgctgctccacgccgccaggccggacatccagatgacacagagccctagcagcctgtctgccagcgtgggagacagagtgaccatcacctgtagagccagccaggacatcagcagctacctgaactggtatcagcagaagcccggcaaggcccctaagctgctgatctactacaccagcagactgcacagcggcgtgcccagcagattttctggctctggcagcggcaccgacttcaccctgacaatatctagcctccagcctgaggacttcgccacctactattgccagcagggcaacaccctgccttacacatttggacagggcaccaaggtggaaatcaagagactcgagggacagcctaaggccaatcctaccgtgacactgttccctccaagcagcgaagaactccaggccaacaaggccacacttgtgtgcctgatctccgacttctaccctggggctgtgacagtggcttggaaggccgatggatctcctgtgaaagccggcgtggaaaccaccaagccatccaagcagagcaacaacaaatacgccgccagctcctacctgagcctgacacctgagcagtggaagtcccacagatcctacagctgccaagtgacccacgaaggcagcaccgtggaaaagacagtggcccctacagagtgcagccccatcaagaccgatgtgattacaatggaccccaaggacaactgctccaaggacgccaacgataccctgctgctccagctgaccaacaccagcgcctactacatgtacttgttgctgctgctgaagtccgtggtgtacttcgccatcatcacatgctgcctgctgcggagaaccgccttctgctgcaacggcgagaagtctagggccaagcgatctggatctggagcaacaaacttctcactactcaaacaagcaggtgacgtggaggagaatcccgggcctactagtatggactggatttggcgcatccttttccttgtcggcgctgctaccggcgcgcattccttcgaagaagtgcagctggttgaatcaggtggcggcctggttcaacctggcggatctctgagactgagctgtgccgccagcggcttcaccttcagcgactactttatgagctgggtccgacaggcccctggcaaaggacttgaatgggtcgccaccatcagcaatggcggcacctacacttactaccccgacagcgtgaagggcagattcaccatctccagagacaacagcaagaacaccctgtacctccagatgaactccctgagagccgaggacaccgccgtgtactactgcgccagattcgacggctacatcttcgactattggggccagggcaccctggtcacagtctcttctacgcgtgcctctacaaagggaccctccgtgtttcctctggctcccagcagcaagtctacaagcggaggaacagccgctctgggctgcctggtcaaggattactttcccgagcctgtgaccgtgtcctggaatagcggagcactgacaagcggcgtgcacacctttccagccgtgctgcaaagcagcggcctgtactctctgagcagcgtggtcacagtgcctagctctagcctgggcacccagacctacatctgcaatgtgaaccacaagcctagcaacaccaaggtggacaagagagtggaacccaagagctgtgaagtgaaaaccgactccaccgaccacgtgaagcccaaagagacagagaacaccaagcagcccagcaagagctgccacaagcccaaggccatcgtgcacaccgagaaagtgaacatgatgagcctgaccgtgctgggcctgcggatgctgttcgccaaaaccgtggccgtgaacttcctgctgaccgccaagctgttcttcctc

SEQ ID NO: 10612 - DNA, 1866 bp, Artificial Sequence
  Synthetic Polynucloetide
atggccttaccagtgaccgccttgctcctgccgctggccttgctgctccacgccgccaggccggacatccagatgacacagagccctagcagcctgtctgccagcgtgggagacagagtgaccatcacctgtagagccagccaggacatcagcagctacctgaactggtatcagcagaagcccggcaaggcccctaagctgctgatctactacaccagcagactgcacagcggcgtgcccagcagattttctggctctggcagcggcaccgacttcaccctgacaatatctagcctccagcctgaggacttcgccacctactattgccagcagggcaacaccctgccttacacatttggacagggcaccaaggtggaaatcaagagactcgagggacagcctaaggccaatcctaccgtgacactgttccctccaagcagcgaagaactccaggccaacaaggccacacttgtgtgcctgatctccgacttctaccctggggctgtgacagtggcttggaaggccgatggatctcctgtgaaagccggcgtggaaaccaccaagccatccaagcagagcaacaacaaatacgccgccagctcctacctgagcctgacacctgagcagtggaagtcccacagatcctacagctgccaagtgacccacgaaggcagcaccgtggaaaagacagtggcccctacagagtgcagcggcagagccgattgcggcatcaccagcgccagctaccaccagggcgtgctgagcgccaccatcctgtacgagatcctgctgggcaaggccaccctgtacgccgtgctggtgtctgccctggtgctgatggctatggtcaagcggaaggacagccggggaagggccaagcgatctggatctggagcaacaaacttctcactactcaaacaagcaggtgacgtggaggagaatcccgggcctactagtatggactggatttggcgcatccttttccttgtcggcgctgctaccggcgcgcattccttcgaagaagtgcagctggttgaatcaggtggcggcctggttcaacctggcggatctctgagactgagctgtgccgccagcggcttcaccttcagcgactactttatgagctgggtccgacaggcccctggcaaaggacttgaatgggtcgccaccatcagcaatggcggcacctacacttactaccccgacagcgtgaagggcagattcaccatctccagagacaacagcaagaacaccctgtacctccagatgaactccctgagagccgaggacaccgccgtgtactactgcgccagattcgacggctacatcttcgactattggggccagggcaccctggtcacagtctcttctacgcgtgcctctacaaagggaccctccgtgtttcctctggctcccagcagcaagtctacaagcggaggaacagccgctctgggctgcctggtcaaggattactttcccgagcctgtgaccgtgtcctggaatagcggagcactgacaagcggcgtgcacacctttccagccgtgctgcaaagcagcggcctgtactctctgagcagcgtggtcacagtgcctagctctagcctgggcacccagacctacatctgcaatgtgaaccacaagcctagcaacaccaaggtggacaagagagtggaacccaagagctgtatccccgaggacacattcttcccaagcagcgacgtgccctgcgacgtgaagctggtggaaaagagcttcgagacagacaccaacctgaacttccagaacctgagcgtgatcggcttcagaatcctgctgctgaaagtggccggctttaacctgctgatgaccctgcggctgtggtccagc

SEQ ID NO: 10613 - DNA, 1866 bp, Artificial Sequence
  Synthetic Polynucloetide
atggccttaccagtgaccgccttgctcctgccgctggccttgctgctccacgccgccaggccggacatccagatgacacagagccctagcagcctgtctgccagcgtgggagacagagtgaccatcacctgtagagccagccaggacatcagcagctacctgaactggtatcagcagaagcccggcaaggcccctaagctgctgatctactacaccagcagactgcacagcggcgtgcccagcagattttctggctctggcagcggcaccgacttcaccctgacaatatctagcctccagcctgaggacttcgccacctactattgccagcagggcaacaccctgccttacacatttggacagggcaccaaggtggaaatcaagagactcgagggacagcctaaggccaatcctaccgtgacactgttccctccaagcagcgaagaactccaggccaacaaggccacacttgtgtgcctgatctccgacttctaccctggggctgtgacagtggcttggaaggccgatggatctcctgtgaaagccggcgtggaaaccaccaagccatccaagcagagcaacaacaaatacgccgccagctcctacctgagcctgacacctgagcagtggaagtcccacagatcctacagctgccaagtgacccacgaaggcagcaccgtggaaaagacagtggcccctacagagtgcagcggcagagccgattgcggctttaccagcgagagctaccagcagggcgtgctgagcgccaccatcctgtacgagatcctgctgggcaaggccaccctgtacgccgtgctggtgtctgccctggtgctgatggctatggtcaagcggaaggacagccggggaagggccaagcgatctggatctggagcaacaaacttctcactactcaaacaagcaggtgacgtggaggagaatcccgggcctactagtatggactggatttggcgcatccttttccttgtcggcgctgctaccggcgcgcattccttcgaagaagtgcagctggttgaatcaggtggcggcctggttcaacctggcggatctctgagactgagctgtgccgccagcggcttcaccttcagcgactactttatgagctgggtccgacaggcccctggcaaaggacttgaatgggtcgccaccatcagcaatggcggcacctacacttactaccccgacagcgtgaagggcagattcaccatctccagagacaacagcaagaacaccctgtacctccagatgaactccctgagagccgaggacaccgccgtgtactactgcgccagattcgacggctacatcttcgactattggggccagggcaccctggtcacagtctcttctacgcgtgcctctacaaagggaccctccgtgtttcctctggctcccagcagcaagtctacaagcggaggaacagccgctctgggctgcctggtcaaggattactttcccgagcctgtgaccgtgtcctggaatagcggagcactgacaagcggcgtgcacacctttccagccgtgctgcaaagcagcggcctgtactctctgagcagcgtggtcacagtgcctagctctagcctgggcacccagacctacatctgcaatgtgaaccacaagcctagcaacaccaaggtggacaagagagtggaacccaagagctgtatccccgaggacacattcttcccaagccccgagagcagctgcgacgtgaagctggtggaaaagagcttcgagacagacaccaacctgaacttccagaacctgagcgtgatcggcttcagaatcctgctgctgaaagtggccggctttaacctgctgatgaccctgcggctgtggtccagc

SEQ ID NO: 10614 - DNA, 1344 bp, Artificial Sequence
  Synthetic Polynucloetide
atggccttaccagtgaccgccttgctcctgccgctggccttgctgctccacgccgccaggccggacatccagatgacacagagccctagcagcctgtctgccagcgtgggagacagagtgaccatcacctgtagagccagccaggacatcagcagctacctgaactggtatcagcagaagcccggcaaggcccctaagctgctgatctactacaccagcagactgcacagcggcgtgcccagcagattttctggctctggcagcggcaccgacttcaccctgacaatatctagcctccagcctgaggacttcgccacctactattgccagcagggcaacaccctgccttacacatttggacagggcaccaaggtggaaatcaagagaggcggaggcggaagtggaggcggaggatctggcggcggaggctctgaagtgcagctggttgaatcaggtggcggcctggttcaacctggcggatctctgagactgagctgtgccgccagcggcttcaccttcagcgactactttatgagctgggtccgacaggcccctggcaaaggacttgaatgggtcgccaccatcagcaatggcggcacctacacttactaccccgacagcgtgaagggcagattcaccatctccagagacaacagcaagaacaccctgtacctccagatgaactccctgagagccgaggacaccgccgtgtactactgcgccagattcgacggctacatcttcgactattggggccagggcaccctggtcacagtctcttctacgcgtgacggtaacgaggagatgggaggaatcactcaaaccccttacaaagtctcaatttcaggaacaactgttatccttacatgtccccagtatcctggcagcgagatcctttggcagcataacgacaagaatatagggggagatgaagacgataagaatatcggatctgacgaggatcacttgagcctgaaagagttctccgagcttgaacaaagcggatattatgtgtgctatccgcgcgggtcaaagccggaagacgctaacttttacctttatctccgagccagagtgtgcgaaaattgcatggaaatggacgttatgtccgttgctacaatagttatcgtagatatatgcatcacgggtggactgcttctgctggtttattattggtccaagaatagaaaggccaaagctaaacccgtgaccagaggcgctggcgcaggcggaaggcaaaggggacaaaacaaagaacggccaccaccagtgccaaatccagattatgagcctattcggaaaggacagagggacctgtactctggcctgaatcagagaagaatc

SEQ ID NO: 10615 - DNA, 1239 bp, Artificial Sequence
  Synthetic Polynucloetide
atggccttaccagtgaccgccttgctcctgccgctggccttgctgctccacgccgccaggccggacatccagatgacacagagccctagcagcctgtctgccagcgtgggagacagagtgaccatcacctgtagagccagccaggacatcagcagctacctgaactggtatcagcagaagcccggcaaggcccctaagctgctgatctactacaccagcagactgcacagcggcgtgcccagcagattttctggctctggcagcggcaccgacttcaccctgacaatatctagcctccagcctgaggacttcgccacctactattgccagcagggcaacaccctgccttacacatttggacagggcaccaaggtggaaatcaagagaggcggaggcggaagtggaggcggaggatctggcggcggaggctctgaagtgcagctggttgaatcaggtggcggcctggttcaacctggcggatctctgagactgagctgtgccgccagcggcttcaccttcagcgactactttatgagctgggtccgacaggcccctggcaaaggacttgaatgggtcgccaccatcagcaatggcggcacctacacttactaccccgacagcgtgaagggcagattcaccatctccagagacaacagcaagaacaccctgtacctccagatgaactccctgagagccgaggacaccgccgtgtactactgcgccagattcgacggctacatcttcgactattggggccagggcaccctggtcacagtctcttctacgcgtttcaagatccccatcgaggaactggaagatcgggtgttcgtgaactgcaacacctctatcacctgggtggaaggcaccgtgggaacactgctgagcgacatcaccagactggacctcggcaagcggattctggaccctcggggcatctacagatgcaacggcaccgacatctacaaggacaaagaaagcaccgtgcaggtccactacagaatgtgccagtcctgcgtggaactggaccctgctacagtggccggcatcatcgtgaccgatgtgatcgctactctgctgctggctctgggagtgttctgcttcgccggacacgaaacaggcagactgtctggcgctgccgatacacaggccctgctgagaaacgaccaagtgtatcagcccctgcgcgacagagatgatgcccagtattctcacctcggcggcaactgggctagaaacaag

SEQ ID NO: 10616 - DNA, 1269 bp, Artificial Sequence
  Synthetic Polynucloetide
atggccttaccagtgaccgccttgctcctgccgctggccttgctgctccacgccgccaggccggacatccagatgacacagagccctagcagcctgtctgccagcgtgggagacagagtgaccatcacctgtagagccagccaggacatcagcagctacctgaactggtatcagcagaagcccggcaaggcccctaagctgctgatctactacaccagcagactgcacagcggcgtgcccagcagattttctggctctggcagcggcaccgacttcaccctgacaatatctagcctccagcctgaggacttcgccacctactattgccagcagggcaacaccctgccttacacatttggacagggcaccaaggtggaaatcaagagaggcggaggcggaagtggaggcggaggatctggcggcggaggctctgaagtgcagctggttgaatcaggtggcggcctggttcaacctggcggatctctgagactgagctgtgccgccagcggcttcaccttcagcgactactttatgagctgggtccgacaggcccctggcaaaggacttgaatgggtcgccaccatcagcaatggcggcacctacacttactaccccgacagcgtgaagggcagattcaccatctccagagacaacagcaagaacaccctgtacctccagatgaactccctgagagccgaggacaccgccgtgtactactgcgccagattcgacggctacatcttcgactattggggccagggcaccctggtcacagtctcttctacgcgtcagagcatcaagggcaaccacctggtcaaggtgtacgactaccaagaggacggcagcgtgctgctgacatgtgatgccgaggccaagaacatcacctggtttaaggacggcaagatgatcggcttcctgaccgaggacaagaagaagtggaacctgggcagcaacgctaaggaccccagaggcatgtatcagtgcaagggcagccagaacaagagcaagcccctccaggtgtactaccggatgtgccagaactgcatcgagctgaacgccgctaccatcagcggctttctgttcgccgagatcgtgtccatcttcgtgctggccgtgggcgtgtactttatcgctggacaggatggcgtgcggcagagcagagcttccgataagcaaaccctgctgcctaacgaccagctgtaccagcctctgaaggacagagaggacgaccagtacagccacctccagggcaatcagctgagaagaaac

SEQ ID NO: 10617 - DNA, 1218 bp, Artificial Sequence
  Synthetic Polynucloetide
atggccttaccagtgaccgccttgctcctgccgctggccttgctgctccacgccgccaggccggacatccagatgacacagagccctagcagcctgtctgccagcgtgggagacagagtgaccatcacctgtagagccagccaggacatcagcagctacctgaactggtatcagcagaagcccggcaaggcccctaagctgctgatctactacaccagcagactgcacagcggcgtgcccagcagattttctggctctggcagcggcaccgacttcaccctgacaatatctagcctccagcctgaggacttcgccacctactattgccagcagggcaacaccctgccttacacatttggacagggcaccaaggtggaaatcaagagaggcggaggcggaagtggaggcggaggatctggcggcggaggctctgaagtgcagctggttgaatcaggtggcggcctggttcaacctggcggatctctgagactgagctgtgccgccagcggcttcaccttcagcgactactttatgagctgggtccgacaggcccctggcaaaggacttgaatgggtcgccaccatcagcaatggcggcacctacacttactaccccgacagcgtgaagggcagattcaccatctccagagacaacagcaagaacaccctgtacctccagatgaactccctgagagccgaggacaccgccgtgtactactgcgccagattcgacggctacatcttcgactattggggccagggcaccctggtcacagtctcttctacgcgtcagagttttgggttgttggaccctaaattgtgctatctgttggacggaatcctgttcatttacggagtgatcctgaccgcattgttcctgcgggttaagttttccagatccgcagacgcacccgcttaccaacaagggcagaaccaactctacaatgaacttaatttggggcggagggaagagtacgacgttctggacaaaaggaggggacgagatcccgagatgggcggaaagcctcagcgaaggaagaatccgcaagaggggctttataacgaactccagaaagataaaatggcagaagcctatagtgagattgggatgaagggagaaaggaggaggggtaaaggtcacgatgggttgtaccaaggattgagcacagccactaaagatacctatgatgcgctccacatgcaggccctgccgccaaga

SEQ ID NO: 10618 - DNA, 1344 bp, Artificial Sequence
  Synthetic Polynucloetide
atggccttaccagtgaccgccttgctcctgccgctggccttgctgctccacgccgccaggccggaagtgcagctggttgaatcaggtggcggcctggttcaacctggcggatctctgagactgagctgtgccgccagcggcttcaccttcagcgactactttatgagctgggtccgacaggcccctggcaaaggacttgaatgggtcgccaccatcagcaatggcggcacctacacttactaccccgacagcgtgaagggcagattcaccatctccagagacaacagcaagaacaccctgtacctccagatgaactccctgagagccgaggacaccgccgtgtactactgcgccagattcgacggctacatcttcgactattggggccagggcaccctggtcacagtctcttctggcggaggcggaagtggaggcggaggatctggcggcggaggctctgacatccagatgacacagagccctagcagcctgtctgccagcgtgggagacagagtgaccatcacctgtagagccagccaggacatcagcagctacctgaactggtatcagcagaagcccggcaaggcccctaagctgctgatctactacaccagcagactgcacagcggcgtgcccagcagattttctggctctggcagcggcaccgacttcaccctgacaatatctagcctccagcctgaggacttcgccacctactattgccagcagggcaacaccctgccttacacatttggacagggcaccaaggtggaaatcaagagaacgcgtgacggtaacgaggagatgggaggaatcactcaaaccccttacaaagtctcaatttcaggaacaactgttatccttacatgtccccagtatcctggcagcgagatcctttggcagcataacgacaagaatatagggggagatgaagacgataagaatatcggatctgacgaggatcacttgagcctgaaagagttctccgagcttgaacaaagcggatattatgtgtgctatccgcgcgggtcaaagccggaagacgctaacttttacctttatctccgagccagagtgtgcgaaaattgcatggaaatggacgttatgtccgttgctacaatagttatcgtagatatatgcatcacgggtggactgcttctgctggtttattattggtccaagaatagaaaggccaaagctaaacccgtgaccagaggcgctggcgcaggcggaaggcaaaggggacaaaacaaagaacggccaccaccagtgccaaatccagattatgagcctattcggaaaggacagagggacctgtactctggcctgaatcagagaagaatc

SEQ ID NO: 10619 - DNA, 1239 bp, Artificial Sequence
  Synthetic Polynucloetide
atggccttaccagtgaccgccttgctcctgccgctggccttgctgctccacgccgccaggccggaagtgcagctggttgaatcaggtggcggcctggttcaacctggcggatctctgagactgagctgtgccgccagcggcttcaccttcagcgactactttatgagctgggtccgacaggcccctggcaaaggacttgaatgggtcgccaccatcagcaatggcggcacctacacttactaccccgacagcgtgaagggcagattcaccatctccagagacaacagcaagaacaccctgtacctccagatgaactccctgagagccgaggacaccgccgtgtactactgcgccagattcgacggctacatcttcgactattggggccagggcaccctggtcacagtctcttctggcggaggcggaagtggaggcggaggatctggcggcggaggctctgacatccagatgacacagagccctagcagcctgtctgccagcgtgggagacagagtgaccatcacctgtagagccagccaggacatcagcagctacctgaactggtatcagcagaagcccggcaaggcccctaagctgctgatctactacaccagcagactgcacagcggcgtgcccagcagattttctggctctggcagcggcaccgacttcaccctgacaatatctagcctccagcctgaggacttcgccacctactattgccagcagggcaacaccctgccttacacatttggacagggcaccaaggtggaaatcaagagaacgcgtttcaagatccccatcgaggaactggaagatcgggtgttcgtgaactgcaacacctctatcacctgggtggaaggcaccgtgggaacactgctgagcgacatcaccagactggacctcggcaagcggattctggaccctcggggcatctacagatgcaacggcaccgacatctacaaggacaaagaaagcaccgtgcaggtccactacagaatgtgccagtcctgcgtggaactggaccctgctacagtggccggcatcatcgtgaccgatgtgatcgctactctgctgctggctctgggagtgttctgcttcgccggacacgaaacaggcagactgtctggcgctgccgatacacaggccctgctgagaaacgaccaagtgtatcagcccctgcgcgacagagatgatgcccagtattctcacctcggcggcaactgggctagaaacaag

SEQ ID NO: 10620 - DNA, 1269 bp, Artificial Sequence
  Synthetic Polynucloetide
atggccttaccagtgaccgccttgctcctgccgctggccttgctgctccacgccgccaggccggaagtgcagctggttgaatcaggtggcggcctggttcaacctggcggatctctgagactgagctgtgccgccagcggcttcaccttcagcgactactttatgagctgggtccgacaggcccctggcaaaggacttgaatgggtcgccaccatcagcaatggcggcacctacacttactaccccgacagcgtgaagggcagattcaccatctccagagacaacagcaagaacaccctgtacctccagatgaactccctgagagccgaggacaccgccgtgtactactgcgccagattcgacggctacatcttcgactattggggccagggcaccctggtcacagtctcttctggcggaggcggaagtggaggcggaggatctggcggcggaggctctgacatccagatgacacagagccctagcagcctgtctgccagcgtgggagacagagtgaccatcacctgtagagccagccaggacatcagcagctacctgaactggtatcagcagaagcccggcaaggcccctaagctgctgatctactacaccagcagactgcacagcggcgtgcccagcagattttctggctctggcagcggcaccgacttcaccctgacaatatctagcctccagcctgaggacttcgccacctactattgccagcagggcaacaccctgccttacacatttggacagggcaccaaggtggaaatcaagagaacgcgtcagagcatcaagggcaaccacctggtcaaggtgtacgactaccaagaggacggcagcgtgctgctgacatgtgatgccgaggccaagaacatcacctggtttaaggacggcaagatgatcggcttcctgaccgaggacaagaagaagtggaacctgggcagcaacgctaaggaccccagaggcatgtatcagtgcaagggcagccagaacaagagcaagcccctccaggtgtactaccggatgtgccagaactgcatcgagctgaacgccgctaccatcagcggctttctgttcgccgagatcgtgtccatcttcgtgctggccgtgggcgtgtactttatcgctggacaggatggcgtgcggcagagcagagcttccgataagcaaaccctgctgcctaacgaccagctgtaccagcctctgaaggacagagaggacgaccagtacagccacctccagggcaatcagctgagaagaaac

SEQ ID NO: 10621 - DNA, 1218 bp, Artificial Sequence
  Synthetic Polynucloetide
atggccttaccagtgaccgccttgctcctgccgctggccttgctgctccacgccgccaggccggaagtgcagctggttgaatcaggtggcggcctggttcaacctggcggatctctgagactgagctgtgccgccagcggcttcaccttcagcgactactttatgagctgggtccgacaggcccctggcaaaggacttgaatgggtcgccaccatcagcaatggcggcacctacacttactaccccgacagcgtgaagggcagattcaccatctccagagacaacagcaagaacaccctgtacctccagatgaactccctgagagccgaggacaccgccgtgtactactgcgccagattcgacggctacatcttcgactattggggccagggcaccctggtcacagtctcttctggcggaggcggaagtggaggcggaggatctggcggcggaggctctgacatccagatgacacagagccctagcagcctgtctgccagcgtgggagacagagtgaccatcacctgtagagccagccaggacatcagcagctacctgaactggtatcagcagaagcccggcaaggcccctaagctgctgatctactacaccagcagactgcacagcggcgtgcccagcagattttctggctctggcagcggcaccgacttcaccctgacaatatctagcctccagcctgaggacttcgccacctactattgccagcagggcaacaccctgccttacacatttggacagggcaccaaggtggaaatcaagagaacgcgtcagagttttgggttgttggaccctaaattgtgctatctgttggacggaatcctgttcatttacggagtgatcctgaccgcattgttcctgcgggttaagttttccagatccgcagacgcacccgcttaccaacaagggcagaaccaactctacaatgaacttaatttggggcggagggaagagtacgacgttctggacaaaaggaggggacgagatcccgagatgggcggaaagcctcagcgaaggaagaatccgcaagaggggctttataacgaactccagaaagataaaatggcagaagcctatagtgagattgggatgaagggagaaaggaggaggggtaaaggtcacgatgggttgtaccaaggattgagcacagccactaaagatacctatgatgcgctccacatgcaggccctgccgccaaga

SEQ ID NO: 10622 - DNA, 1920 bp, Artificial Sequence
  Synthetic Polynucloetide
atggccttaccagtgaccgccttgctcctgccgctggccttgctgctccacgccgccaggccggacatccagatgacacagagccctagcagcctgtctgccagcgtgggagacagagtgaccatcacctgtagagccagccaggacatcagcagctacctgaactggtatcagcagaagcccggcaaggcccctaagctgctgatctactacaccagcagactgcacagcggcgtgcccagcagattttctggctctggcagcggcaccgacttcaccctgacaatatctagcctccagcctgaggacttcgccacctactattgccagcagggcaacaccctgccttacacatttggacagggcaccaaggtggaaatcaagagaggcggaggcggaagtggaggcggaggatctggcggcggaggctctgaagtgcagctggttgaatcaggtggcggcctggttcaacctggcggatctctgagactgagctgtgccgccagcggcttcaccttcagcgactactttatgagctgggtccgacaggcccctggcaaaggacttgaatgggtcgccaccatcagcaatggcggcacctacacttactaccccgacagcgtgaagggcagattcaccatctccagagacaacagcaagaacaccctgtacctccagatgaactccctgagagccgaggacaccgccgtgtactactgcgccagattcgacggctacatcttcgactattggggccagggcaccctggtcacagtctcttctacgcgtgggagcggcatccagaaccctgatcctgccgtgtaccagctgcgggatagcaagagcagcgacaagagcgtgtgtctgttcaccgacttcgacagccagaccaacgtgtcccagagcaaggactccgacgtgtacatcaccgataagaccgtgctggacatgcggagcatggacttcaagagcaactccgccgtggcctggtccaacaagtccgatttcgcctgcgccaacgccttcaacaacagcattatccccgaggacacattcttcccaagccccgagagcagctgcgacgtgaagctggtggaaaagagcttcgagacagacaccaacctgaacttccagaacctgagcgtgatcggcttcagaatcctgctgctgaaagtggccggctttaacctgctgatgaccctgcggctgtggtccagccgcgccaagagaagcggatctggcgtgaagcagaccctgaatttcgacctgctgaagctggctggcgacgtggaatccaacccaggcccttctagaggccatatgaccgagtacaagcccacggtgcgcctcgccacccgcgacgacgtccccagggccgtacgcaccctcgccgccgcgttcgccgactaccccgccacgcgccacaccgtcgatccggaccgccacatcgagcgggtcaccgagctgcaagaactcttcctcacgcgcgtcgggctcgacatcggcaaggtgtgggtcgcggacgacggcgccgcggtggcggtctggaccacgccggagagcgtcgaagcgggggcggtgttcgccgagatcggcccgcgcatggccgagttgagcggttcccggctggccgcgcagcaacagatggaaggcctcctggcgccgcaccggcccaaggagcccgcgtggttcctggccaccgtcggcgtctcgcccgaccaccagggcaagggtctgggcagcgccgtcgtgctccccggagtggaggcggccgagcgcgccggggtgcccgccttcctggagacctccgcgccccgcaacctccccttctacgagcggctcggcttcaccgtcaccgccgacgtcgaggtgcccgaaggaccgcgcacctggtgcatgacccgcaagcccggtgcctga

SEQ ID NO: 10623 - DNA, 2016 bp, Artificial Sequence
  Synthetic Polynucloetide
atggccttaccagtgaccgccttgctcctgccgctggccttgctgctccacgccgccaggccggacatccagatgacacagagccctagcagcctgtctgccagcgtgggagacagagtgaccatcacctgtagagccagccaggacatcagcagctacctgaactggtatcagcagaagcccggcaaggcccctaagctgctgatctactacaccagcagactgcacagcggcgtgcccagcagattttctggctctggcagcggcaccgacttcaccctgacaatatctagcctccagcctgaggacttcgccacctactattgccagcagggcaacaccctgccttacacatttggacagggcaccaaggtggaaatcaagagaggcggaggcggaagtggaggcggaggatctggcggcggaggctctgaagtgcagctggttgaatcaggtggcggcctggttcaacctggcggatctctgagactgagctgtgccgccagcggcttcaccttcagcgactactttatgagctgggtccgacaggcccctggcaaaggacttgaatgggtcgccaccatcagcaatggcggcacctacacttactaccccgacagcgtgaagggcagattcaccatctccagagacaacagcaagaacaccctgtacctccagatgaactccctgagagccgaggacaccgccgtgtactactgcgccagattcgacggctacatcttcgactattggggccagggcaccctggtcacagtctcttctctcgaggacctgaagaacgtgttcccacctgaggtggccgtgttcgagcctagcgaggccgagatcagccacacccagaaagccaccctcgtgtgcctggctaccggcttctaccccgaccatgtggaactgtcttggtgggtcaacggcaaagaggtgcacagcggcgtgtctaccgacccccagccactgaaagaacagcccgccctgaacgacagccggtactgcctgagcagcagactgagagtgtccgccaccttctggcagaacccccggaaccacttcagatgccaggtgcagttctacggcctgagcgagaacgacgagtggacccaggacagagccaagcccgtgacccagatcgtgtctgccgaagcctggggcagagccgattgcggctttaccagcgagagctaccagcagggcgtgctgagcgccaccatcctgtacgagatcctgctgggcaaggccaccctgtacgccgtgctggtgtctgccctggtgctgatggctatggtcaagcggaaggacagccggggaagggccaagcgatctggatctggagcaacaaacttctcactactcaaacaagcaggtgacgtggaggagaatcccgggcctactagaggccatatgaccgagtacaagcccacggtgcgcctcgccacccgcgacgacgtccccagggccgtacgcaccctcgccgccgcgttcgccgactaccccgccacgcgccacaccgtcgatccggaccgccacatcgagcgggtcaccgagctgcaagaactcttcctcacgcgcgtcgggctcgacatcggcaaggtgtgggtcgcggacgacggcgccgcggtggcggtctggaccacgccggagagcgtcgaagcgggggcggtgttcgccgagatcggcccgcgcatggccgagttgagcggttcccggctggccgcgcagcaacagatggaaggcctcctggcgccgcaccggcccaaggagcccgcgtggttcctggccaccgtcggcgtctcgcccgaccaccagggcaagggtctgggcagcgccgtcgtgctccccggagtggaggcggccgagcgcgccggggtgcccgccttcctggagacctccgcgccccgcaacctccccttctacgagcggctcggcttcaccgtcaccgccgacgtcgaggtgcccgaaggaccgcgcacctggtgcatgacccgcaagcccggtgcctga

SEQ ID NO: 10624 - DNA, 2166 bp, Artificial Sequence
  Synthetic Polynucloetide
atggccttaccagtgaccgccttgctcctgccgctggccttgctgctccacgccgccaggccggacatccagatgacacagagccctagcagcctgtctgccagcgtgggagacagagtgaccatcacctgtagagccagccaggacatcagcagctacctgaactggtatcagcagaagcccggcaaggcccctaagctgctgatctactacaccagcagactgcacagcggcgtgcccagcagattttctggctctggcagcggcaccgacttcaccctgacaatatctagcctccagcctgaggacttcgccacctactattgccagcagggcaacaccctgccttacacatttggacagggcaccaaggtggaaatcaagagaggcggaggcggaagtggaggcggaggatctggcggcggaggctctgaagtgcagctggttgaatcaggtggcggcctggttcaacctggcggatctctgagactgagctgtgccgccagcggcttcaccttcagcgactactttatgagctgggtccgacaggcccctggcaaaggacttgaatgggtcgccaccatcagcaatggcggcacctacacttactaccccgacagcgtgaagggcagattcaccatctccagagacaacagcaagaacaccctgtacctccagatgaactccctgagagccgaggacaccgccgtgtactactgcgccagattcgacggctacatcttcgactattggggccagggcaccctggtcacagtctcttctacgcgtgagcagaaactgatctcggaagaggatctggggagcggcaccccattcccttctctggcccctcccatcatgctgctggtggacggcaagcagcagatggtggtcgtgtgcctggtgctggatgtggccccacctggactggacagccccatctggtttagcgccggcaatggctctgccctggacgcctttacctacggcccaagccctgccaccgatggcacctggacaaatctggcccacctgagcctgcccagcgaggaactggcttcttgggagcctctcgtgtgccacacaggacctggcgctgagggacacagcagatccacccagcctatgcacctgtctggcgaggccagcaccgccagaacctgtcctcaggaacctctgagaggcacccctggcggagcactgtggctgggagtgctgagactgctgctgttcaagctgctgctgtttgacctgctgctgacctgctcctgtctgtgcgatcctgccggccctctgccttctcctgccaccaccacaagactgagagccctgggcagccacagactgcaccctgccacagagacaggcggcagagaggccacaagcagccctagaccccagcccagagacagaagatggggcgataccccccctggcagaaagcctggatctccagtccgcgccaagagaagcggatctggcgtgaagcagaccctgaatttcgacctgctgaagctggctggcgacgtggaatccaacccaggcccttctagatctagaggccatatgaccgagtacaagcccacggtgcgcctcgccacccgcgacgacgtccccagggccgtacgcaccctcgccgccgcgttcgccgactaccccgccacgcgccacaccgtcgatccggaccgccacatcgagcgggtcaccgagctgcaagaactcttcctcacgcgcgtcgggctcgacatcggcaaggtgtgggtcgcggacgacggcgccgcggtggcggtctggaccacgccggagagcgtcgaagcgggggcggtgttcgccgagatcggcccgcgcatggccgagttgagcggttcccggctggccgcgcagcaacagatggaaggcctcctggcgccgcaccggcccaaggagcccgcgtggttcctggccaccgtcggcgtctcgcccgaccaccagggcaagggtctgggcagcgccgtcgtgctccccggagtggaggcggccgagcgcgccggggtgcccgccttcctggagacctccgcgccccgcaacctccccttctacgagcggctcggcttcaccgtcaccgccgacgtcgaggtgcccgaaggaccgcgcacctggtgcatgacccgcaagcccggtgcctga

SEQ ID NO: 10625 - DNA, 1620 bp, Artificial Sequence
  Synthetic Polynucloetide
atggccttaccagtgaccgccttgctcctgccgctggccttgctgctccacgccgccaggccggacatccagatgacacagagccctagcagcctgtctgccagcgtgggagacagagtgaccatcacctgtagagccagccaggacatcagcagctacctgaactggtatcagcagaagcccggcaaggcccctaagctgctgatctactacaccagcagactgcacagcggcgtgcccagcagattttctggctctggcagcggcaccgacttcaccctgacaatatctagcctccagcctgaggacttcgccacctactattgccagcagggcaacaccctgccttacacatttggacagggcaccaaggtggaaatcaagagactcgaggacctgaagaacgtgttcccacctgaggtggccgtgttcgagcctagcgaggccgagatcagccacacccagaaagccaccctcgtgtgcctggctaccggcttctaccccgaccatgtggaactgtcttggtgggtcaacggcaaagaggtgcacagcggcgtgtctaccgacccccagccactgaaagaacagcccgccctgaacgacagccggtactgcctgagcagcagactgagagtgtccgccaccttctggcagaacccccggaaccacttcagatgccaggtgcagttctacggcctgagcgagaacgacgagtggacccaggacagagccaagcccgtgacccagatcgtgtctgccgaagcctggggcagagccgattgcggctttaccagcgagagctaccagcagggcgtgctgagcgccaccatcctgtacgagatcctgctgggcaaggccaccctgtacgccgtgctggtgtctgccctggtgctgatggctatggtcaagcggaaggacagccggggaagggccaagcgatctggatctggagcaacaaacttctcactactcaaacaagcaggtgacgtggaggagaatcccgggcctactagaggccatatgaccgagtacaagcccacggtgcgcctcgccacccgcgacgacgtccccagggccgtacgcaccctcgccgccgcgttcgccgactaccccgccacgcgccacaccgtcgatccggaccgccacatcgagcgggtcaccgagctgcaagaactcttcctcacgcgcgtcgggctcgacatcggcaaggtgtgggtcgcggacgacggcgccgcggtggcggtctggaccacgccggagagcgtcgaagcgggggcggtgttcgccgagatcggcccgcgcatggccgagttgagcggttcccggctggccgcgcagcaacagatggaaggcctcctggcgccgcaccggcccaaggagcccgcgtggttcctggccaccgtcggcgtctcgcccgaccaccagggcaagggtctgggcagcgccgtcgtgctccccggagtggaggcggccgagcgcgccggggtgcccgccttcctggagacctccgcgccccgcaacctccccttctacgagcggctcggcttcaccgtcaccgccgacgtcgaggtgcccgaaggaccgcgcacctggtgcatgacccgcaagcccggtgcctga

SEQ ID NO: 10626 - DNA, 927 bp, Artificial Sequence
  Synthetic Polynucloetide
atggccttaccagtgaccgccttgctcctgccgctggccttgctgctccacgccgccaggccggacatccagatgacacagagccctagcagcctgtctgccagcgtgggagacagagtgaccatcacctgtagagccagccaggacatcagcagctacctgaactggtatcagcagaagcccggcaaggcccctaagctgctgatctactacaccagcagactgcacagcggcgtgcccagcagattttctggctctggcagcggcaccgacttcaccctgacaatatctagcctccagcctgaggacttcgccacctactattgccagcagggcaacaccctgccttacacatttggacagggcaccaaggtggaaatcaagagactcgaggacctgaagaacgtgttcccacctgaggtggccgtgttcgagcctagcgaggccgagatcagccacacccagaaagccaccctcgtgtgcctggctaccggcttctaccccgaccatgtggaactgtcttggtgggtcaacggcaaagaggtgcacagcggcgtgtctaccgacccccagccactgaaagaacagcccgccctgaacgacagccggtactgcctgagcagcagactgagagtgtccgccaccttctggcagaacccccggaaccacttcagatgccaggtgcagttctacggcctgagcgagaacgacgagtggacccaggacagagccaagcccgtgacccagatcgtgtctgccgaagcctggggcagagccgattgcggctttaccagcgagagctaccagcagggcgtgctgagcgccaccatcctgtacgagatcctgctgggcaaggccaccctgtacgccgtgctggtgtctgccctggtgctgatggctatggtcaagcggaaggacagccgggga

SEQ ID NO: 10627 - DNA, 1341 bp, Artificial Sequence
  Synthetic Polynucloetide
atggactggatttggcgcatccttttccttgtcggcgctgctaccggcgcgcattccttcgaagaagtgcagctggttgaatcaggtggcggcctggttcaacctggcggatctctgagactgagctgtgccgccagcggcttcaccttcagcgactactttatgagctgggtccgacaggcccctggcaaaggacttgaatgggtcgccaccatcagcaatggcggcacctacacttactaccccgacagcgtgaagggcagattcaccatctccagagacaacagcaagaacaccctgtacctccagatgaactccctgagagccgaggacaccgccgtgtactactgcgccagattcgacggctacatcttcgactattggggccagggcaccctggtcacagtctcttctacgcgtatccagaaccctgatcctgccgtgtaccagctgcgggatagcaagagcagcgacaagagcgtgtgtctgttcaccgacttcgacagccagaccaacgtgtcccagagcaaggactccgacgtgtacatcaccgataagaccgtgctggacatgcggagcatggacttcaagagcaactccgccgtggcctggtccaacaagtccgatttcgcctgcgccaacgccttcaacaacagcattatccccgaggacacattcttcccaagccccgagagcagctgcgacgtgaagctggtggaaaagagcttcgagacagacaccaacctgaacttccagaacctgagcgtgatcggcttcagaatcctgctgctgaaagtggccggctttaacctgctgatgaccctgcggctgtggtccagccgcgccaagagaagcggatctggcgtgaagcagaccctgaatttcgacctgctgaagctggctggcgacgtggaatccaacccaggcccttctagaggccatatggccaagcctttgtctcaagaagaatccaccctcattgaaagagcaacggctacaatcaacagcatccccatctctgaagactacagcgtcgccagcgcagctctctctagcgacggccgcatcttcactggtgtcaatgtatatcattttactgggggaccttgtgcagaactcgtggtgctgggcactgctgctgctgcggcagctggcaacctgacttgtatcgtcgcgatcggaaatgagaacaggggcatcttgagcccctgcggacggtgccgacaggtgcttctcgatctgcatcctgggatcaaagccatagtgaaggacagtgatggacagccgacggcagttgggattcgtgaattgctgccctctggttatgtgtgggagggctga

SEQ ID NO: 10628 - DNA, 840 bp, Artificial Sequence
  Synthetic Polynucloetide
atggactggatttggcgcatccttttccttgtcggcgctgctaccggcgcgcattccttcgaagaagtgcagctggttgaatcaggtggcggcctggttcaacctggcggatctctgagactgagctgtgccgccagcggcttcaccttcagcgactactttatgagctgggtccgacaggcccctggcaaaggacttgaatgggtcgccaccatcagcaatggcggcacctacacttactaccccgacagcgtgaagggcagattcaccatctccagagacaacagcaagaacaccctgtacctccagatgaactccctgagagccgaggacaccgccgtgtactactgcgccagattcgacggctacatcttcgactattggggccagggcaccctggtcacagtctcttctacgcgtatccagaaccctgatcctgccgtgtaccagctgcgggatagcaagagcagcgacaagagcgtgtgtctgttcaccgacttcgacagccagaccaacgtgtcccagagcaaggactccgacgtgtacatcaccgataagaccgtgctggacatgcggagcatggacttcaagagcaactccgccgtggcctggtccaacaagtccgatttcgcctgcgccaacgccttcaacaacagcattatccccgaggacacattcttcccaagccccgagagcagctgcgacgtgaagctggtggaaaagagcttcgagacagacaccaacctgaacttccagaacctgagcgtgatcggcttcagaatcctgctgctgaaagtggccggctttaacctgctgatgaccctgcggctgtggtccagc

SEQ ID NO: 10629 - DNA, 1674 bp, Artificial Sequence
  Synthetic Polynucloetide
atggccttaccagtgaccgccttgctcctgccgctggccttgctgctccacgccgccaggccggacatccagatgacacagagccctagcagcctgtctgccagcgtgggagacagagtgaccatcacctgtagagccagccaggacatcagcagctacctgaactggtatcagcagaagcccggcaaggcccctaagctgctgatctactacaccagcagactgcacagcggcgtgcccagcagattttctggctctggcagcggcaccgacttcaccctgacaatatctagcctccagcctgaggacttcgccacctactattgccagcagggcaacaccctgccttacacatttggacagggcaccaaggtggaaatcaagagactcgaggggaaaccaattcccaaccctcttctgggactggattcaaccggcagcggcgaggacctgaagaacgtgttcccacctgaggtggccgtgttcgagcctagcgaggccgagatcagccacacccagaaagccaccctcgtgtgcctggctaccggcttctaccccgaccatgtggaactgtcttggtgggtcaacggcaaagaggtgcacagcggcgtgtgtaccgacccccagccactgaaagaacagcccgccctgaacgacagccggtactgcctgagcagcagactgagagtgtccgccaccttctggcagaacccccggaaccacttcagatgccaggtgcagttctacggcctgagcgagaacgacgagtggacccaggacagagccaagcccgtgacccagatcgtgtctgccgaagcctggggcagagccgattgcggctttaccagcgagagctaccagcagggcgtgctgagcgccaccatcctgtacgagatcctgctgggcaaggccaccctgtacgccgtgctggtgtctgccctggtgctgatggctatggtcaagcggaaggacagccggggaagggccaagcgatctggatctggagcaacaaacttctcactactcaaacaagcaggtgacgtggaggagaatcccgggcctactagaggccatatgaccgagtacaagcccacggtgcgcctcgccacccgcgacgacgtccccagggccgtacgcaccctcgccgccgcgttcgccgactaccccgccacgcgccacaccgtcgatccggaccgccacatcgagcgggtcaccgagctgcaagaactcttcctcacgcgcgtcgggctcgacatcggcaaggtgtgggtcgcggacgacggcgccgcggtggcggtctggaccacgccggagagcgtcgaagcgggggcggtgttcgccgagatcggcccgcgcatggccgagttgagcggttcccggctggccgcgcagcaacagatggaaggcctcctggcgccgcaccggcccaaggagcccgcgtggttcctggccaccgtcggcgtctcgcccgaccaccagggcaagggtctgggcagcgccgtcgtgctccccggagtggaggcggccgagcgcgccggggtgcccgccttcctggagacctccgcgccccgcaacctccccttctacgagcggctcggcttcaccgtcaccgccgacgtcgaggtgcccgaaggaccgcgcacctggtgcatgacccgcaagcccggtgcctga

SEQ ID NO: 10630 - DNA, 984 bp, Artificial Sequence
  Synthetic Polynucloetide
atggccttaccagtgaccgccttgctcctgccgctggccttgctgctccacgccgccaggccggacatccagatgacacagagccctagcagcctgtctgccagcgtgggagacagagtgaccatcacctgtagagccagccaggacatcagcagctacctgaactggtatcagcagaagcccggcaaggcccctaagctgctgatctactacaccagcagactgcacagcggcgtgcccagcagattttctggctctggcagcggcaccgacttcaccctgacaatatctagcctccagcctgaggacttcgccacctactattgccagcagggcaacaccctgccttacacatttggacagggcaccaaggtggaaatcaagagactcgaggggaaaccaattcccaaccctcttctgggactggattcaaccggcagcggcgaggacctgaagaacgtgttcccacctgaggtggccgtgttcgagcctagcgaggccgagatcagccacacccagaaagccaccctcgtgtgcctggctaccggcttctaccccgaccatgtggaactgtcttggtgggtcaacggcaaagaggtgcacagcggcgtgtgtaccgacccccagccactgaaagaacagcccgccctgaacgacagccggtactgcctgagcagcagactgagagtgtccgccaccttctggcagaacccccggaaccacttcagatgccaggtgcagttctacggcctgagcgagaacgacgagtggacccaggacagagccaagcccgtgacccagatcgtgtctgccgaagcctggggcagagccgattgcggctttaccagcgagagctaccagcagggcgtgctgagcgccaccatcctgtacgagatcctgctgggcaaggccaccctgtacgccgtgctggtgtctgccctggtgctgatggctatggtcaagcggaaggacagccggggatga

SEQ ID NO: 10631 - DNA, 1377 bp, Artificial Sequence
  Synthetic Polynucloetide
atggactggatttggcgcatccttttccttgtcggcgctgctaccggcgcgcattccttcgaagaagtgcagctggttgaatcaggtggcggcctggttcaacctggcggatctctgagactgagctgtgccgccagcggcttcaccttcagcgactactttatgagctgggtccgacaggcccctggcaaaggacttgaatgggtcgccaccatcagcaatggcggcacctacacttactaccccgacagcgtgaagggcagattcaccatctccagagacaacagcaagaacaccctgtacctccagatgaactccctgagagccgaggacaccgccgtgtactactgcgccagattcgacggctacatcttcgactattggggccagggcaccctggtcacagtctcttctacgcgtgagcagaaactgatctcggaagaggatgggagcggcatccagaaccctgatcctgccgtgtaccagctgcgggatagcaagagcagcgacaagagcgtgtgtctgttcaccgacttcgacagccagaccaacgtgtcccagagcaaggactccgacgtgtacatcaccgataagtgcgtgctggacatgcggagcatggacttcaagagcaactccgccgtggcctggtccaacaagtccgatttcgcctgcgccaacgccttcaacaacagcattatccccgaggacacattcttcccaagccccgagagcagctgcgacgtgaagctggtggaaaagagcttcgagacagacaccaacctgaacttccagaacctgagcgtgatcggcttcagaatcctgctgctgaaagtggccggctttaacctgctgatgaccctgcggctgtggtccagccgcgccaagagaagcggatctggcgtgaagcagaccctgaatttcgacctgctgaagctggctggcgacgtggaatccaacccaggcccttctagaggccatatggccaagcctttgtctcaagaagaatccaccctcattgaaagagcaacggctacaatcaacagcatccccatctctgaagactacagcgtcgccagcgcagctctctctagcgacggccgcatcttcactggtgtcaatgtatatcattttactgggggaccttgtgcagaactcgtggtgctgggcactgctgctgctgcggcagctggcaacctgacttgtatcgtcgcgatcggaaatgagaacaggggcatcttgagcccctgcggacggtgccgacaggtgcttctcgatctgcatcctgggatcaaagccatagtgaaggacagtgatggacagccgacggcagttgggattcgtgaattgctgccctctggttatgtgtgggagggctga

SEQ ID NO: 10632 - DNA, 879 bp, Artificial Sequence
  Synthetic Polynucloetide
atggactggatttggcgcatccttttccttgtcggcgctgctaccggcgcgcattccttcgaagaagtgcagctggttgaatcaggtggcggcctggttcaacctggcggatctctgagactgagctgtgccgccagcggcttcaccttcagcgactactttatgagctgggtccgacaggcccctggcaaaggacttgaatgggtcgccaccatcagcaatggcggcacctacacttactaccccgacagcgtgaagggcagattcaccatctccagagacaacagcaagaacaccctgtacctccagatgaactccctgagagccgaggacaccgccgtgtactactgcgccagattcgacggctacatcttcgactattggggccagggcaccctggtcacagtctcttctacgcgtgagcagaaactgatctcggaagaggatgggagcggcatccagaaccctgatcctgccgtgtaccagctgcgggatagcaagagcagcgacaagagcgtgtgtctgttcaccgacttcgacagccagaccaacgtgtcccagagcaaggactccgacgtgtacatcaccgataagtgcgtgctggacatgcggagcatggacttcaagagcaactccgccgtggcctggtccaacaagtccgatttcgcctgcgccaacgccttcaacaacagcattatccccgaggacacattcttcccaagccccgagagcagctgcgacgtgaagctggtggaaaagagcttcgagacagacaccaacctgaacttccagaacctgagcgtgatcggcttcagaatcctgctgctgaaagtggccggctttaacctgctgatgaccctgcggctgtggtccagctga

SEQ ID NO: 10633 - DNA, 1920 bp, Artificial Sequence
  Synthetic Polynucloetide
atggccttaccagtgaccgccttgctcctgccgctggccttgctgctccacgccgccaggccggacatccagatgacacagagccctagcagcctgtctgccagcgtgggagacagagtgaccatcacctgtagagccagccaggacatcagcagctacctgaactggtatcagcagaagcccggcaaggcccctaagctgctgatctactacaccagcagactgcacagcggcgtgcccagcagattttctggctctggcagcggcaccgacttcaccctgacaatatctagcctccagcctgaggacttcgccacctactattgccagcagggcaacaccctgccttacacatttggacagggcaccaaggtggaaatcaagagaggcggaggcggaagtggaggcggaggatctggcggcggaggctctgaagtgcagctggttgaatcaggtggcggcctggttcaacctggcggatctctgagactgagctgtgccgccagcggcttcaccttcagcgactactttatgagctgggtccgacaggcccctggcaaaggacttgaatgggtcgccaccatcagcaatggcggcacctacacttactaccccgacagcgtgaagggcagattcaccatctccagagacaacagcaagaacaccctgtacctccagatgaactccctgagagccgaggacaccgccgtgtactactgcgccagattcgacggctacatcttcgactattggggccagggcaccctggtcacagtctcttctacgcgtgggagcggcatccagaaccctgatcctgccgtgtaccagctgcgggatagcaagagcagcgacaagagcgtgtgtctgttcaccgacttcgacagccagaccaacgtgtcccagagcaaggactccgacgtgtacatcaccgataagaccgtgctggacatgcggagcatggacttcaagagcaactccgccgtggcctggtccaacaagtccgatttcgcctgcgccaacgccttcaacaacagcattatccccgaggacacattcttcccaagcagcgacgtgccctgcgacgtgaagctggtggaaaagagcttcgagacagacaccaacctgaacttccagaacctgagcgtgatcggcttcagaatcctgctgctgaaagtggccggctttaacctgctgatgaccctgcggctgtggtccagccgcgccaagagaagcggatctggcgtgaagcagaccctgaatttcgacctgctgaagctggctggcgacgtggaatccaacccaggcccttctagaggccatatgaccgagtacaagcccacggtgcgcctcgccacccgcgacgacgtccccagggccgtacgcaccctcgccgccgcgttcgccgactaccccgccacgcgccacaccgtcgatccggaccgccacatcgagcgggtcaccgagctgcaagaactcttcctcacgcgcgtcgggctcgacatcggcaaggtgtgggtcgcggacgacggcgccgcggtggcggtctggaccacgccggagagcgtcgaagcgggggcggtgttcgccgagatcggcccgcgcatggccgagttgagcggttcccggctggccgcgcagcaacagatggaaggcctcctggcgccgcaccggcccaaggagcccgcgtggttcctggccaccgtcggcgtctcgcccgaccaccagggcaagggtctgggcagcgccgtcgtgctccccggagtggaggcggccgagcgcgccggggtgcccgccttcctggagacctccgcgccccgcaacctccccttctacgagcggctcggcttcaccgtcaccgccgacgtcgaggtgcccgaaggaccgcgcacctggtgcatgacccgcaagcccggtgcctga

SEQ ID NO: 10634 - DNA, 2016 bp, Artificial Sequence
  Synthetic Polynucloetide
atggccttaccagtgaccgccttgctcctgccgctggccttgctgctccacgccgccaggccggacatccagatgacacagagccctagcagcctgtctgccagcgtgggagacagagtgaccatcacctgtagagccagccaggacatcagcagctacctgaactggtatcagcagaagcccggcaaggcccctaagctgctgatctactacaccagcagactgcacagcggcgtgcccagcagattttctggctctggcagcggcaccgacttcaccctgacaatatctagcctccagcctgaggacttcgccacctactattgccagcagggcaacaccctgccttacacatttggacagggcaccaaggtggaaatcaagagaggcggaggcggaagtggaggcggaggatctggcggcggaggctctgaagtgcagctggttgaatcaggtggcggcctggttcaacctggcggatctctgagactgagctgtgccgccagcggcttcaccttcagcgactactttatgagctgggtccgacaggcccctggcaaaggacttgaatgggtcgccaccatcagcaatggcggcacctacacttactaccccgacagcgtgaagggcagattcaccatctccagagacaacagcaagaacaccctgtacctccagatgaactccctgagagccgaggacaccgccgtgtactactgcgccagattcgacggctacatcttcgactattggggccagggcaccctggtcacagtctcttctctcgaggacctgaagaacgtgttcccacctgaggtggccgtgttcgagcctagcaaggccgagatcgcccacacccagaaagccaccctcgtgtgcctggctaccggcttctaccccgaccatgtggaactgtcttggtgggtcaacggcaaagaggtgcacagcggcgtgtctaccgacccccagccactgaaagaacagcccgccctgaacgacagccggtactgcctgagcagcagactgagagtgtccgccaccttctggcagaacccccggaaccacttcagatgccaggtgcagttctacggcctgagcgagaacgacgagtggacccaggacagagccaagcccgtgacccagatcgtgtctgccgaagcctggggcagagccgattgcggcatcaccagcgccagctaccaccagggcgtgctgagcgccaccatcctgtacgagatcctgctgggcaaggccaccctgtacgccgtgctggtgtctgccctggtgctgatggctatggtcaagcggaaggacagccggggaagggccaagcgatctggatctggagcaacaaacttctcactactcaaacaagcaggtgacgtggaggagaatcccgggcctactagaggccatatgaccgagtacaagcccacggtgcgcctcgccacccgcgacgacgtccccagggccgtacgcaccctcgccgccgcgttcgccgactaccccgccacgcgccacaccgtcgatccggaccgccacatcgagcgggtcaccgagctgcaagaactcttcctcacgcgcgtcgggctcgacatcggcaaggtgtgggtcgcggacgacggcgccgcggtggcggtctggaccacgccggagagcgtcgaagcgggggcggtgttcgccgagatcggcccgcgcatggccgagttgagcggttcccggctggccgcgcagcaacagatggaaggcctcctggcgccgcaccggcccaaggagcccgcgtggttcctggccaccgtcggcgtctcgcccgaccaccagggcaagggtctgggcagcgccgtcgtgctccccggagtggaggcggccgagcgcgccggggtgcccgccttcctggagacctccgcgccccgcaacctccccttctacgagcggctcggcttcaccgtcaccgccgacgtcgaggtgcccgaaggaccgcgcacctggtgcatgacccgcaagcccggtgcctga

SEQ ID NO: 10635 - DNA, 2085 bp, Artificial Sequence
  Synthetic Polynucloetide
atggccttaccagtgaccgccttgctcctgccgctggccttgctgctccacgccgccaggccggacatccagatgacacagagccctagcagcctgtctgccagcgtgggagacagagtgaccatcacctgtagagccagccaggacatcagcagctacctgaactggtatcagcagaagcccggcaaggcccctaagctgctgatctactacaccagcagactgcacagcggcgtgcccagcagattttctggctctggcagcggcaccgacttcaccctgacaatatctagcctccagcctgaggacttcgccacctactattgccagcagggcaacaccctgccttacacatttggacagggcaccaaggtggaaatcaagagaggcggaggcggaagtggaggcggaggatctggcggcggaggctctgaagtgcagctggttgaatcaggtggcggcctggttcaacctggcggatctctgagactgagctgtgccgccagcggcttcaccttcagcgactactttatgagctgggtccgacaggcccctggcaaaggacttgaatgggtcgccaccatcagcaatggcggcacctacacttactaccccgacagcgtgaagggcagattcaccatctccagagacaacagcaagaacaccctgtacctccagatgaactccctgagagccgaggacaccgccgtgtactactgcgccagattcgacggctacatcttcgactattggggccagggcaccctggtcacagtctcttctacgcgtgggtctggaggcggaggcagcggcggaggcgggagcggcgacggtaacgaggagatgggaggaatcactcaaaccccttacaaagtctcaatttcaggaacaactgttatccttacatgtccccagtatcctggcagcgagatcctttggcagcataacgacaagaatatagggggagatgaagacgataagaatatcggatctgacgaggatcacttgagcctgaaagagttctccgagcttgaacaaagcggatattatgtgtgctatccgcgcgggtcaaagccggaagacgctaacttttacctttatctccgagccagagtgtgcgaaaattgcatggaaatggacgttatgtccgttgctacaatagttatcgtagatatatgcatcacgggtggactgcttctgctggtttattattggtccaagaatagaaaggccaaagctaaacccgtgaccagaggcgctggcgcaggcggaaggcaaaggggacaaaacaaagaacggccaccaccagtgccaaatccagattatgagcctattcggaaaggacagagggacctgtactctggcctgaatcagagaagaatccgcgccaagagaagcggatctggcgtgaagcagaccctgaatttcgacctgctgaagctggctggcgacgtggaatccaacccaggcccttctagaggccatatgaccgagtacaagcccacggtgcgcctcgccacccgcgacgacgtccccagggccgtacgcaccctcgccgccgcgttcgccgactaccccgccacgcgccacaccgtcgatccggaccgccacatcgagcgggtcaccgagctgcaagaactcttcctcacgcgcgtcgggctcgacatcggcaaggtgtgggtcgcggacgacggcgccgcggtggcggtctggaccacgccggagagcgtcgaagcgggggcggtgttcgccgagatcggcccgcgcatggccgagttgagcggttcccggctggccgcgcagcaacagatggaaggcctcctggcgccgcaccggcccaaggagcccgcgtggttcctggccaccgtcggcgtctcgcccgaccaccagggcaagggtctgggcagcgccgtcgtgctccccggagtggaggcggccgagcgcgccggggtgcccgccttcctggagacctccgcgccccgcaacctccccttctacgagcggctcggcttcaccgtcaccgccgacgtcgaggtgcccgaaggaccgcgcacctggtgcatgacccgcaagcccggtgcctga

SEQ ID NO: 10636 - DNA, 1980 bp, Artificial Sequence
  Synthetic Polynucloetide
atggccttaccagtgaccgccttgctcctgccgctggccttgctgctccacgccgccaggccggacatccagatgacacagagccctagcagcctgtctgccagcgtgggagacagagtgaccatcacctgtagagccagccaggacatcagcagctacctgaactggtatcagcagaagcccggcaaggcccctaagctgctgatctactacaccagcagactgcacagcggcgtgcccagcagattttctggctctggcagcggcaccgacttcaccctgacaatatctagcctccagcctgaggacttcgccacctactattgccagcagggcaacaccctgccttacacatttggacagggcaccaaggtggaaatcaagagaggcggaggcggaagtggaggcggaggatctggcggcggaggctctgaagtgcagctggttgaatcaggtggcggcctggttcaacctggcggatctctgagactgagctgtgccgccagcggcttcaccttcagcgactactttatgagctgggtccgacaggcccctggcaaaggacttgaatgggtcgccaccatcagcaatggcggcacctacacttactaccccgacagcgtgaagggcagattcaccatctccagagacaacagcaagaacaccctgtacctccagatgaactccctgagagccgaggacaccgccgtgtactactgcgccagattcgacggctacatcttcgactattggggccagggcaccctggtcacagtctcttctacgcgtgggtctggaggcggaggcagcggcggaggcgggagcggcttcaagatccccatcgaggaactggaagatcgggtgttcgtgaactgcaacacctctatcacctgggtggaaggcaccgtgggaacactgctgagcgacatcaccagactggacctcggcaagcggattctggaccctcggggcatctacagatgcaacggcaccgacatctacaaggacaaagaaagcaccgtgcaggtccactacagaatgtgccagtcctgcgtggaactggaccctgctacagtggccggcatcatcgtgaccgatgtgatcgctactctgctgctggctctgggagtgttctgcttcgccggacacgaaacaggcagactgtctggcgctgccgatacacaggccctgctgagaaacgaccaagtgtatcagcccctgcgcgacagagatgatgcccagtattctcacctcggcggcaactgggctagaaacaagcgcgccaagagaagcggatctggcgtgaagcagaccctgaatttcgacctgctgaagctggctggcgacgtggaatccaacccaggcccttctagaggccatatgaccgagtacaagcccacggtgcgcctcgccacccgcgacgacgtccccagggccgtacgcaccctcgccgccgcgttcgccgactaccccgccacgcgccacaccgtcgatccggaccgccacatcgagcgggtcaccgagctgcaagaactcttcctcacgcgcgtcgggctcgacatcggcaaggtgtgggtcgcggacgacggcgccgcggtggcggtctggaccacgccggagagcgtcgaagcgggggcggtgttcgccgagatcggcccgcgcatggccgagttgagcggttcccggctggccgcgcagcaacagatggaaggcctcctggcgccgcaccggcccaaggagcccgcgtggttcctggccaccgtcggcgtctcgcccgaccaccagggcaagggtctgggcagcgccgtcgtgctccccggagtggaggcggccgagcgcgccggggtgcccgccttcctggagacctccgcgccccgcaacctccccttctacgagcggctcggcttcaccgtcaccgccgacgtcgaggtgcccgaaggaccgcgcacctggtgcatgacccgcaagcccggtgcctga

SEQ ID NO: 10637 - DNA, 2010 bp, Artificial Sequence
  Synthetic Polynucloetide
atggccttaccagtgaccgccttgctcctgccgctggccttgctgctccacgccgccaggccggacatccagatgacacagagccctagcagcctgtctgccagcgtgggagacagagtgaccatcacctgtagagccagccaggacatcagcagctacctgaactggtatcagcagaagcccggcaaggcccctaagctgctgatctactacaccagcagactgcacagcggcgtgcccagcagattttctggctctggcagcggcaccgacttcaccctgacaatatctagcctccagcctgaggacttcgccacctactattgccagcagggcaacaccctgccttacacatttggacagggcaccaaggtggaaatcaagagaggcggaggcggaagtggaggcggaggatctggcggcggaggctctgaagtgcagctggttgaatcaggtggcggcctggttcaacctggcggatctctgagactgagctgtgccgccagcggcttcaccttcagcgactactttatgagctgggtccgacaggcccctggcaaaggacttgaatgggtcgccaccatcagcaatggcggcacctacacttactaccccgacagcgtgaagggcagattcaccatctccagagacaacagcaagaacaccctgtacctccagatgaactccctgagagccgaggacaccgccgtgtactactgcgccagattcgacggctacatcttcgactattggggccagggcaccctggtcacagtctcttctacgcgtgggtctggaggcggaggcagcggcggaggcgggagcggccagagcatcaagggcaaccacctggtcaaggtgtacgactaccaagaggacggcagcgtgctgctgacatgtgatgccgaggccaagaacatcacctggtttaaggacggcaagatgatcggcttcctgaccgaggacaagaagaagtggaacctgggcagcaacgctaaggaccccagaggcatgtatcagtgcaagggcagccagaacaagagcaagcccctccaggtgtactaccggatgtgccagaactgcatcgagctgaacgccgctaccatcagcggctttctgttcgccgagatcgtgtccatcttcgtgctggccgtgggcgtgtactttatcgctggacaggatggcgtgcggcagagcagagcttccgataagcaaaccctgctgcctaacgaccagctgtaccagcctctgaaggacagagaggacgaccagtacagccacctccagggcaatcagctgagaagaaaccgcgccaagagaagcggatctggcgtgaagcagaccctgaatttcgacctgctgaagctggctggcgacgtggaatccaacccaggcccttctagaggccatatgaccgagtacaagcccacggtgcgcctcgccacccgcgacgacgtccccagggccgtacgcaccctcgccgccgcgttcgccgactaccccgccacgcgccacaccgtcgatccggaccgccacatcgagcgggtcaccgagctgcaagaactcttcctcacgcgcgtcgggctcgacatcggcaaggtgtgggtcgcggacgacggcgccgcggtggcggtctggaccacgccggagagcgtcgaagcgggggcggtgttcgccgagatcggcccgcgcatggccgagttgagcggttcccggctggccgcgcagcaacagatggaaggcctcctggcgccgcaccggcccaaggagcccgcgtggttcctggccaccgtcggcgtctcgcccgaccaccagggcaagggtctgggcagcgccgtcgtgctccccggagtggaggcggccgagcgcgccggggtgcccgccttcctggagacctccgcgccccgcaacctccccttctacgagcggctcggcttcaccgtcaccgccgacgtcgaggtgcccgaaggaccgcgcacctggtgcatgacccgcaagcccggtgcctga

SEQ ID NO: 10638 - DNA, 1959 bp, Artificial Sequence
  Synthetic Polynucloetide
atggccttaccagtgaccgccttgctcctgccgctggccttgctgctccacgccgccaggccggacatccagatgacacagagccctagcagcctgtctgccagcgtgggagacagagtgaccatcacctgtagagccagccaggacatcagcagctacctgaactggtatcagcagaagcccggcaaggcccctaagctgctgatctactacaccagcagactgcacagcggcgtgcccagcagattttctggctctggcagcggcaccgacttcaccctgacaatatctagcctccagcctgaggacttcgccacctactattgccagcagggcaacaccctgccttacacatttggacagggcaccaaggtggaaatcaagagaggcggaggcggaagtggaggcggaggatctggcggcggaggctctgaagtgcagctggttgaatcaggtggcggcctggttcaacctggcggatctctgagactgagctgtgccgccagcggcttcaccttcagcgactactttatgagctgggtccgacaggcccctggcaaaggacttgaatgggtcgccaccatcagcaatggcggcacctacacttactaccccgacagcgtgaagggcagattcaccatctccagagacaacagcaagaacaccctgtacctccagatgaactccctgagagccgaggacaccgccgtgtactactgcgccagattcgacggctacatcttcgactattggggccagggcaccctggtcacagtctcttctacgcgtgggtctggaggcggaggcagcggcggaggcgggagcggccagagttttgggttgttggaccctaaattgtgctatctgttggacggaatcctgttcatttacggagtgatcctgaccgcattgttcctgcgggttaagttttccagatccgcagacgcacccgcttaccaacaagggcagaaccaactctacaatgaacttaatttggggcggagggaagagtacgacgttctggacaaaaggaggggacgagatcccgagatgggcggaaagcctcagcgaaggaagaatccgcaagaggggctttataacgaactccagaaagataaaatggcagaagcctatagtgagattgggatgaagggagaaaggaggaggggtaaaggtcacgatgggttgtaccaaggattgagcacagccactaaagatacctatgatgcgctccacatgcaggccctgccgccaagacgcgccaagagaagcggatctggcgtgaagcagaccctgaatttcgacctgctgaagctggctggcgacgtggaatccaacccaggcccttctagaggccatatgaccgagtacaagcccacggtgcgcctcgccacccgcgacgacgtccccagggccgtacgcaccctcgccgccgcgttcgccgactaccccgccacgcgccacaccgtcgatccggaccgccacatcgagcgggtcaccgagctgcaagaactcttcctcacgcgcgtcgggctcgacatcggcaaggtgtgggtcgcggacgacggcgccgcggtggcggtctggaccacgccggagagcgtcgaagcgggggcggtgttcgccgagatcggcccgcgcatggccgagttgagcggttcccggctggccgcgcagcaacagatggaaggcctcctggcgccgcaccggcccaaggagcccgcgtggttcctggccaccgtcggcgtctcgcccgaccaccagggcaagggtctgggcagcgccgtcgtgctccccggagtggaggcggccgagcgcgccggggtgcccgccttcctggagacctccgcgccccgcaacctccccttctacgagcggctcggcttcaccgtcaccgccgacgtcgaggtgcccgaaggaccgcgcacctggtgcatgacccgcaagcccggtgcctga

SEQ ID NO: 10639 - DNA, 2259 bp, Artificial Sequence
  Synthetic Polynucloetide
atggccttaccagtgaccgccttgctcctgccgctggccttgctgctccacgccgccaggccggaagtgcagctggttgaatctggcggaggactggttcagcctggcggatctctgagactgtcttgtgccgccagcggcttcagcttcagcgacttttggatgagctgggtccgacaggcccctggcaaaggacttgaatgggtcgccacaatcagccaggccggcagcgagaaggactacgtggactctgtgaagggcagattcaccatcagccgggacaacgccaagaagtccctgtacctccagatgaacagcctgagagccgaggacaccgccgtgtactattgtgcctctggcgtgtacagcttcgactacagaggccagggcaccctggtcacagtctcttctggtaccggcggaggcggatctggcggcggaggtagcggtggcggaggatctgaattcgacatccagatgacacagagccctagcagcctgtctgccagcgtgggagacagagtgaccatcacctgtagagccagccaggacatcagcagctacctgaactggtatcagcagaagcccggcaaggcccctaagctgctgatctactacaccagcagactgcacagcggcgtgcccagcagattttctggctctggcagcggcaccgacttcaccctgacaatatctagcctccagcctgaggacttcgccacctactattgccagcagggcaacaccctgccttacacatttggacagggcaccaaggtggaaatcaagagactcgaggacctgaagaacgtgttcccacctgaggtggccgtgttcgagcctagcgaggccgagatcagccacacccagaaagccaccctcgtgtgcctggctaccggcttctaccccgaccatgtggaactgtcttggtgggtcaacggcaaagaggtgcacagcggcgtgtgtaccgacccccagccactgaaagaacagcccgccctgaacgacagccggtactgcctgagcagcagactgagagtgtccgccaccttctggcagaacccccggaaccacttcagatgccaggtgcagttctacggcctgagcgagaacgacgagtggacccaggacagagccaagcccgtgacccagatcgtgtctgccgaagcctggggcagagccgattgcggctttaccagcgagagctaccagcagggcgtgctgagcgccaccatcctgtacgagatcctgctgggcaaggccaccctgtacgccgtgctggtgtctgccctggtgctgatggctatggtcaagcggaaggacagccggggaagggccaagcgatctggatctggagcaacaaacttctcactactcaaacaagcaggtgacgtggaggagaatcccgggcctactagtatggactggatttggcgcatccttttccttgtcggcgctgctaccggcgcgcattccttcgaagaagtgcagctggttgaatcaggtggcggcctggttcaacctggcggatctctgagactgagctgtgccgccagcggcttcaccttcagcgactactttatgagctgggtccgacaggcccctggcaaaggacttgaatgggtcgccaccatcagcaatggcggcacctacacttactaccccgacagcgtgaagggcagattcaccatctccagagacaacagcaagaacaccctgtacctccagatgaactccctgagagccgaggacaccgccgtgtactactgcgccagattcgacggctacatcttcgactattggggccagggcaccctggtcacagtctcttctacgcgtatccagaaccctgatcctgccgtgtaccagctgcgggatagcaagagcagcgacaagagcgtgtgtctgttcaccgacttcgacagccagaccaacgtgtcccagagcaaggactccgacgtgtacatcaccgataagtgcgtgctggacatgcggagcatggacttcaagagcaactccgccgtggcctggtccaacaagtccgatttcgcctgcgccaacgccttcaacaacagcattatccccgaggacacattcttcccaagccccgagagcagctgcgacgtgaagctggtggaaaagagcttcgagacagacaccaacctgaacttccagaacctgagcgtgatcggcttcagaatcctgctgctgaaagtggccggctttaacctgctgatgaccctgcggctgtggtccagc

SEQ ID NO: 10640 - DNA, 2271 bp, Artificial Sequence
  Synthetic Polynucloetide
atggccttaccagtgaccgccttgctcctgccgctggccttgctgctccacgccgccaggccggaagtgcagctggttgaatctggcggaggactggttcagcctggcggatctctgagactgtcttgtgccgccagcggcttcagcttcagcgacttttggatgagctgggtccgacaggcccctggcaaaggacttgaatgggtcgccacaatcagccaggccggcagcgagaaggactacgtggactctgtgaagggcagattcaccatcagccgggacaacgccaagaagtccctgtacctccagatgaacagcctgagagccgaggacaccgccgtgtactattgtgcctctggcgtgtacagcttcgactacagaggccagggcaccctggtcacagtctcttctggtaccggcggaggcggatctggcggcggaggtagcggtggcggaggatctgaattcgacatccagatgacacagagccctagcagcctgtctgccagcgtgggagacagagtgaccatcacctgtagagccagccaggacatcagcagctacctgaactggtatcagcagaagcccggcaaggcccctaagctgctgatctactacaccagcagactgcacagcggcgtgcccagcagattttctggctctggcagcggcaccgacttcaccctgacaatatctagcctccagcctgaggacttcgccacctactattgccagcagggcaacaccctgccttacacatttggacagggcaccaaggtggaaatcaagagactcgagatccagaaccctgatcctgccgtgtaccagctgcgggatagcaagagcagcgacaagagcgtgtgtctgttcaccgacttcgacagccagaccaacgtgtcccagagcaaggactccgacgtgtacatcaccgataagtgcgtgctggacatgcggagcatggacttcaagagcaactccgccgtggcctggtccaacaagtccgatttcgcctgcgccaacgccttcaacaacagcattatccccgaggacacattcttcccaagccccgagagcagctgcgacgtgaagctggtggaaaagagcttcgagacagacaccaacctgaacttccagaacctgagcgtgatcggcttcagaatcctgctgctgaaagtggccggctttaacctgctgatgaccctgcggctgtggtccagccgcgccaagagaagcggatctggcgtgaagcagaccctgaatttcgacctgctgaagctggctggcgacgtggaatccaacccaggccctactagtatggactggatttggcgcatccttttccttgtcggcgctgctaccggcgcgcattccttcgaagaagtgcagctggttgaatcaggtggcggcctggttcaacctggcggatctctgagactgagctgtgccgccagcggcttcaccttcagcgactactttatgagctgggtccgacaggcccctggcaaaggacttgaatgggtcgccaccatcagcaatggcggcacctacacttactaccccgacagcgtgaagggcagattcaccatctccagagacaacagcaagaacaccctgtacctccagatgaactccctgagagccgaggacaccgccgtgtactactgcgccagattcgacggctacatcttcgactattggggccagggcaccctggtcacagtctcttctacgcgtgaggacctgaagaacgtgttcccacctgaggtggccgtgttcgagcctagcgaggccgagatcagccacacccagaaagccaccctcgtgtgcctggctaccggcttctaccccgaccatgtggaactgtcttggtgggtcaacggcaaagaggtgcacagcggcgtgtgtaccgacccccagccactgaaagaacagcccgccctgaacgacagccggtactgcctgagcagcagactgagagtgtccgccaccttctggcagaacccccggaaccacttcagatgccaggtgcagttctacggcctgagcgagaacgacgagtggacccaggacagagccaagcccgtgacccagatcgtgtctgccgaagcctggggcagagccgattgcggctttaccagcgagagctaccagcagggcgtgctgagcgccaccatcctgtacgagatcctgctgggcaaggccaccctgtacgccgtgctggtgtctgccctggtgctgatggctatggtcaagcggaaggacagccgggga

SEQ ID NO: 10641 - DNA, 2847 bp, Artificial Sequence
  Synthetic Polynucloetide
atggccttaccagtgaccgccttgctcctgccgctggccttgctgctccacgccgccaggccggaagtgcagctggttgaatctggcggaggactggttcagcctggcggatctctgagactgtcttgtgccgccagcggcttcagcttcagcgacttttggatgagctgggtccgacaggcccctggcaaaggacttgaatgggtcgccacaatcagccaggccggcagcgagaaggactacgtggactctgtgaagggcagattcaccatcagccgggacaacgccaagaagtccctgtacctccagatgaacagcctgagagccgaggacaccgccgtgtactattgtgcctctggcgtgtacagcttcgactacagaggccagggcaccctggtcacagtctcttctggtaccggcggaggcggatctggcggcggaggtagcggtggcggaggatctgaattcgacatccagatgacacagagccctagcagcctgtctgccagcgtgggagacagagtgaccatcacctgtagagccagccaggacatcagcagctacctgaactggtatcagcagaagcccggcaaggcccctaagctgctgatctactacaccagcagactgcacagcggcgtgcccagcagattttctggctctggcagcggcaccgacttcaccctgacaatatctagcctccagcctgaggacttcgccacctactattgccagcagggcaacaccctgccttacacatttggacagggcaccaaggtggaaatcaagagactcgaggacctgaagaacgtgttcccacctgaggtggccgtgttcgagcctagcgaggccgagatcagccacacccagaaagccaccctcgtgtgcctggctaccggcttctaccccgaccatgtggaactgtcttggtgggtcaacggcaaagaggtgcacagcggcgtgtctaccgacccccagccactgaaagaacagcccgccctgaacgacagccggtactgcctgagcagcagactgagagtgtccgccaccttctggcagaacccccggaaccacttcagatgccaggtgcagttctacggcctgagcgagaacgacgagtggacccaggacagagccaagcccgtgacccagatcgtgtctgccgaagcctggggcagagccgattgcggatcccagagcttcggcctgctggaccccaagctgtgctacctgctggatggcatcctgttcatctacggcgtgatcctgaccgccctgttcctgagagtgaagttcagcagaagcgccgacgcccctgcctaccagcagggacagaaccaactgtacaacgagctgaacctgggcagacgggaagagtacgacgtgctggacaagcggagaggcagggaccctgagatgggcggaaagccccagcggagaaagaacccccaggaaggactgtataacgaactccagaaagacaagatggccgaagcctacagcgagatcggcatgaagggcgagcggagaagaggcaagggccacgatggcctgtaccagggcctgagcaccgccaccaaggacacctatgacgccctgcacatgcaggccctgcctccaagaagggccaagcgatctggatctggagcaacaaacttctcactactcaaacaagcaggtgacgtggaggagaatcccgggcctactagtatggactggatttggcgcatccttttccttgtcggcgctgctaccggcgcgcattccttcgaagaagtgcagctggttgaatcaggtggcggcctggttcaacctggcggatctctgagactgagctgtgccgccagcggcttcaccttcagcgactactttatgagctgggtccgacaggcccctggcaaaggacttgaatgggtcgccaccatcagcaatggcggcacctacacttactaccccgacagcgtgaagggcagattcaccatctccagagacaacagcaagaacaccctgtacctccagatgaactccctgagagccgaggacaccgccgtgtactactgcgccagattcgacggctacatcttcgactattggggccagggcaccctggtcacagtctcttctacgcgtatccagaaccctgatcctgccgtgtaccagctgcgggatagcaagagcagcgacaagagcgtgtgtctgttcaccgacttcgacagccagaccaacgtgtcccagagcaaggactccgacgtgtacatcaccgataagaccgtgctggacatgcggagcatggacttcaagagcaactccgccgtggcctggtccaacaagtccgatttcgcctgcgccaacgccttcaacaacagcattatccccgaggacacattcttcccaagccccgagagcagctgcggtacccagagttttgggttgttggaccctaaattgtgctatctgttggacggaatcctgttcatttacggagtgatcctgaccgcattgttcctgcgggttaagttttccagatccgcagacgcacccgcttaccaacaagggcagaaccaactctacaatgaacttaatttggggcggagggaagagtacgacgttctggacaaaaggaggggacgagatcccgagatgggcggaaagcctcagcgaaggaagaatccgcaagaggggctttataacgaactccagaaagataaaatggcagaagcctatagtgagattgggatgaagggagaaaggaggaggggtaaaggtcacgatgggttgtaccaaggattgagcacagccactaaagatacctatgatgcgctccacatgcaggccctgccgccaaga

SEQ ID NO: 10642 - DNA, 2337 bp, Artificial Sequence
  Synthetic Polynucloetide
atggccttaccagtgaccgccttgctcctgccgctggccttgctgctccacgccgccaggccggaagtgcagctggttgaatctggcggaggactggttcagcctggcggatctctgagactgtcttgtgccgccagcggcttcagcttcagcgacttttggatgagctgggtccgacaggcccctggcaaaggacttgaatgggtcgccacaatcagccaggccggcagcgagaaggactacgtggactctgtgaagggcagattcaccatcagccgggacaacgccaagaagtccctgtacctccagatgaacagcctgagagccgaggacaccgccgtgtactattgtgcctctggcgtgtacagcttcgactacagaggccagggcaccctggtcacagtctcttctggtaccggcggaggcggatctggcggcggaggtagcggtggcggaggatctgaattcgacatccagatgacacagagccctagcagcctgtctgccagcgtgggagacagagtgaccatcacctgtagagccagccaggacatcagcagctacctgaactggtatcagcagaagcccggcaaggcccctaagctgctgatctactacaccagcagactgcacagcggcgtgcccagcagattttctggctctggcagcggcaccgacttcaccctgacaatatctagcctccagcctgaggacttcgccacctactattgccagcagggcaacaccctgccttacacatttggacagggcaccaaggtggaaatcaagagactcgagggacagcctaaggccaatcctaccgtgacactgttccctccaagcagcgaagaactccaggccaacaaggccacacttgtgtgcctgatctccgacttctaccctggggctgtgacagtggcttggaaggccgatggatctcctgtgaaagccggcgtggaaaccaccaagccatccaagcagagcaacaacaaatacgccgccagctcctacctgagcctgacacctgagcagtggaagtcccacagatcctacagctgccaagtgacccacgaaggcagcaccgtggaaaagacagtggcccctacagagtgcagccccatcaagaccgatgtgattacaatggaccccaaggacaactgctccaaggacgccaacgataccctgctgctccagctgaccaacaccagcgcctactacatgtacttgttgctgctgctgaagtccgtggtgtacttcgccatcatcacatgctgcctgctgcggagaaccgccttctgctgcaacggcgagaagtctagggccaagcgatctggatctggagcaacaaacttctcactactcaaacaagcaggtgacgtggaggagaatcccgggcctactagtatggactggatttggcgcatccttttccttgtcggcgctgctaccggcgcgcattccttcgaagaagtgcagctggttgaatcaggtggcggcctggttcaacctggcggatctctgagactgagctgtgccgccagcggcttcaccttcagcgactactttatgagctgggtccgacaggcccctggcaaaggacttgaatgggtcgccaccatcagcaatggcggcacctacacttactaccccgacagcgtgaagggcagattcaccatctccagagacaacagcaagaacaccctgtacctccagatgaactccctgagagccgaggacaccgccgtgtactactgcgccagattcgacggctacatcttcgactattggggccagggcaccctggtcacagtctcttctacgcgtgcctctacaaagggaccctccgtgtttcctctggctcccagcagcaagtctacaagcggaggaacagccgctctgggctgcctggtcaaggattactttcccgagcctgtgaccgtgtcctggaatagcggagcactgacaagcggcgtgcacacctttccagccgtgctgcaaagcagcggcctgtactctctgagcagcgtggtcacagtgcctagctctagcctgggcacccagacctacatctgcaatgtgaaccacaagcctagcaacaccaaggtggacaagagagtggaacccaagagctgtgaagtgaaaaccgactccaccgaccacgtgaagcccaaagagacagagaacaccaagcagcccagcaagagctgccacaagcccaaggccatcgtgcacaccgagaaagtgaacatgatgagcctgaccgtgctgggcctgcggatgctgttcgccaaaaccgtggccgtgaacttcctgctgaccgccaagctgttcttcctc

SEQ ID NO: 10643 - DNA, 2280 bp, Artificial Sequence
  Synthetic Polynucloetide
atggccttaccagtgaccgccttgctcctgccgctggccttgctgctccacgccgccaggccggaagtgcagctggttgaatctggcggaggactggttcagcctggcggatctctgagactgtcttgtgccgccagcggcttcagcttcagcgacttttggatgagctgggtccgacaggcccctggcaaaggacttgaatgggtcgccacaatcagccaggccggcagcgagaaggactacgtggactctgtgaagggcagattcaccatcagccgggacaacgccaagaagtccctgtacctccagatgaacagcctgagagccgaggacaccgccgtgtactattgtgcctctggcgtgtacagcttcgactacagaggccagggcaccctggtcacagtctcttctggtaccggcggaggcggatctggcggcggaggtagcggtggcggaggatctgaattcgacatccagatgacacagagccctagcagcctgtctgccagcgtgggagacagagtgaccatcacctgtagagccagccaggacatcagcagctacctgaactggtatcagcagaagcccggcaaggcccctaagctgctgatctactacaccagcagactgcacagcggcgtgcccagcagattttctggctctggcagcggcaccgacttcaccctgacaatatctagcctccagcctgaggacttcgccacctactattgccagcagggcaacaccctgccttacacatttggacagggcaccaaggtggaaatcaagagactcgagggacagcctaaggccaatcctaccgtgacactgttccctccaagcagcgaagaactccaggccaacaaggccacacttgtgtgcctgatctccgacttctaccctggggctgtgacagtggcttggaaggccgatggatctcctgtgaaagccggcgtggaaaccaccaagccatccaagcagagcaacaacaaatacgccgccagctcctacctgagcctgacacctgagcagtggaagtcccacagatcctacagctgccaagtgacccacgaaggcagcaccgtggaaaagacagtggcccctacagagtgcagcggcagagccgattgcggctttaccagcgagagctaccagcagggcgtgctgagcgccaccatcctgtacgagatcctgctgggcaaggccaccctgtacgccgtgctggtgtctgccctggtgctgatggctatggtcaagcggaaggacagccggggacgcgccaagagaagcggatctggcgtgaagcagaccctgaatttcgacctgctgaagctggctggcgacgtggaatccaacccaggccctactagtatggactggatttggcgcatccttttccttgtcggcgctgctaccggcgcgcattccttcgaagaagtgcagctggttgaatcaggtggcggcctggttcaacctggcggatctctgagactgagctgtgccgccagcggcttcaccttcagcgactactttatgagctgggtccgacaggcccctggcaaaggacttgaatgggtcgccaccatcagcaatggcggcacctacacttactaccccgacagcgtgaagggcagattcaccatctccagagacaacagcaagaacaccctgtacctccagatgaactccctgagagccgaggacaccgccgtgtactactgcgccagattcgacggctacatcttcgactattggggccagggcaccctggtcacagtctcttctacgcgtgcctctacaaagggaccctccgtgtttcctctggctcccagcagcaagtctacaagcggaggaacagccgctctgggctgcctggtcaaggattactttcccgagcctgtgaccgtgtcctggaatagcggagcactgacaagcggcgtgcacacctttccagccgtgctgcaaagcagcggcctgtactctctgagcagcgtggtcacagtgcctagctctagcctgggcacccagacctacatctgcaatgtgaaccacaagcctagcaacaccaaggtggacaagagagtggaacccaagagctgtatccccgaggacacattcttcccaagccccgagagcagctgcgacgtgaagctggtggaaaagagcttcgagacagacaccaacctgaacttccagaacctgagcgtgatcggcttcagaatcctgctgctgaaagtggccggctttaacctgctgatgaccctgcggctgtggtccagc

SEQ ID NO: 10644 - DNA, 2682 bp, Artificial Sequence
  Synthetic Polynucloetide
atggccttaccagtgaccgccttgctcctgccgctggccttgctgctccacgccgccaggccggaagtgcagctggttgaatctggcggaggactggttcagcctggcggatctctgagactgtcttgtgccgccagcggcttcagcttcagcgacttttggatgagctgggtccgacaggcccctggcaaaggacttgaatgggtcgccacaatcagccaggccggcagcgagaaggactacgtggactctgtgaagggcagattcaccatcagccgggacaacgccaagaagtccctgtacctccagatgaacagcctgagagccgaggacaccgccgtgtactattgtgcctctggcgtgtacagcttcgactacagaggccagggcaccctggtcacagtctcttctggtaccggcggaggcggatctggcggcggaggtagcggtggcggaggatctgaattcgacatccagatgacacagagccctagcagcctgtctgccagcgtgggagacagagtgaccatcacctgtagagccagccaggacatcagcagctacctgaactggtatcagcagaagcccggcaaggcccctaagctgctgatctactacaccagcagactgcacagcggcgtgcccagcagattttctggctctggcagcggcaccgacttcaccctgacaatatctagcctccagcctgaggacttcgccacctactattgccagcagggcaacaccctgccttacacatttggacagggcaccaaggtggaaatcaagagactcgagatccagaaccctgatcctgccgtgtaccagctgcgggatagcaagagcagcgacaagagcgtgtgtctgttcaccgacttcgacagccagaccaacgtgtcccagagcaaggactccgacgtgtacatcaccgataagtgcgtgctggacatgcggagcatggacttcaagagcaactccgccgtggcctggtccaacaagtccgatttcgcctgcgccaacgccttcaacaacagcattatccccgaggacacattcttcccaagccccgagagcagctgcgacgtgaagctggtggaaaagagcttcgagacagacaccaacctgaacttccagaacctgagcgtgatcggcttcagaatcctgctgctgaaagtggccggctttaacctgctgatgaccctgcggctgtggtccagccgcgccaagagaagcggatctggcgtgaagcagaccctgaatttcgacctgctgaagctggctggcgacgtggaatccaacccaggccctactagtatggactggatttggcgcatccttttccttgtcggcgctgctaccggcgcgcattccgggccccagctccagctgcaagagtctggacctggcctggtcaagcctagcgagacactgagcctgacctgtaccgtgtccggcgatagcatcagcagcggcgattactactggggctggatcagacagcctcctggcaaaggactggaatggatcggccacatctactacagcggcgtgacctactacaaccccagcctgaagtccagagtgaccatcagcgtggacaccagccggaaccagttctccctgaagctgtctagcgtgacagccgccgataccgccgtgtactactgcaccagagaggacagcagcaactggcggagtagaggccagggaacactggtcacagttagctctggatccggcggaggcggaagtggaggcggaggatctggcggcggaggctctttcgaagaagtgcagctggttgaatcaggtggcggcctggttcaacctggcggatctctgagactgagctgtgccgccagcggcttcaccttcagcgactactttatgagctgggtccgacaggcccctggcaaaggacttgaatgggtcgccaccatcagcaatggcggcacctacacttactaccccgacagcgtgaagggcagattcaccatctccagagacaacagcaagaacaccctgtacctccagatgaactccctgagagccgaggacaccgccgtgtactactgcgccagattcgacggctacatcttcgactattggggccagggcaccctggtcacagtctcttctacgcgtgaggacctgaagaacgtgttcccacctgaggtggccgtgttcgagcctagcgaggccgagatcagccacacccagaaagccaccctcgtgtgcctggctaccggcttctaccccgaccatgtggaactgtcttggtgggtcaacggcaaagaggtgcacagcggcgtgtgtaccgacccccagccactgaaagaacagcccgccctgaacgacagccggtactgcctgagcagcagactgagagtgtccgccaccttctggcagaacccccggaaccacttcagatgccaggtgcagttctacggcctgagcgagaacgacgagtggacccaggacagagccaagcccgtgacccagatcgtgtctgccgaagcctggggcagagccgattgcggctttaccagcgagagctaccagcagggcgtgctgagcgccaccatcctgtacgagatcctgctgggcaaggccaccctgtacgccgtgctggtgtctgccctggtgctgatggctatggtcaagcggaaggacagccgggga

SEQ ID NO: 10645 - DNA, 3258 bp, Artificial Sequence
  Synthetic Polynucloetide
atggccttaccagtgaccgccttgctcctgccgctggccttgctgctccacgccgccaggccggaagtgcagctggttgaatctggcggaggactggttcagcctggcggatctctgagactgtcttgtgccgccagcggcttcagcttcagcgacttttggatgagctgggtccgacaggcccctggcaaaggacttgaatgggtcgccacaatcagccaggccggcagcgagaaggactacgtggactctgtgaagggcagattcaccatcagccgggacaacgccaagaagtccctgtacctccagatgaacagcctgagagccgaggacaccgccgtgtactattgtgcctctggcgtgtacagcttcgactacagaggccagggcaccctggtcacagtctcttctggtaccggcggaggcggatctggcggcggaggtagcggtggcggaggatctgaattcgacatccagatgacacagagccctagcagcctgtctgccagcgtgggagacagagtgaccatcacctgtagagccagccaggacatcagcagctacctgaactggtatcagcagaagcccggcaaggcccctaagctgctgatctactacaccagcagactgcacagcggcgtgcccagcagattttctggctctggcagcggcaccgacttcaccctgacaatatctagcctccagcctgaggacttcgccacctactattgccagcagggcaacaccctgccttacacatttggacagggcaccaaggtggaaatcaagagactcgaggacctgaagaacgtgttcccacctgaggtggccgtgttcgagcctagcgaggccgagatcagccacacccagaaagccaccctcgtgtgcctggctaccggcttctaccccgaccatgtggaactgtcttggtgggtcaacggcaaagaggtgcacagcggcgtgtctaccgacccccagccactgaaagaacagcccgccctgaacgacagccggtactgcctgagcagcagactgagagtgtccgccaccttctggcagaacccccggaaccacttcagatgccaggtgcagttctacggcctgagcgagaacgacgagtggacccaggacagagccaagcccgtgacccagatcgtgtctgccgaagcctggggcagagccgattgcggatcccagagcttcggcctgctggaccccaagctgtgctacctgctggatggcatcctgttcatctacggcgtgatcctgaccgccctgttcctgagagtgaagttcagcagaagcgccgacgcccctgcctaccagcagggacagaaccaactgtacaacgagctgaacctgggcagacgggaagagtacgacgtgctggacaagcggagaggcagggaccctgagatgggcggaaagccccagcggagaaagaacccccaggaaggactgtataacgaactccagaaagacaagatggccgaagcctacagcgagatcggcatgaagggcgagcggagaagaggcaagggccacgatggcctgtaccagggcctgagcaccgccaccaaggacacctatgacgccctgcacatgcaggccctgcctccaagaagggccaagcgatctggatctggagcaacaaacttctcactactcaaacaagcaggtgacgtggaggagaatcccgggcctactagtatggactggatttggcgcatccttttccttgtcggcgctgctaccggcgcgcattccgggccccagctccagctgcaagagtctggacctggcctggtcaagcctagcgagacactgagcctgacctgtaccgtgtccggcgatagcatcagcagcggcgattactactggggctggatcagacagcctcctggcaaaggactggaatggatcggccacatctactacagcggcgtgacctactacaaccccagcctgaagtccagagtgaccatcagcgtggacaccagccggaaccagttctccctgaagctgtctagcgtgacagccgccgataccgccgtgtactactgcaccagagaggacagcagcaactggcggagtagaggccagggaacactggtcacagttagctctggatccggcggaggcggaagtggaggcggaggatctggcggcggaggctctttcgaagaagtgcagctggttgaatcaggtggcggcctggttcaacctggcggatctctgagactgagctgtgccgccagcggcttcaccttcagcgactactttatgagctgggtccgacaggcccctggcaaaggacttgaatgggtcgccaccatcagcaatggcggcacctacacttactaccccgacagcgtgaagggcagattcaccatctccagagacaacagcaagaacaccctgtacctccagatgaactccctgagagccgaggacaccgccgtgtactactgcgccagattcgacggctacatcttcgactattggggccagggcaccctggtcacagtctcttctacgcgtatccagaaccctgatcctgccgtgtaccagctgcgggatagcaagagcagcgacaagagcgtgtgtctgttcaccgacttcgacagccagaccaacgtgtcccagagcaaggactccgacgtgtacatcaccgataagaccgtgctggacatgcggagcatggacttcaagagcaactccgccgtggcctggtccaacaagtccgatttcgcctgcgccaacgccttcaacaacagcattatccccgaggacacattcttcccaagccccgagagcagctgcggtacccagagttttgggttgttggaccctaaattgtgctatctgttggacggaatcctgttcatttacggagtgatcctgaccgcattgttcctgcgggttaagttttccagatccgcagacgcacccgcttaccaacaagggcagaaccaactctacaatgaacttaatttggggcggagggaagagtacgacgttctggacaaaaggaggggacgagatcccgagatgggcggaaagcctcagcgaaggaagaatccgcaagaggggctttataacgaactccagaaagataaaatggcagaagcctatagtgagattgggatgaagggagaaaggaggaggggtaaaggtcacgatgggttgtaccaaggattgagcacagccactaaagatacctatgatgcgctccacatgcaggccctgccgccaaga

SEQ ID NO: 10646 - DNA, 2748 bp, Artificial Sequence
  Synthetic Polynucloetide
atggccttaccagtgaccgccttgctcctgccgctggccttgctgctccacgccgccaggccggaagtgcagctggttgaatctggcggaggactggttcagcctggcggatctctgagactgtcttgtgccgccagcggcttcagcttcagcgacttttggatgagctgggtccgacaggcccctggcaaaggacttgaatgggtcgccacaatcagccaggccggcagcgagaaggactacgtggactctgtgaagggcagattcaccatcagccgggacaacgccaagaagtccctgtacctccagatgaacagcctgagagccgaggacaccgccgtgtactattgtgcctctggcgtgtacagcttcgactacagaggccagggcaccctggtcacagtctcttctggtaccggcggaggcggatctggcggcggaggtagcggtggcggaggatctgaattcgacatccagatgacacagagccctagcagcctgtctgccagcgtgggagacagagtgaccatcacctgtagagccagccaggacatcagcagctacctgaactggtatcagcagaagcccggcaaggcccctaagctgctgatctactacaccagcagactgcacagcggcgtgcccagcagattttctggctctggcagcggcaccgacttcaccctgacaatatctagcctccagcctgaggacttcgccacctactattgccagcagggcaacaccctgccttacacatttggacagggcaccaaggtggaaatcaagagactcgagggacagcctaaggccaatcctaccgtgacactgttccctccaagcagcgaagaactccaggccaacaaggccacacttgtgtgcctgatctccgacttctaccctggggctgtgacagtggcttggaaggccgatggatctcctgtgaaagccggcgtggaaaccaccaagccatccaagcagagcaacaacaaatacgccgccagctcctacctgagcctgacacctgagcagtggaagtcccacagatcctacagctgccaagtgacccacgaaggcagcaccgtggaaaagacagtggcccctacagagtgcagccccatcaagaccgatgtgattacaatggaccccaaggacaactgctccaaggacgccaacgataccctgctgctccagctgaccaacaccagcgcctactacatgtacttgttgctgctgctgaagtccgtggtgtacttcgccatcatcacatgctgcctgctgcggagaaccgccttctgctgcaacggcgagaagtctagggccaagcgatctggatctggagcaacaaacttctcactactcaaacaagcaggtgacgtggaggagaatcccgggcctactagtatggactggatttggcgcatccttttccttgtcggcgctgctaccggcgcgcattccgggccccagctccagctgcaagagtctggacctggcctggtcaagcctagcgagacactgagcctgacctgtaccgtgtccggcgatagcatcagcagcggcgattactactggggctggatcagacagcctcctggcaaaggactggaatggatcggccacatctactacagcggcgtgacctactacaaccccagcctgaagtccagagtgaccatcagcgtggacaccagccggaaccagttctccctgaagctgtctagcgtgacagccgccgataccgccgtgtactactgcaccagagaggacagcagcaactggcggagtagaggccagggaacactggtcacagttagctctggatccggcggaggcggaagtggaggcggaggatctggcggcggaggctctttcgaagaagtgcagctggttgaatcaggtggcggcctggttcaacctggcggatctctgagactgagctgtgccgccagcggcttcaccttcagcgactactttatgagctgggtccgacaggcccctggcaaaggacttgaatgggtcgccaccatcagcaatggcggcacctacacttactaccccgacagcgtgaagggcagattcaccatctccagagacaacagcaagaacaccctgtacctccagatgaactccctgagagccgaggacaccgccgtgtactactgcgccagattcgacggctacatcttcgactattggggccagggcaccctggtcacagtctcttctacgcgtgcctctacaaagggaccctccgtgtttcctctggctcccagcagcaagtctacaagcggaggaacagccgctctgggctgcctggtcaaggattactttcccgagcctgtgaccgtgtcctggaatagcggagcactgacaagcggcgtgcacacctttccagccgtgctgcaaagcagcggcctgtactctctgagcagcgtggtcacagtgcctagctctagcctgggcacccagacctacatctgcaatgtgaaccacaagcctagcaacaccaaggtggacaagagagtggaacccaagagctgtgaagtgaaaaccgactccaccgaccacgtgaagcccaaagagacagagaacaccaagcagcccagcaagagctgccacaagcccaaggccatcgtgcacaccgagaaagtgaacatgatgagcctgaccgtgctgggcctgcggatgctgttcgccaaaaccgtggccgtgaacttcctgctgaccgccaagctgttcttcctc

SEQ ID NO: 10647 - DNA, 2691 bp, Artificial Sequence
  Synthetic Polynucloetide
atggccttaccagtgaccgccttgctcctgccgctggccttgctgctccacgccgccaggccggaagtgcagctggttgaatctggcggaggactggttcagcctggcggatctctgagactgtcttgtgccgccagcggcttcagcttcagcgacttttggatgagctgggtccgacaggcccctggcaaaggacttgaatgggtcgccacaatcagccaggccggcagcgagaaggactacgtggactctgtgaagggcagattcaccatcagccgggacaacgccaagaagtccctgtacctccagatgaacagcctgagagccgaggacaccgccgtgtactattgtgcctctggcgtgtacagcttcgactacagaggccagggcaccctggtcacagtctcttctggtaccggcggaggcggatctggcggcggaggtagcggtggcggaggatctgaattcgacatccagatgacacagagccctagcagcctgtctgccagcgtgggagacagagtgaccatcacctgtagagccagccaggacatcagcagctacctgaactggtatcagcagaagcccggcaaggcccctaagctgctgatctactacaccagcagactgcacagcggcgtgcccagcagattttctggctctggcagcggcaccgacttcaccctgacaatatctagcctccagcctgaggacttcgccacctactattgccagcagggcaacaccctgccttacacatttggacagggcaccaaggtggaaatcaagagactcgagggacagcctaaggccaatcctaccgtgacactgttccctccaagcagcgaagaactccaggccaacaaggccacacttgtgtgcctgatctccgacttctaccctggggctgtgacagtggcttggaaggccgatggatctcctgtgaaagccggcgtggaaaccaccaagccatccaagcagagcaacaacaaatacgccgccagctcctacctgagcctgacacctgagcagtggaagtcccacagatcctacagctgccaagtgacccacgaaggcagcaccgtggaaaagacagtggcccctacagagtgcagcggcagagccgattgcggctttaccagcgagagctaccagcagggcgtgctgagcgccaccatcctgtacgagatcctgctgggcaaggccaccctgtacgccgtgctggtgtctgccctggtgctgatggctatggtcaagcggaaggacagccggggacgcgccaagagaagcggatctggcgtgaagcagaccctgaatttcgacctgctgaagctggctggcgacgtggaatccaacccaggccctactagtatggactggatttggcgcatccttttccttgtcggcgctgctaccggcgcgcattccgggccccagctccagctgcaagagtctggacctggcctggtcaagcctagcgagacactgagcctgacctgtaccgtgtccggcgatagcatcagcagcggcgattactactggggctggatcagacagcctcctggcaaaggactggaatggatcggccacatctactacagcggcgtgacctactacaaccccagcctgaagtccagagtgaccatcagcgtggacaccagccggaaccagttctccctgaagctgtctagcgtgacagccgccgataccgccgtgtactactgcaccagagaggacagcagcaactggcggagtagaggccagggaacactggtcacagttagctctggatccggcggaggcggaagtggaggcggaggatctggcggcggaggctctttcgaagaagtgcagctggttgaatcaggtggcggcctggttcaacctggcggatctctgagactgagctgtgccgccagcggcttcaccttcagcgactactttatgagctgggtccgacaggcccctggcaaaggacttgaatgggtcgccaccatcagcaatggcggcacctacacttactaccccgacagcgtgaagggcagattcaccatctccagagacaacagcaagaacaccctgtacctccagatgaactccctgagagccgaggacaccgccgtgtactactgcgccagattcgacggctacatcttcgactattggggccagggcaccctggtcacagtctcttctacgcgtgcctctacaaagggaccctccgtgtttcctctggctcccagcagcaagtctacaagcggaggaacagccgctctgggctgcctggtcaaggattactttcccgagcctgtgaccgtgtcctggaatagcggagcactgacaagcggcgtgcacacctttccagccgtgctgcaaagcagcggcctgtactctctgagcagcgtggtcacagtgcctagctctagcctgggcacccagacctacatctgcaatgtgaaccacaagcctagcaacaccaaggtggacaagagagtggaacccaagagctgtatccccgaggacacattcttcccaagccccgagagcagctgcgacgtgaagctggtggaaaagagcttcgagacagacaccaacctgaacttccagaacctgagcgtgatcggcttcagaatcctgctgctgaaagtggccggctttaacctgctgatgaccctgcggctgtggtccagc

SEQ ID NO: 10648 - DNA, 2262 bp, Artificial Sequence
  Synthetic Polynucloetide
atggccttaccagtgaccgccttgctcctgccgctggccttgctgctccacgccgccaggccggaagtgcaggttttggagtctggcggaggactggttcagcctggcggatctctgagactgtcttgtgccgccagcggcttcaccttcagcaactttgccatgagctgggtccgacaggcccctggcaaaggacttgaatgggtgtccacaatcagcggcagcgccggcacaacagattacgccgattctgtgaagggcagattcaccatcagccgggacaacagcaagaaaaccctgtacctccagatgaacagcctgcgcgtggaagataccgccgtgtactactgtgccgatggcagaggccccttcttcgattatcgcggccagggcacactggtcaccgtttcttctggtaccggcggaggcggatctggcggcggaggtagcggtggcggaggatctgaattcgacatccagatgacacagagccctagcagcctgtctgccagcgtgggagacagagtgaccatcacctgtagagccagccaggacatcagcagctacctgaactggtatcagcagaagcccggcaaggcccctaagctgctgatctactacaccagcagactgcacagcggcgtgcccagcagattttctggctctggcagcggcaccgacttcaccctgacaatatctagcctccagcctgaggacttcgccacctactattgccagcagggcaacaccctgccttacacatttggacagggcaccaaggtggaaatcaagagactcgaggacctgaagaacgtgttcccacctgaggtggccgtgttcgagcctagcgaggccgagatcagccacacccagaaagccaccctcgtgtgcctggctaccggcttctaccccgaccatgtggaactgtcttggtgggtcaacggcaaagaggtgcacagcggcgtgtgtaccgacccccagccactgaaagaacagcccgccctgaacgacagccggtactgcctgagcagcagactgagagtgtccgccaccttctggcagaacccccggaaccacttcagatgccaggtgcagttctacggcctgagcgagaacgacgagtggacccaggacagagccaagcccgtgacccagatcgtgtctgccgaagcctggggcagagccgattgcggctttaccagcgagagctaccagcagggcgtgctgagcgccaccatcctgtacgagatcctgctgggcaaggccaccctgtacgccgtgctggtgtctgccctggtgctgatggctatggtcaagcggaaggacagccggggaagggccaagcgatctggatctggagcaacaaacttctcactactcaaacaagcaggtgacgtggaggagaatcccgggcctactagtatggactggatttggcgcatccttttccttgtcggcgctgctaccggcgcgcattccttcgaagaagtgcagctggttgaatcaggtggcggcctggttcaacctggcggatctctgagactgagctgtgccgccagcggcttcaccttcagcgactactttatgagctgggtccgacaggcccctggcaaaggacttgaatgggtcgccaccatcagcaatggcggcacctacacttactaccccgacagcgtgaagggcagattcaccatctccagagacaacagcaagaacaccctgtacctccagatgaactccctgagagccgaggacaccgccgtgtactactgcgccagattcgacggctacatcttcgactattggggccagggcaccctggtcacagtctcttctacgcgtatccagaaccctgatcctgccgtgtaccagctgcgggatagcaagagcagcgacaagagcgtgtgtctgttcaccgacttcgacagccagaccaacgtgtcccagagcaaggactccgacgtgtacatcaccgataagtgcgtgctggacatgcggagcatggacttcaagagcaactccgccgtggcctggtccaacaagtccgatttcgcctgcgccaacgccttcaacaacagcattatccccgaggacacattcttcccaagccccgagagcagctgcgacgtgaagctggtggaaaagagcttcgagacagacaccaacctgaacttccagaacctgagcgtgatcggcttcagaatcctgctgctgaaagtggccggctttaacctgctgatgaccctgcggctgtggtccagc

SEQ ID NO: 10649 - DNA, 2265 bp, Artificial Sequence
  Synthetic Polynucloetide
atggccttaccagtgaccgccttgctcctgccgctggccttgctgctccacgccgccaggccggacatccagatgacacagagccctagcagcctgtctgccagcgtgggagacagagtgaccatcacctgtagagccagccaggacatcagcagctacctgaactggtatcagcagaagcccggcaaggcccctaagctgctgatctactacaccagcagactgcacagcggcgtgcccagcagattttctggctctggcagcggcaccgacttcaccctgacaatatctagcctccagcctgaggacttcgccacctactattgccagcagggcaacaccctgccttacacatttggacagggcaccaaggtggaaatcaagagactcgaggacctgaagaacgtgttcccacctgaggtggccgtgttcgagcctagcgaggccgagatcagccacacccagaaagccaccctcgtgtgcctggctaccggcttctaccccgaccatgtggaactgtcttggtgggtcaacggcaaagaggtgcacagcggcgtgtgtaccgacccccagccactgaaagaacagcccgccctgaacgacagccggtactgcctgagcagcagactgagagtgtccgccaccttctggcagaacccccggaaccacttcagatgccaggtgcagttctacggcctgagcgagaacgacgagtggacccaggacagagccaagcccgtgacccagatcgtgtctgccgaagcctggggcagagccgattgcggctttaccagcgagagctaccagcagggcgtgctgagcgccaccatcctgtacgagatcctgctgggcaaggccaccctgtacgccgtgctggtgtctgccctggtgctgatggctatggtcaagcggaaggacagccggggaagggccaagcgatctggatctggagcaacaaacttctcactactcaaacaagcaggtgacgtggaggagaatcccgggcctactagtatggactggatttggcgcatccttttccttgtcggcgctgctaccggcgcccattccgggcccgaagtgcagctggttgaatctggcggaggactggttcaggctggcggatctctgagactgtcttgtgccgccagcggcagaacctttagcatgggctggtttagacaggcccctggcaaagagagagagttcgtcgccgccatcacatactctggcggcagcccttactacgccgactctgtgaagggcagattcaccatcagccgggacaacgccaagaacaccgtgtacctccagatgaacagcctgaagcctgaggacaccgccgtgtactactgcgccgccaatccaacatacggcagcgactggaacgccgagaattggggccagggaacccaagtgacagtgtctagcggatccggcggcggaggatctggcggaggcggatctgggggcggaggctctttcgaagaagtgcagctggttgaatcaggtggcggcctggttcaacctggcggatctctgagactgagctgtgccgccagcggcttcaccttcagcgactactttatgagctgggtccgacaggcccctggcaaaggacttgaatgggtcgccaccatcagcaatggcggcacctacacttactaccccgacagcgtgaagggcagattcaccatctccagagacaacagcaagaacaccctgtacctccagatgaactccctgagagccgaggacaccgccgtgtactactgcgccagattcgacggctacatcttcgactattggggccagggcaccctggtcacagtctcttctacgcgtatccagaaccctgatcctgccgtgtaccagctgcgggatagcaagagcagcgacaagagcgtgtgtctgttcaccgacttcgacagccagaccaacgtgtcccagagcaaggactccgacgtgtacatcaccgataagtgcgtgctggacatgcggagcatggacttcaagagcaactccgccgtggcctggtccaacaagtccgatttcgcctgcgccaacgccttcaacaacagcattatccccgaggacacattcttcccaagccccgagagcagctgcgacgtgaagctggtggaaaagagcttcgagacagacaccaacctgaacttccagaacctgagcgtgatcggcttcagaatcctgctgctgaaagtggccggctttaacctgctgatgaccctgcggctgtggtccagc

SEQ ID NO: 10650 - DNA, 2646 bp, Artificial Sequence
  Synthetic Polynucloetide
atggccttaccagtgaccgccttgctcctgccgctggccttgctgctccacgccgccaggccggacatccagatgacacagagccctagcagcctgtctgccagcgtgggagacagagtgaccatcacctgtagagccagccaggacatcagcagctacctgaactggtatcagcagaagcccggcaaggcccctaagctgctgatctactacaccagcagactgcacagcggcgtgcccagcagattttctggctctggcagcggcaccgacttcaccctgacaatatctagcctccagcctgaggacttcgccacctactattgccagcagggcaacaccctgccttacacatttggacagggcaccaaggtggaaatcaagagactcgaggacctgaagaacgtgttcccacctgaggtggccgtgttcgagcctagcgaggccgagatcagccacacccagaaagccaccctcgtgtgcctggctaccggcttctaccccgaccatgtggaactgtcttggtgggtcaacggcaaagaggtgcacagcggcgtgtgtaccgacccccagccactgaaagaacagcccgccctgaacgacagccggtactgcctgagcagcagactgagagtgtccgccaccttctggcagaacccccggaaccacttcagatgccaggtgcagttctacggcctgagcgagaacgacgagtggacccaggacagagccaagcccgtgacccagatcgtgtctgccgaagcctggggcagagccgattgcggctttaccagcgagagctaccagcagggcgtgctgagcgccaccatcctgtacgagatcctgctgggcaaggccaccctgtacgccgtgctggtgtctgccctggtgctgatggctatggtcaagcggaaggacagccggggaagggccaagcgatctggatctggagcaacaaacttctcactactcaaacaagcaggtgacgtggaggagaatcccgggcctactagtatggactggatttggcgcatccttttccttgtcggcgctgctaccggcgcccattcccaactgcaactgcaagagtctggccctggcctggtcaagccttctgaaaccctgagcctgacctgtaccgtgtccggcggctctatcagcagcggcgattactactggggctggatcagacagcctccaggcaagggactcgaatggatcggcagcatcagctacagcggctccacctactacaacccaagcctgaagtccagagtgaccatcagcgtggacaccagcagaaaccagttctccctgaagctgagcagcgtgacagccgccgatacagccgtgtattattgcaccagagaggacagcagcaactggcggagtagaggacagggcacactggtcacagtgtcctcttctggaggcggtggaagcggtggaggaggatctgaagtgcagctggttgaatctggcggaggactggttcaggctggcggatctctgagactgtcttgtgccgccagcggcagaacctttagcatgggctggtttagacaggcccctggcaaagagagagagttcgtcgccgccatcacatactctggcggcagcccttactacgccgactctgtgaagggcagattcaccatcagccgggacaacgccaagaacaccgtgtacctccagatgaacagcctgaagcctgaggacaccgccgtgtactactgcgccgccaatccaacatacggcagcgactggaacgccgagaattggggccagggaacccaagtgacagtgtctagcggatccggcggcggaggatctggcggaggcggatctgggggcggaggctctttcgaagaagtgcagctggttgaatcaggtggcggcctggttcaacctggcggatctctgagactgagctgtgccgccagcggcttcaccttcagcgactactttatgagctgggtccgacaggcccctggcaaaggacttgaatgggtcgccaccatcagcaatggcggcacctacacttactaccccgacagcgtgaagggcagattcaccatctccagagacaacagcaagaacaccctgtacctccagatgaactccctgagagccgaggacaccgccgtgtactactgcgccagattcgacggctacatcttcgactattggggccagggcaccctggtcacagtctcttctacgcgtatccagaaccctgatcctgccgtgtaccagctgcgggatagcaagagcagcgacaagagcgtgtgtctgttcaccgacttcgacagccagaccaacgtgtcccagagcaaggactccgacgtgtacatcaccgataagtgcgtgctggacatgcggagcatggacttcaagagcaactccgccgtggcctggtccaacaagtccgatttcgcctgcgccaacgccttcaacaacagcattatccccgaggacacattcttcccaagccccgagagcagctgcgacgtgaagctggtggaaaagagcttcgagacagacaccaacctgaacttccagaacctgagcgtgatcggcttcagaatcctgctgctgaaagtggccggctttaacctgctgatgaccctgcggctgtggtccagc

SEQ ID NO: 10651 - DNA, 2673 bp, Artificial Sequence
  Synthetic Polynucloetide
atggccttaccagtgaccgccttgctcctgccgctggccttgctgctccacgccgccaggccggaagtgcaggttttggagtctggcggaggactggttcagcctggcggatctctgagactgtcttgtgccgccagcggcttcaccttcagcaactttgccatgagctgggtccgacaggcccctggcaaaggacttgaatgggtgtccacaatcagcggcagcgccggcacaacagattacgccgattctgtgaagggcagattcaccatcagccgggacaacagcaagaaaaccctgtacctccagatgaacagcctgcgcgtggaagataccgccgtgtactactgtgccgatggcagaggccccttcttcgattatcgcggccagggcacactggtcaccgtttcttctggtaccggcggaggcggatctggcggcggaggtagcggtggcggaggatctgaattcgacatccagatgacacagagccctagcagcctgtctgccagcgtgggagacagagtgaccatcacctgtagagccagccaggacatcagcagctacctgaactggtatcagcagaagcccggcaaggcccctaagctgctgatctactacaccagcagactgcacagcggcgtgcccagcagattttctggctctggcagcggcaccgacttcaccctgacaatatctagcctccagcctgaggacttcgccacctactattgccagcagggcaacaccctgccttacacatttggacagggcaccaaggtggaaatcaagagactcgaggacctgaagaacgtgttcccacctgaggtggccgtgttcgagcctagcgaggccgagatcagccacacccagaaagccaccctcgtgtgcctggctaccggcttctaccccgaccatgtggaactgtcttggtgggtcaacggcaaagaggtgcacagcggcgtgtgtaccgacccccagccactgaaagaacagcccgccctgaacgacagccggtactgcctgagcagcagactgagagtgtccgccaccttctggcagaacccccggaaccacttcagatgccaggtgcagttctacggcctgagcgagaacgacgagtggacccaggacagagccaagcccgtgacccagatcgtgtctgccgaagcctggggcagagccgattgcggctttaccagcgagagctaccagcagggcgtgctgagcgccaccatcctgtacgagatcctgctgggcaaggccaccctgtacgccgtgctggtgtctgccctggtgctgatggctatggtcaagcggaaggacagccggggaagggccaagcgatctggatctggagcaacaaacttctcactactcaaacaagcaggtgacgtggaggagaatcccgggcctactagtatggactggatttggcgcatccttttccttgtcggcgctgctaccggcgcccattccgggcccgaagtgcagctggttgaatctggcggaggactggttcaggctggcggatctctgagactgtcttgtgccgccagcggcagaacctttagcatgggctggtttagacaggcccctggcaaagagagagagttcgtcgccgccatcacatacagcggcggcagcccttactacgcctcttctgtcagaggccggttcaccatcagccgggacaacgccaagaacaccgtgtacctccagatgaacagcctgaagccagaggacaccgccgtgtactactgtgccgccaatccaacctacggcagcgactggaatgccgagaattggggccagggcacccaagtgacagtgtctagtggatccggcggcggaggatctggcggaggcggatctgggggcggaggctctttcgaagaagtgcagctggttgaatcaggtggcggcctggttcaacctggcggatctctgagactgagctgtgccgccagcggcttcaccttcagcgactactttatgagctgggtccgacaggcccctggcaaaggacttgaatgggtcgccaccatcagcaatggcggcacctacacttactaccccgacagcgtgaagggcagattcaccatctccagagacaacagcaagaacaccctgtacctccagatgaactccctgagagccgaggacaccgccgtgtactactgcgccagattcgacggctacatcttcgactattggggccagggcaccctggtcacagtctcttctacgcgtatccagaaccctgatcctgccgtgtaccagctgcgggatagcaagagcagcgacaagagcgtgtgtctgttcaccgacttcgacagccagaccaacgtgtcccagagcaaggactccgacgtgtacatcaccgataagtgcgtgctggacatgcggagcatggacttcaagagcaactccgccgtggcctggtccaacaagtccgatttcgcctgcgccaacgccttcaacaacagcattatccccgaggacacattcttcccaagccccgagagcagctgcgacgtgaagctggtggaaaagagcttcgagacagacaccaacctgaacttccagaacctgagcgtgatcggcttcagaatcctgctgctgaaagtggccggctttaacctgctgatgaccctgcggctgtggtccagc

SEQ ID NO: 10652 - DNA, 2169 bp, Artificial Sequence
  Synthetic Polynucloetide
atggccttaccagtgaccgccttgctcctgccgctggccttgctgctccacgccgccaggccggacatccagatgacacagagccctagcagcctgtctgccagcgtgggagacagagtgaccatcacctgtagagccagccaggacatcagcaactacctgaactggtatcagcagaagcccggcaaggcccctaagctgctgatctactacaccagcagactgcacagcggcgtgcccagcagattttctggctctggcagcggcaccgacttcaccctgacaatatctagcctccagcctgaggacttcgccacctactattgccagcagggcaacaccctgccttggacatttggacagggcaccaaggtggaaatcaagagaggcggaggcggaagtggaggcggaggatctggcggcggaggctctgaagtgcagctggttgaatcaggtggcggcctggttcaacctggcggatctctgagactgagctgtgccgccagcggcttcaccttcagcgactactttatgagctgggtccgacaggcccctggcaaaggacttgaatgggtcgccaccatcagcaatggcggcacctacacttactaccccgacagcgtgaagggcagattcaccatctccagagacaacagcaagaacaccctgtacctccagatgaactccctgagagccgaggacaccgccgtgtactactgcgccagattcgacggctacatcttcgactattggggccagggcaccctggtcacagtctcttctacgcgtgagcagaaactgatctcggaagaggatctggcgaagcccaccacgacgccagcgccgcgaccaccaacaccggcgcccaccatcgcgtcgcagcccctgtccctgcgcccagaggcgtgccggccagcggcggggggcgcagtgcacacgagggggctggacttcgcctgtgacatctacatctgggcgcccttggccgggacttgtggggtccttctcctgtcactggttatcaccctttactgcaaacggggcagaaagaaactcctgtatatattcaaacaaccatttatgagaccagtacaaactactcaagaggaagatggctgtagctgccgatttccagaagaagaagaaggaggatgtgaactgagagtgaagttcagcaggagcgcagacgcccccgcgtaccagcagggccagaaccagctctataacgagctgaatctaggacgaagagaggagtacgatgttttggacaagagacgtggccgggaccctgagatggggggaaagccgagaaggaagaaccctcaggaaggcctgtacaatgaactgcagaaagataagatggcggaggcctacagtgagattgggatgaaaggcgagcgccggaggggcaaggggcacgatggcctttaccagggtctcagtacagccaccaaggacacctacgacgcccttcacatgcaggccctgccccctcgctctagtggctccggcgagggcagaggaagtctactaacctgcggagatgtggaagaaaatcctggcccacatatgaccgagtacaagcccacggtgcgcctcgccacccgcgacgacgtccccagggccgtacgcaccctcgccgccgcgttcgccgactaccccgccacgcgccacaccgtcgatccggaccgccacatcgagcgggtcaccgagctgcaagaactcttcctcacgcgcgtcgggctcgacatcggcaaggtgtgggtcgcggacgacggcgccgcggtggcggtctggaccacgccggagagcgtcgaagcgggggcggtgttcgccgagatcggcccgcgcatggccgagttgagcggttcccggctggccgcgcagcaacagatggaaggcctcctggcgccgcaccggcccaaggagcccgcgtggttcctggccaccgtcggcgtctcgcccgaccaccagggcaagggtctgggcagcgccgtcgtgctccccggagtggaggcggccgagcgcgccggggtgcccgccttcctggagacctccgcgccccgcaacctccccttctacgagcggctcggcttcaccgtcaccgccgacgtcgaggtgcccgaaggaccgcgcacctggtgcatgacccgcaagcccggtgcctga

SEQ ID NO: 10653 - DNA, 2151 bp, Artificial Sequence
  Synthetic Polynucloetide
atggccttaccagtgaccgccttgctcctgccgctggccttgctgctccacgccgccaggccggacatccagatgacacagagccctagcagcctgtctgccagcgtgggagacagagtgaccatcacctgtagagccagccaggacatcagcaactacctgaactggtatcagcagaagcccggcaaggcccctaagctgctgatctactacaccagcagactgcacagcggcgtgcccagcagattttctggctctggcagcggcaccgacttcaccctgacaatatctagcctccagcctgaggacttcgccacctactattgccagcagggcaacaccctgccttggacatttggacagggcaccaaggtggaaatcaagagaggcggaggcggaagtggaggcggaggatctggcggcggaggctctgaagtgcagctggttgaatcaggtggcggcctggttcaacctggcggatctctgagactgagctgtgccgccagcggcttcaccttcagcgactactttatgagctgggtccgacaggcccctggcaaaggacttgaatgggtcgccaccatcagcaatggcggcacctacacttactaccccgacagcgtgaagggcagattcaccatctccagagacaacagcaagaacaccctgtacctccagatgaactccctgagagccgaggacaccgccgtgtactactgcgccagattcgacggctacatcttcgactattggggccagggcaccctggtcacagtctcttctacgcgtgagcagaaactgatctcggaagaggatctgaaaattgaagttatgtatcctcctccttacctagacaatgagaagagcaatggaaccattatccatgtgaaagggaaacacctttgtccaagtcccctatttcccggaccttctaagcccttttgggtgctggtggtggttgggggagtcctggcttgctatagcttgctagtaacagtggcctttattattttctgggtgaggagtaagaggagcaggctcctgcacagtgactacatgaacatgactccacgccgccccggacccacccgcaagcattaccagccctatgccccaccacgcgacttcgcagcctatcgctccagagtgaagttcagcaggagcgcagacgcccccgcgtaccagcagggccagaaccagctctataacgagctcaatctaggacgaagagaggagtacgatgttttggacaagagacgtggccgggaccctgagatggggggaaagccgagaaggaagaaccctcaggaaggcctgtacaatgaactgcagaaagataagatggcggaggcctacagtgagattgggatgaaaggcgagcgccggaggggcaaggggcacgatggcctttaccagggtctcagtacagccaccaaggacacctacgacgcccttcacatgcaggccctgccccctcgctctagtggctccggcgagggcagaggaagtctactaacctgcggagatgtggaagaaaatcctggcccacatatgaccgagtacaagcccacggtgcgcctcgccacccgcgacgacgtccccagggccgtacgcaccctcgccgccgcgttcgccgactaccccgccacgcgccacaccgtcgatccggaccgccacatcgagcgggtcaccgagctgcaagaactcttcctcacgcgcgtcgggctcgacatcggcaaggtgtgggtcgcggacgacggcgccgcggtggcggtctggaccacgccggagagcgtcgaagcgggggcggtgttcgccgagatcggcccgcgcatggccgagttgagcggttcccggctggccgcgcagcaacagatggaaggcctcctggcgccgcaccggcccaaggagcccgcgtggttcctggccaccgtcggcgtctcgcccgaccaccagggcaagggtctgggcagcgccgtcgtgctccccggagtggaggcggccgagcgcgccggggtgcccgccttcctggagacctccgcgccccgcaacctccccttctacgagcggctcggcttcaccgtcaccgccgacgtcgaggtgcccgaaggaccgcgcacctggtgcatgacccgcaagcccggtgcctga

SEQ ID NO: 10654 - DNA, 1479 bp, Artificial Sequence
  Synthetic Polynucloetide
atggccttaccagtgaccgccttgctcctgccgctggccttgctgctccacgccgccaggccggacatccagatgacacagagccctagcagcctgtctgccagcgtgggagacagagtgaccatcacctgtagagccagccaggacatcagcaactacctgaactggtatcagcagaagcccggcaaggcccctaagctgctgatctactacaccagcagactgcacagcggcgtgcccagcagattttctggctctggcagcggcaccgacttcaccctgacaatatctagcctccagcctgaggacttcgccacctactattgccagcagggcaacaccctgccttggacatttggacagggcaccaaggtggaaatcaagagaggcggaggcggaagtggaggcggaggatctggcggcggaggctctgaagtgcagctggttgaatcaggtggcggcctggttcaacctggcggatctctgagactgagctgtgccgccagcggcttcaccttcagcgactactttatgagctgggtccgacaggcccctggcaaaggacttgaatgggtcgccaccatcagcaatggcggcacctacacttactaccccgacagcgtgaagggcagattcaccatctccagagacaacagcaagaacaccctgtacctccagatgaactccctgagagccgaggacaccgccgtgtactactgcgccagattcgacggctacatcttcgactattggggccagggcaccctggtcacagtctcttctacgcgtgagcagaaactgatctcggaagaggatctgaaaattgaagttatgtatcctcctccttacctagacaatgagaagagcaatggaaccattatccatgtgaaagggaaacacctttgtccaagtcccctatttcccggaccttctaagcccttttgggtgctggtggtggttgggggagtcctggcttgctatagcttgctagtaacagtggcctttattattttctgggtgaggagtaagaggagcaggctcctgcacagtgactacatgaacatgactccacgccgccccggacccacccgcaagcattaccagccctatgccccaccacgcgacttcgcagcctatcgctccagagtgaagttcagcaggagcgcagacgcccccgcgtaccagcagggccagaaccagctctataacgagctcaatctaggacgaagagaggagtacgatgttttggacaagagacgtggccgggaccctgagatggggggaaagccgagaaggaagaaccctcaggaaggcctgtacaatgaactgcagaaagataagatggcggaggcctacagtgagattgggatgaaaggcgagcgccggaggggcaaggggcacgatggcctttaccagggtctcagtacagccaccaaggacacctacgacgcccttcacatgcaggccctgccccctcgc

SEQ ID NO: 10655 - DNA, 1500 bp, Artificial Sequence
  Synthetic Polynucloetide
atggccttaccagtgaccgccttgctcctgccgctggccttgctgctccacgccgccaggccggacatccagatgacacagagccctagcagcctgtctgccagcgtgggagacagagtgaccatcacctgtagagccagccaggacatcagcaactacctgaactggtatcagcagaagcccggcaaggcccctaagctgctgatctactacaccagcagactgcacagcggcgtgcccagcagattttctggctctggcagcggcaccgacttcaccctgacaatatctagcctccagcctgaggacttcgccacctactattgccagcagggcaacaccctgccttggacatttggacagggcaccaaggtggaaatcaagagaggcggaggcggaagtggaggcggaggatctggcggcggaggctctgaagtgcagctggttgaatcaggtggcggcctggttcaacctggcggatctctgagactgagctgtgccgccagcggcttcaccttcagcgactactttatgagctgggtccgacaggcccctggcaaaggacttgaatgggtcgccaccatcagcaatggcggcacctacacttactaccccgacagcgtgaagggcagattcaccatctccagagacaacagcaagaacaccctgtacctccagatgaactccctgagagccgaggacaccgccgtgtactactgcgccagattcgacggctacatcttcgactattggggccagggcaccctggtcacagtctcttctacgcgtgagcagaaactgatctcggaagaggatctggcgaagcccaccacgacgccagcgccgcgaccaccaacaccggcgcccaccatcgcgtcgcagcccctgtccctgcgcccagaggcgtgccggccagcggcggggggcgcagtgcacacgagggggctggacttcgcctgtgacatctacatctgggcgcccttggccgggacttgtggggtccttctcctgtcactggttatcaccctttactgcaaacggggcagaaagaaactcctgtatatattcaaacaaccatttatgagaccagtacaaactactcaagaggaagatggctgtagctgccgatttccagaagaagaagaaggaggatgtgaactgagagtgaagttcagcaggagcgcagacgcccccgcgtaccagcagggccagaaccagctctataacgagctgaatctaggacgaagagaggagtacgatgttttggacaagagacgtggccgggaccctgagatggggggaaagccgagaaggaagaaccctcaggaaggcctgtacaatgaactgcagaaagataagatggcggaggcctacagtgagattgggatgaaaggcgagcgccggaggggcaaggggcacgatggcctttaccagggtctcagtacagccaccaaggacacctacgacgcccttcacatgcaggccctgccccctcgctga

SEQ ID NO: 10656 - DNA, 1500 bp, Artificial Sequence
  Synthetic Polynucloetide
atggccttaccagtgaccgccttgctcctgccgctggccttgctgctccacgccgccaggccggaagtgcagctggttgaatcaggtggcggcctggttcaacctggcggatctctgagactgagctgtgccgccagcggcttcaccttcagcgactactttatgagctgggtccgacaggcccctggcaaaggacttgaatgggtcgccaccatcagcaatggcggcacctacacttactaccccgacagcgtgaagggcagattcaccatctccagagacaacagcaagaacaccctgtacctccagatgaactccctgagagccgaggacaccgccgtgtactactgcgccagattcgacggctacatcttcgactattggggccagggcaccctggtcacagtctcttctggcggaggcggaagtggaggcggaggatctggcggcggaggctctgacatccagatgacacagagccctagcagcctgtctgccagcgtgggagacagagtgaccatcacctgtagagccagccaggacatcagcaactacctgaactggtatcagcagaagcccggcaaggcccctaagctgctgatctactacaccagcagactgcacagcggcgtgcccagcagattttctggctctggcagcggcaccgacttcaccctgacaatatctagcctccagcctgaggacttcgccacctactattgccagcagggcaacaccctgccttggacatttggacagggcaccaaggtggaaatcaagagaacgcgtgagcagaaactgatctcggaagaggatctggcgaagcccaccacgacgccagcgccgcgaccaccaacaccggcgcccaccatcgcgtcgcagcccctgtccctgcgcccagaggcgtgccggccagcggcggggggcgcagtgcacacgagggggctggacttcgcctgtgacatctacatctgggcgcccttggccgggacttgtggggtccttctcctgtcactggttatcaccctttactgcaaacggggcagaaagaaactcctgtatatattcaaacaaccatttatgagaccagtacaaactactcaagaggaagatggctgtagctgccgatttccagaagaagaagaaggaggatgtgaactgagagtgaagttcagcaggagcgcagacgcccccgcgtaccagcagggccagaaccagctctataacgagctgaatctaggacgaagagaggagtacgatgttttggacaagagacgtggccgggaccctgagatggggggaaagccgagaaggaagaaccctcaggaaggcctgtacaatgaactgcagaaagataagatggcggaggcctacagtgagattgggatgaaaggcgagcgccggaggggcaaggggcacgatggcctttaccagggtctcagtacagccaccaaggacacctacgacgcccttcacatgcaggccctgccccctcgctga

SEQ ID NO: 10657 - DNA, 2739 bp, Artificial Sequence
  Synthetic Polynucloetide
atggccttaccagtgaccgccttgctcctgccgctggccttgctgctccacgccgccaggccggacatccagatgacacagagccctagcagcctgtctgccagcgtgggagacagagtgaccatcacctgtagagccagccaggacatcagcaactacctgaactggtatcagcagaagcccggcaaggcccctaagctgctgatctactacaccagcagactgcacagcggcgtgcccagcagattttctggctctggcagcggcaccgacttcaccctgacaatatctagcctccagcctgaggacttcgccacctactattgccagcagggcaacaccctgccttggacatttggacagggcaccaaggtggaaatcaagagaggcggaggcggaagtggaggcggaggatctggcggcggaggctctgaagtgcagctggttgaatcaggtggcggcctggttcaacctggcggatctctgagactgagctgtgccgccagcggcttcaccttcagcgactactttatgagctgggtccgacaggcccctggcaaaggacttgaatgggtcgccaccatcagcaatggcggcacctacacttactaccccgacagcgtgaagggcagattcaccatctccagagacaacagcaagaacaccctgtacctccagatgaactccctgagagccgaggacaccgccgtgtactactgcgccagattcgacggctacatcttcgactattggggccagggcaccctggtcacagtctcttctacgcgtgagcagaaactgatctcggaagaggatctggcgaagcccaccacgacgccagcgccgcgaccaccaacaccggcgcccaccatcgcgtcgcagcccctgtccctgcgcccagaggcgtgccggccagcggcggggggcgcagtgcacacgagggggctggacttcgcctgtgacatctacatctgggcgcccttggccgggacttgtggggtccttctcctgtcactggttatcaccctttactgcgggcgcgccagagtgaagttcagcaggagcgcagacgcccccgcgtaccagcagggccagaaccagctctataacgagctgaatctaggacgaagagaggagtacgatgttttggacaagagacgtggccgggaccctgagatggggggaaagccgagaaggaagaaccctcaggaaggcctgtacaatgaactgcagaaagataagatggcggaggcctacagtgagattgggatgaaaggcgagcgccggaggggcaaggggcacgatggcctttaccagggtctcagtacagccaccaaggacacctacgacgcccttcacatgcaggccctgccccctcgctctagaggatctggagcaacaaacttctcactactcaaacaagcaggtgacgtggaggagaatcccgggcctgggatccacatggccacttacgaggttctctgtgaggtggcgcggaaactgggcacggatgacagggaagtggtattgttcctcctaaacgtgttcatacctcaacccacactggcccaattaattggagctcttagagctttaaaggaggagggcaggttaacgtttcccctgttagcggaatgtctgtttcgtgcaggtcgcagagacctcttgcgcgacctgcttcacttagacccgcgttttttagagcgccacctagcgggcacaatgagttatttcagcccttatcagctcactgttctccacgtagacggggagctgtgtgcgagggatattaggtctttgatatttttaagcaaggacactatagggtctcgcagcacaccacagacattcttacactgggtgtactgtatggaaaacttagacctactgggtcccactgacgtggatgccctaatgtcaatgcttagatctttgtcaagagtagacctacagcgccaagtgcaaaccctaatgggccttcacctttccggcccatcacactcccaacactatcgccatacaccactcgagaccgatttctacgactacaaggacgacgatgacaagactagtggctccggcgagggcagaggaagtctactaacctgcggagatgtggaagaaaatcctggcccacatatgaccgagtacaagcccacggtgcgcctcgccacccgcgacgacgtccccagggccgtacgcaccctcgccgccgcgttcgccgactaccccgccacgcgccacaccgtcgatccggaccgccacatcgagcgggtcaccgagctgcaagaactcttcctcacgcgcgtcgggctcgacatcggcaaggtgtgggtcgcggacgacggcgccgcggtggcggtctggaccacgccggagagcgtcgaagcgggggcggtgttcgccgagatcggcccgcgcatggccgagttgagcggttcccggctggccgcgcagcaacagatggaaggcctcctggcgccgcaccggcccaaggagcccgcgtggttcctggccaccgtcggcgtctcgcccgaccaccagggcaagggtctgggcagcgccgtcgtgctccccggagtggaggcggccgagcgcgccggggtgcccgccttcctggagacctccgcgccccgcaacctccccttctacgagcggctcggcttcaccgtcaccgccgacgtcgaggtgcccgaaggaccgcgcacctggtgcatgacccgcaagcccggtgcctga

SEQ ID NO: 10658 - DNA, 2559 bp, Artificial Sequence
  Synthetic Polynucloetide
atggccttaccagtgaccgccttgctcctgccgctggccttgctgctccacgccgccaggccggacatccagatgacacagagccctagcagcctgtctgccagcgtgggagacagagtgaccatcacctgtagagccagccaggacatcagcaactacctgaactggtatcagcagaagcccggcaaggcccctaagctgctgatctactacaccagcagactgcacagcggcgtgcccagcagattttctggctctggcagcggcaccgacttcaccctgacaatatctagcctccagcctgaggacttcgccacctactattgccagcagggcaacaccctgccttggacatttggacagggcaccaaggtggaaatcaagagactcgagatccagaaccctgatcctgccgtgtaccagctgcgggatagcaagagcagcgacaagagcgtgtgtctgttcaccgacttcgacagccagaccaacgtgtcccagagcaaggactccgacgtgtacatcaccgataagtgcgtgctggacatgcggagcatggacttcaagagcaactccgccgtggcctggtccaacaagtccgatttcgcctgcgccaacgccttcaacaacagcattatccccgaggacacattcttcccaagcagcgacgtgccctgcgacgtgaagctggtggaaaagagcttcgagacagacaccaacctgaacttccagaacctgagcgtgatcggcttcagaatcctgctgctgaaagtggccggctttaacctgctgatgaccctgcggctgtggtccagccgcgccaagagaagcggatctggcgtgaagcagaccctgaatttcgacctgctgaagctggctggcgacgtggaatccaacccaggccctactagtatggactggatttggcgcatccttttccttgtcggcgctgctaccggcgcgcattccttcgaagaagtgcagctggttgaatcaggtggcggcctggttcaacctggcggatctctgagactgagctgtgccgccagcggcttcaccttcagcgactactttatgagctgggtccgacaggcccctggcaaaggacttgaatgggtcgccaccatcagcaatggcggcacctacacttactaccccgacagcgtgaagggcagattcaccatctccagagacaacagcaagaacaccctgtacctccagatgaactccctgagagccgaggacaccgccgtgtactactgcgccagattcgacggctacatcttcgactattggggccagggcaccctggtcacagtctcttctacgcgtgaggacctgaagaacgtgttcccacctgaggtggccgtgttcgagcctagcaaggccgagatcgcccacacccagaaagccaccctcgtgtgcctggctaccggcttctaccccgaccatgtggaactgtcttggtgggtcaacggcaaagaggtgcacagcggcgtgtgtaccgacccccagccactgaaagaacagcccgccctgaacgacagccggtactgcctgagcagcagactgagagtgtccgccaccttctggcagaacccccggaaccacttcagatgccaggtgcagttctacggcctgagcgagaacgacgagtggacccaggacagagccaagcccgtgacccagatcgtgtctgccgaagcctggggcagagccgattgcggcatcaccagcgccagctaccaccagggcgtgctgagcgccaccatcctgtacgagatcctgctgggcaaggccaccctgtacgccgtgctggtgtctgccctggtgctgatggctatggtcaagcggaaggacagccggggaagggccaagcgatctggatctggagcaacaaacttctcactactcaaacaagcaggtgacgtggaggagaatcccgggccttctagaggccatatgaccgagtacaagcccacggtgcgcctcgccacccgcgacgacgtccccagggccgtacgcaccctcgccgccgcgttcgccgactaccccgccacgcgccacaccgtcgatccggaccgccacatcgagcgggtcaccgagctgcaagaactcttcctcacgcgcgtcgggctcgacatcggcaaggtgtgggtcgcggacgacggcgccgcggtggcggtctggaccacgccggagagcgtcgaagcgggggcggtgttcgccgagatcggcccgcgcatggccgagttgagcggttcccggctggccgcgcagcaacagatggaaggcctcctggcgccgcaccggcccaaggagcccgcgtggttcctggccaccgtcggcgtctcgcccgaccaccagggcaagggtctgggcagcgccgtcgtgctccccggagtggaggcggccgagcgcgccggggtgcccgccttcctggagacctccgcgccccgcaacctccccttctacgagcggctcggcttcaccgtcaccgccgacgtcgaggtgcccgaaggaccgcgcacctggtgcatgacccgcaagcccggtgcctga

SEQ ID NO: 10659 - DNA, 2556 bp, Artificial Sequence
  Synthetic Polynucloetide
atggccttaccagtgaccgccttgctcctgccgctggccttgctgctccacgccgccaggccggacatccagatgacacagagccctagcagcctgtctgccagcgtgggagacagagtgaccatcacctgtagagccagccaggacatcagcaactacctgaactggtatcagcagaagcccggcaaggcccctaagctgctgatctactacaccagcagactgcacagcggcgtgcccagcagattttctggctctggcagcggcaccgacttcaccctgacaatatctagcctccagcctgaggacttcgccacctactattgccagcagggcaacaccctgccttggacatttggacagggcaccaaggtggaaatcaagagactcgaggacctgaagaacgtgttcccacctgaggtggccgtgttcgagcctagcaaggccgagatcgcccacacccagaaagccaccctcgtgtgcctggctaccggcttctaccccgaccatgtggaactgtcttggtgggtcaacggcaaagaggtgcacagcggcgtgtgtaccgacccccagccactgaaagaacagcccgccctgaacgacagccggtactgcctgagcagcagactgagagtgtccgccaccttctggcagaacccccggaaccacttcagatgccaggtgcagttctacggcctgagcgagaacgacgagtggacccaggacagagccaagcccgtgacccagatcgtgtctgccgaagcctggggcagagccgattgcggcatcaccagcgccagctaccaccagggcgtgctgagcgccaccatcctgtacgagatcctgctgggcaaggccaccctgtacgccgtgctggtgtctgccctggtgctgatggctatggtcaagcggaaggacagccggggaagggccaagcgatctggatctggagcaacaaacttctcactactcaaacaagcaggtgacgtggaggagaatcccgggcctactagtatggactggatttggcgcatccttttccttgtcggcgctgctaccggcgcgcattccttcgaagaagtgcagctggttgaatcaggtggcggcctggttcaacctggcggatctctgagactgagctgtgccgccagcggcttcaccttcagcgactactttatgagctgggtccgacaggcccctggcaaaggacttgaatgggtcgccaccatcagcaatggcggcacctacacttactaccccgacagcgtgaagggcagattcaccatctccagagacaacagcaagaacaccctgtacctccagatgaactccctgagagccgaggacaccgccgtgtactactgcgccagattcgacggctacatcttcgactattggggccagggcaccctggtcacagtctcttctacgcgtatccagaaccctgatcctgccgtgtaccagctgcgggatagcaagagcagcgacaagagcgtgtgtctgttcaccgacttcgacagccagaccaacgtgtcccagagcaaggactccgacgtgtacatcaccgataagtgcgtgctggacatgcggagcatggacttcaagagcaactccgccgtggcctggtccaacaagtccgatttcgcctgcgccaacgccttcaacaacagcattatccccgaggacacattcttcccaagcagcgacgtgccctgcgacgtgaagctggtggaaaagagcttcgagacagacaccaacctgaacttccagaacctgagcgtgatcggcttcagaatcctgctgctgaaagtggccggctttaacctgctgatgaccctgcggctgtggtccagccgcgccaagagaagcggatctggcgtgaagcagaccctgaatttcgacctgctgaagctggctggcgacgtggaatccaacccaggcccttctagaggccatatgaccgagtacaagcccacggtgcgcctcgccacccgcgacgacgtccccagggccgtacgcaccctcgccgccgcgttcgccgactaccccgccacgcgccacaccgtcgatccggaccgccacatcgagcgggtcaccgagctgcaagaactcttcctcacgcgcgtcgggctcgacatcggcaaggtgtgggtcgcggacgacggcgccgcggtggcggtctggaccacgccggagagcgtcgaagcgggggcggtgttcgccgagatcggcccgcgcatggccgagttgagcggttcccggctggccgcgcagcaacagatggaaggcctcctggcgccgcaccggcccaaggagcccgcgtggttcctggccaccgtcggcgtctcgcccgaccaccagggcaagggtctgggcagcgccgtcgtgctccccggagtggaggcggccgagcgcgccggggtgcccgccttcctggagacctccgcgccccgcaacctccccttctacgagcggctcggcttcaccgtcaccgccgacgtcgaggtgcccgaaggaccgcgcacctggtgcatgacccgcaagcccggtgcctga

SEQ ID NO: 10660 - DNA, 1854 bp, Artificial Sequence
  Synthetic Polynucloetide
atggccttaccagtgaccgccttgctcctgccgctggccttgctgctccacgccgccaggccggacatccagatgacacagagccctagcagcctgtctgccagcgtgggagacagagtgaccatcacctgtagagccagccaggacatcagcaactacctgaactggtatcagcagaagcccggcaaggcccctaagctgctgatctactacaccagcagactgcacagcggcgtgcccagcagattttctggctctggcagcggcaccgacttcaccctgacaatatctagcctccagcctgaggacttcgccacctactattgccagcagggcaacaccctgccttggacatttggacagggcaccaaggtggaaatcaagagactcgaggacctgaagaacgtgttcccacctgaggtggccgtgttcgagcctagcgaggccgagatcagccacacccagaaagccaccctcgtgtgcctggctaccggcttctaccccgaccatgtggaactgtcttggtgggtcaacggcaaagaggtgcacagcggcgtgtgtaccgacccccagccactgaaagaacagcccgccctgaacgacagccggtactgcctgagcagcagactgagagtgtccgccaccttctggcagaacccccggaaccacttcagatgccaggtgcagttctacggcctgagcgagaacgacgagtggacccaggacagagccaagcccgtgacccagatcgtgtctgccgaagcctggggcagagccgattgcggctttaccagcgagagctaccagcagggcgtgctgagcgccaccatcctgtacgagatcctgctgggcaaggccaccctgtacgccgtgctggtgtctgccctggtgctgatggctatggtcaagcggaaggacagccggggaagggccaagcgatctggatctggagcaacaaacttctcactactcaaacaagcaggtgacgtggaggagaatcccgggcctactagtatggactggatttggcgcatccttttccttgtcggcgctgctaccggcgcgcattccttcgaagaagtgcagctggttgaatcaggtggcggcctggttcaacctggcggatctctgagactgagctgtgccgccagcggcttcaccttcagcgactactttatgagctgggtccgacaggcccctggcaaaggacttgaatgggtcgccaccatcagcaatggcggcacctacacttactaccccgacagcgtgaagggcagattcaccatctccagagacaacagcaagaacaccctgtacctccagatgaactccctgagagccgaggacaccgccgtgtactactgcgccagattcgacggctacatcttcgactattggggccagggcaccctggtcacagtctcttctacgcgtatccagaaccctgatcctgccgtgtaccagctgcgggatagcaagagcagcgacaagagcgtgtgtctgttcaccgacttcgacagccagaccaacgtgtcccagagcaaggactccgacgtgtacatcaccgataagtgcgtgctggacatgcggagcatggacttcaagagcaactccgccgtggcctggtccaacaagtccgatttcgcctgcgccaacgccttcaacaacagcattatccccgaggacacattcttcccaagccccgagagcagctgcgacgtgaagctggtggaaaagagcttcgagacagacaccaacctgaacttccagaacctgagcgtgatcggcttcagaatcctgctgctgaaagtggccggctttaacctgctgatgaccctgcggctgtggtccagc

SEQ ID NO: 10661 - DNA, 2529 bp, Artificial Sequence
  Synthetic Polynucloetide
atggccttaccagtgaccgccttgctcctgccgctggccttgctgctccacgccgccaggccggacatccagatgacacagagccctagcagcctgtctgccagcgtgggagacagagtgaccatcacctgtagagccagccaggacatcagcaactacctgaactggtatcagcagaagcccggcaaggcccctaagctgctgatctactacaccagcagactgcacagcggcgtgcccagcagattttctggctctggcagcggcaccgacttcaccctgacaatatctagcctccagcctgaggacttcgccacctactattgccagcagggcaacaccctgccttggacatttggacagggcaccaaggtggaaatcaagagactcgaggacctgaagaacgtgttcccacctgaggtggccgtgttcgagcctagcgaggccgagatcagccacacccagaaagccaccctcgtgtgcctggctaccggcttctaccccgaccatgtggaactgtcttggtgggtcaacggcaaagaggtgcacagcggcgtgtgtaccgacccccagccactgaaagaacagcccgccctgaacgacagccggtactgcctgagcagcagactgagagtgtccgccaccttctggcagaacccccggaaccacttcagatgccaggtgcagttctacggcctgagcgagaacgacgagtggacccaggacagagccaagcccgtgacccagatcgtgtctgccgaagcctggggcagagccgattgcggctttaccagcgagagctaccagcagggcgtgctgagcgccaccatcctgtacgagatcctgctgggcaaggccaccctgtacgccgtgctggtgtctgccctggtgctgatggctatggtcaagcggaaggacagccggggaagggccaagcgatctggatctggagcaacaaacttctcactactcaaacaagcaggtgacgtggaggagaatcccgggcctactagtatggactggatttggcgcatccttttccttgtcggcgctgctaccggcgcgcattccttcgaagaagtgcagctggttgaatcaggtggcggcctggttcaacctggcggatctctgagactgagctgtgccgccagcggcttcaccttcagcgactactttatgagctgggtccgacaggcccctggcaaaggacttgaatgggtcgccaccatcagcaatggcggcacctacacttactaccccgacagcgtgaagggcagattcaccatctccagagacaacagcaagaacaccctgtacctccagatgaactccctgagagccgaggacaccgccgtgtactactgcgccagattcgacggctacatcttcgactattggggccagggcaccctggtcacagtctcttctacgcgtatccagaaccctgatcctgccgtgtaccagctgcgggatagcaagagcagcgacaagagcgtgtgtctgttcaccgacttcgacagccagaccaacgtgtcccagagcaaggactccgacgtgtacatcaccgataagtgcgtgctggacatgcggagcatggacttcaagagcaactccgccgtggcctggtccaacaagtccgatttcgcctgcgccaacgccttcaacaacagcattatccccgaggacacattcttcccaagccccgagagcagctgcgacgtgaagctggtggaaaagagcttcgagacagacaccaacctgaacttccagaacctgagcgtgatcggcttcagaatcctgctgctgaaagtggccggctttaacctgctgatgaccctgcggctgtggtccagccgcgccaagagaagcggatctggcgtgaagcagaccctgaatttcgacctgctgaagctggctggcgacgtggaatccaacccaggcccttctagaggcgggatccacaccatggctacctacgaggtgctgtgcgaggtggcaagaaagctgggcaccgacgacagagaagtggtgctgttcctgctgaacgtgttcatccctcagcctacactggcccagctgatcggtgcactgagagccctgaaagaggaaggccggctgacctttcctctgctggccgaatgcctgttcagagccggaagaagggatctgctgcgggacctgctgcatctggaccccagatttctggaaagacacctggccggcaccatgagctacttcagcccttaccagctgaccgtgctgcacgttgacggcgaactgtgcgccagagatattcggagcctgatcttcctgagcaaggacaccatcggcagccggtctacccctcagacatttctgcactgggtgtactgcatggaaaacctggacctgctcggccccacagatgtggatgccctgatgtccatgctgagaagcctgagcagagtggacctccagagacaggtgcagacactgatgggactgcacctgagcggacctagccacagccagcactacagacacacccct

SEQ ID NO: 10662 - DNA, 1866 bp, Artificial Sequence
  Synthetic Polynucloetide
atggccttaccagtgaccgccttgctcctgccgctggccttgctgctccacgccgccaggccggacatccagatgacacagagccctagcagcctgtctgccagcgtgggagacagagtgaccatcacctgtagagccagccaggacatcagcaactacctgaactggtatcagcagaagcccggcaaggcccctaagctgctgatctactacaccagcagactgcacagcggcgtgcccagcagattttctggctctggcagcggcaccgacttcaccctgacaatatctagcctccagcctgaggacttcgccacctactattgccagcagggcaacaccctgccttggacatttggacagggcaccaaggtggaaatcaagagactcgagatccagaaccctgatcctgccgtgtaccagctgcgggatagcaagagcagcgacaagagcgtgtgtctgttcaccgacttcgacagccagaccaacgtgtcccagagcaaggactccgacgtgtacatcaccgataagtgcgtgctggacatgcggagcatggacttcaagagcaactccgccgtggcctggtccaacaagtccgatttcgcctgcgccaacgccttcaacaacagcattatccccgaggacacattcttcccaagccccgagagcagctgcgacgtgaagctggtggaaaagagcttcgagacagacaccaacctgaacttccagaacctgagcgtgatcggcttcagaatcctgctgctgaaagtggccggctttaacctgctgatgaccctgcggctgtggtccagccgcgccaagagaagcggatctggcgtgaagcagaccctgaatttcgacctgctgaagctggctggcgacgtggaatccaacccaggccctactagtatggactggatttggcgcatccttttccttgtcggcgctgctaccggcgcgcattccttcgaagaagtgcagctggttgaatcaggtggcggcctggttcaacctggcggatctctgagactgagctgtgccgccagcggcttcaccttcagcgactactttatgagctgggtccgacaggcccctggcaaaggacttgaatgggtcgccaccatcagcaatggcggcacctacacttactaccccgacagcgtgaagggcagattcaccatctccagagacaacagcaagaacaccctgtacctccagatgaactccctgagagccgaggacaccgccgtgtactactgcgccagattcgacggctacatcttcgactattggggccagggcaccctggtcacagtctcttctacgcgtgaggacctgaagaacgtgttcccacctgaggtggccgtgttcgagcctagcgaggccgagatcagccacacccagaaagccaccctcgtgtgcctggctaccggcttctaccccgaccatgtggaactgtcttggtgggtcaacggcaaagaggtgcacagcggcgtgtgtaccgacccccagccactgaaagaacagcccgccctgaacgacagccggtactgcctgagcagcagactgagagtgtccgccaccttctggcagaacccccggaaccacttcagatgccaggtgcagttctacggcctgagcgagaacgacgagtggacccaggacagagccaagcccgtgacccagatcgtgtctgccgaagcctggggcagagccgattgcggctttaccagcgagagctaccagcagggcgtgctgagcgccaccatcctgtacgagatcctgctgggcaaggccaccctgtacgccgtgctggtgtctgccctggtgctgatggctatggtcaagcggaaggacagccgggga

SEQ ID NO: 10663 - DNA, 2532 bp, Artificial Sequence
  Synthetic Polynucloetide
atggccttaccagtgaccgccttgctcctgccgctggccttgctgctccacgccgccaggccggacatccagatgacacagagccctagcagcctgtctgccagcgtgggagacagagtgaccatcacctgtagagccagccaggacatcagcaactacctgaactggtatcagcagaagcccggcaaggcccctaagctgctgatctactacaccagcagactgcacagcggcgtgcccagcagattttctggctctggcagcggcaccgacttcaccctgacaatatctagcctccagcctgaggacttcgccacctactattgccagcagggcaacaccctgccttggacatttggacagggcaccaaggtggaaatcaagagactcgagatccagaaccctgatcctgccgtgtaccagctgcgggatagcaagagcagcgacaagagcgtgtgtctgttcaccgacttcgacagccagaccaacgtgtcccagagcaaggactccgacgtgtacatcaccgataagtgcgtgctggacatgcggagcatggacttcaagagcaactccgccgtggcctggtccaacaagtccgatttcgcctgcgccaacgccttcaacaacagcattatccccgaggacacattcttcccaagccccgagagcagctgcgacgtgaagctggtggaaaagagcttcgagacagacaccaacctgaacttccagaacctgagcgtgatcggcttcagaatcctgctgctgaaagtggccggctttaacctgctgatgaccctgcggctgtggtccagccgcgccaagagaagcggatctggcgtgaagcagaccctgaatttcgacctgctgaagctggctggcgacgtggaatccaacccaggccctactagtatggactggatttggcgcatccttttccttgtcggcgctgctaccggcgcgcattccttcgaagaagtgcagctggttgaatcaggtggcggcctggttcaacctggcggatctctgagactgagctgtgccgccagcggcttcaccttcagcgactactttatgagctgggtccgacaggcccctggcaaaggacttgaatgggtcgccaccatcagcaatggcggcacctacacttactaccccgacagcgtgaagggcagattcaccatctccagagacaacagcaagaacaccctgtacctccagatgaactccctgagagccgaggacaccgccgtgtactactgcgccagattcgacggctacatcttcgactattggggccagggcaccctggtcacagtctcttctacgcgtgaggacctgaagaacgtgttcccacctgaggtggccgtgttcgagcctagcgaggccgagatcagccacacccagaaagccaccctcgtgtgcctggctaccggcttctaccccgaccatgtggaactgtcttggtgggtcaacggcaaagaggtgcacagcggcgtgtgtaccgacccccagccactgaaagaacagcccgccctgaacgacagccggtactgcctgagcagcagactgagagtgtccgccaccttctggcagaacccccggaaccacttcagatgccaggtgcagttctacggcctgagcgagaacgacgagtggacccaggacagagccaagcccgtgacccagatcgtgtctgccgaagcctggggcagagccgattgcggctttaccagcgagagctaccagcagggcgtgctgagcgccaccatcctgtacgagatcctgctgggcaaggccaccctgtacgccgtgctggtgtctgccctggtgctgatggctatggtcaagcggaaggacagccggggaagggccaagcgatctggatctggagcaacaaacttctcactactcaaacaagcaggtgacgtggaggagaatcccgggccttctagaggcgggatccacaccatggctacctacgaggtgctgtgcgaggtggcaagaaagctgggcaccgacgacagagaagtggtgctgttcctgctgaacgtgttcatccctcagcctacactggcccagctgatcggtgcactgagagccctgaaagaggaaggccggctgacctttcctctgctggccgaatgcctgttcagagccggaagaagggatctgctgcgggacctgctgcatctggaccccagatttctggaaagacacctggccggcaccatgagctacttcagcccttaccagctgaccgtgctgcacgttgacggcgaactgtgcgccagagatattcggagcctgatcttcctgagcaaggacaccatcggcagccggtctacccctcagacatttctgcactgggtgtactgcatggaaaacctggacctgctcggccccacagatgtggatgccctgatgtccatgctgagaagcctgagcagagtggacctccagagacaggtgcagacactgatgggactgcacctgagcggacctagccacagccagcactacagacacacccct

SEQ ID NO: 10664 - DNA, 2691 bp, Artificial Sequence
  Synthetic Polynucloetide
atggccttaccagtgaccgccttgctcctgccgctggccttgctgctccacgccgccaggccgctcgaggggaaaccaattcccaaccctcttctgggactggattcaaccggcagcggcgaggacctgaagaacgtgttcccacctgaggtggccgtgttcgagcctagcaaggccgagatcgcccacacccagaaagccaccctcgtgtgcctggctaccggcttctaccccgaccatgtggaactgtcttggtgggtcaacggcaaagaggtgcacagcggcgtgtgtaccgacccccagccactgaaagaacagcccgccctgaacgacagccggtactgcctgagcagcagactgagagtgtccgccaccttctggcagaacccccggaaccacttcagatgccaggtgcagttctacggcctgagcgagaacgacgagtggacccaggacagagccaagcccgtgacccagatcgtgtctgccgaagcctggggcagagccgattgcggcatcaccagcgccagctaccaccagggcgtgctgagcgccaccatcctgtacgagatcctgctgggcaaggccaccctgtacgccgtgctggtgtctgccctggtgctgatggctatggtcaagcggaaggacagccggggaagggccaagcgatctggatctggagcaacaaacttctcactactcaaacaagcaggtgacgtggaggagaatcccgggcctactagcatggccttaccagtgaccgccttgctcctgccgctggccttgctgctccacgccgccaggccggacatccagatgacacagagccctagcagcctgtctgccagcgtgggagacagagtgaccatcacctgtagagccagccaggacatcagcaactacctgaactggtatcagcagaagcccggcaaggcccctaagctgctgatctactacaccagcagactgcacagcggcgtgcccagcagattttctggctctggcagcggcaccgacttcaccctgacaatatctagcctccagcctgaggacttcgccacctactattgccagcagggcaacaccctgccttggacatttggacagggcaccaaggtggaaatcaagagaggcggaggcggaagtggaggcggaggatctggcggcggaggctctgaagtgcagctggttgaatcaggtggcggcctggttcaacctggcggatctctgagactgagctgtgccgccagcggcttcaccttcagcgactactttatgagctgggtccgacaggcccctggcaaaggacttgaatgggtcgccaccatcagcaatggcggcacctacacttactaccccgacagcgtgaagggcagattcaccatctccagagacaacagcaagaacaccctgtacctccagatgaactccctgagagccgaggacaccgccgtgtactactgcgccagattcgacggctacatcttcgactattggggccagggcaccctggtcacagtctcttctacgcgtgagcagaaactgatctcggaagaggatgggagcggcatccagaaccctgatcctgccgtgtaccagctgcgggatagcaagagcagcgacaagagcgtgtgtctgttcaccgacttcgacagccagaccaacgtgtcccagagcaaggactccgacgtgtacatcaccgataagtgcgtgctggacatgcggagcatggacttcaagagcaactccgccgtggcctggtccaacaagtccgatttcgcctgcgccaacgccttcaacaacagcattatccccgaggacacattcttcccaagcagcgacgtgccctgcgacgtgaagctggtggaaaagagcttcgagacagacaccaacctgaacttccagaacctgagcgtgatcggcttcagaatcctgctgctgaaagtggccggctttaacctgctgatgaccctgcggctgtggtccagccgcgccaagagaagcggatctggcgtgaagcagaccctgaatttcgacctgctgaagctggctggcgacgtggaatccaacccaggcccttctagaggccatatgaccgagtacaagcccacggtgcgcctcgccacccgcgacgacgtccccagggccgtacgcaccctcgccgccgcgttcgccgactaccccgccacgcgccacaccgtcgatccggaccgccacatcgagcgggtcaccgagctgcaagaactcttcctcacgcgcgtcgggctcgacatcggcaaggtgtgggtcgcggacgacggcgccgcggtggcggtctggaccacgccggagagcgtcgaagcgggggcggtgttcgccgagatcggcccgcgcatggccgagttgagcggttcccggctggccgcgcagcaacagatggaaggcctcctggcgccgcaccggcccaaggagcccgcgtggttcctggccaccgtcggcgtctcgcccgaccaccagggcaagggtctgggcagcgccgtcgtgctccccggagtggaggcggccgagcgcgccggggtgcccgccttcctggagacctccgcgccccgcaacctccccttctacgagcggctcggcttcaccgtcaccgccgacgtcgaggtgcccgaaggaccgcgcacctggtgcatgacccgcaagcccggtgcctga

SEQ ID NO: 10665 - DNA, 2694 bp, Artificial Sequence
  Synthetic Polynucloetide
atggccttaccagtgaccgccttgctcctgccgctggccttgctgctccacgccgccaggccgctcgagcagaaactgatctcggaagaggatctgggctccggcgatcgccctgatcctgccgtgtaccagctgcgggatagcaagagcagcgacaagagcgtgtgtctgttcaccgacttcgacagccagaccaacgtgtcccagagcaaggactccgacgtgtacatcaccgataagtgcgtgctggacatgcggagcatggacttcaagagcaactccgccgtggcctggtccaacaagtccgatttcgcctgcgccaacgccttcaacaacagcattatccccgaggacacattcttcccaagccccgagagcagctgcgacgtgaagctggtggaaaagagcttcgagacagacaccaacctgaacttccagaacctgagcgtgatcggcttcagaatcctgctgctgaaagtggccggctttaacctgctgatgaccctgcggctgtggtccagctctagtcgcgccaagagaagcggatctggcgtgaagcagaccctgaatttcgacctgctgaagctggctggcgacgtggaatccaacccaggccccactagcatggccttaccagtgaccgccttgctcctgccgctggccttgctgctccacgccgccaggccggacatccagatgacacagagccctagcagcctgtctgccagcgtgggagacagagtgaccatcacctgtagagccagccaggacatcagcaactacctgaactggtatcagcagaagcccggcaaggcccctaagctgctgatctactacaccagcagactgcacagcggcgtgcccagcagattttctggctctggcagcggcaccgacttcaccctgacaatatctagcctccagcctgaggacttcgccacctactattgccagcagggcaacaccctgccttggacatttggacagggcaccaaggtggaaatcaagagaggcggaggcggaagtggaggcggaggatctggcggcggaggctctgaagtgcagctggttgaatcaggtggcggcctggttcaacctggcggatctctgagactgagctgtgccgccagcggcttcaccttcagcgactactttatgagctgggtccgacaggcccctggcaaaggacttgaatgggtcgccaccatcagcaatggcggcacctacacttactaccccgacagcgtgaagggcagattcaccatctccagagacaacagcaagaacaccctgtacctccagatgaactccctgagagccgaggacaccgccgtgtactactgcgccagattcgacggctacatcttcgactattggggccagggcaccctggtcacagtctcttctacgcgtgggaaaccaattcccaaccctcttctgggactggattcaaccggcagcggcgaggacctgaagaacgtgttcccacctgaggtggccgtgttcgagcctagcgaggccgagatcagccacacccagaaagccaccctcgtgtgcctggctaccggcttctaccccgaccatgtggaactgtcttggtgggtcaacggcaaagaggtgcacagcggcgtgtgtaccgacccccagccactgaaagaacagcccgccctgaacgacagccggtactgcctgagcagcagactgagagtgtccgccaccttctggcagaacccccggaaccacttcagatgccaggtgcagttctacggcctgagcgagaacgacgagtggacccaggacagagccaagcccgtgacccagatcgtgtctgccgaagcctggggcagagccgattgcggctttaccagcgagagctaccagcagggcgtgctgagcgccaccatcctgtacgagatcctgctgggcaaggccaccctgtacgccgtgctggtgtctgccctggtgctgatggctatggtcaagcggaaggacagccggggaagggccaagcgatctggatctggagcaacaaacttctcactactcaaacaagcaggtgacgtggaggagaatcccgggccttctagaggccatatgaccgagtacaagcccacggtgcgcctcgccacccgcgacgacgtccccagggccgtacgcaccctcgccgccgcgttcgccgactaccccgccacgcgccacaccgtcgatccggaccgccacatcgagcgggtcaccgagctgcaagaactcttcctcacgcgcgtcgggctcgacatcggcaaggtgtgggtcgcggacgacggcgccgcggtggcggtctggaccacgccggagagcgtcgaagcgggggcggtgttcgccgagatcggcccgcgcatggccgagttgagcggttcccggctggccgcgcagcaacagatggaaggcctcctggcgccgcaccggcccaaggagcccgcgtggttcctggccaccgtcggcgtctcgcccgaccaccagggcaagggtctgggcagcgccgtcgtgctccccggagtggaggcggccgagcgcgccggggtgcccgccttcctggagacctccgcgccccgcaacctccccttctacgagcggctcggcttcaccgtcaccgccgacgtcgaggtgcccgaaggaccgcgcacctggtgcatgacccgcaagcccggtgcctga

SEQ ID NO: 10666 - DNA, 2556 bp, Artificial Sequence
  Synthetic Polynucloetide
atggccttaccagtgaccgccttgctcctgccgctggccttgctgctccacgccgccaggccggacatccagatgacacagagccctagcagcctgtctgccagcgtgggagacagagtgaccatcacctgtagagccagccaggacatcagcaactacctgaactggtatcagcagaagcccggcaaggcccctaagctgctgatctactacaccagcagactgcacagcggcgtgcccagcagattttctggctctggcagcggcaccgacttcaccctgacaatatctagcctccagcctgaggacttcgccacctactattgccagcagggcaacaccctgccttggacatttggacagggcaccaaggtggaaatcaagagactcgaggacctgaagaacgtgttcccacctgaggtggccgtgttcgagcctagcgaggccgagatcagccacacccagaaagccaccctcgtgtgcctggctaccggcttctaccccgaccatgtggaactgtcttggtgggtcaacggcaaagaggtgcacagcggcgtgtctaccgacccccagccactgaaagaacagcccgccctgaacgacagccggtactgcctgagcagcagactgagagtgtccgccaccttctggcagaacccccggaaccacttcagatgccaggtgcagttctacggcctgagcgagaacgacgagtggacccaggacagagccaagcccgtgacccagatcgtgtctgccgaagcctggggcagagccgattgcggctttaccagcgagagctaccagcagggcgtgctgagcgccaccatcctgtacgagatcctgctgggcaaggccaccctgtacgccgtgctggtgtctgccctggtgctgatggctatggtcaagcggaaggacagccggggaagggccaagcgatctggatctggagcaacaaacttctcactactcaaacaagcaggtgacgtggaggagaatcccgggcctactagtatggactggatttggcgcatccttttccttgtcggcgctgctaccggcgcgcattccttcgaagaagtgcagctggttgaatcaggtggcggcctggttcaacctggcggatctctgagactgagctgtgccgccagcggcttcaccttcagcgactactttatgagctgggtccgacaggcccctggcaaaggacttgaatgggtcgccaccatcagcaatggcggcacctacacttactaccccgacagcgtgaagggcagattcaccatctccagagacaacagcaagaacaccctgtacctccagatgaactccctgagagccgaggacaccgccgtgtactactgcgccagattcgacggctacatcttcgactattggggccagggcaccctggtcacagtctcttctacgcgtatccagaaccctgatcctgccgtgtaccagctgcgggatagcaagagcagcgacaagagcgtgtgtctgttcaccgacttcgacagccagaccaacgtgtcccagagcaaggactccgacgtgtacatcaccgataagaccgtgctggacatgcggagcatggacttcaagagcaactccgccgtggcctggtccaacaagtccgatttcgcctgcgccaacgccttcaacaacagcattatccccgaggacacattcttcccaagccccgagagcagctgcgacgtgaagctggtggaaaagagcttcgagacagacaccaacctgaacttccagaacctgagcgtgatcggcttcagaatcctgctgctgaaagtggccggctttaacctgctgatgaccctgcggctgtggtccagccgcgccaagagaagcggatctggcgtgaagcagaccctgaatttcgacctgctgaagctggctggcgacgtggaatccaacccaggcccttctagaggccatatgaccgagtacaagcccacggtgcgcctcgccacccgcgacgacgtccccagggccgtacgcaccctcgccgccgcgttcgccgactaccccgccacgcgccacaccgtcgatccggaccgccacatcgagcgggtcaccgagctgcaagaactcttcctcacgcgcgtcgggctcgacatcggcaaggtgtgggtcgcggacgacggcgccgcggtggcggtctggaccacgccggagagcgtcgaagcgggggcggtgttcgccgagatcggcccgcgcatggccgagttgagcggttcccggctggccgcgcagcaacagatggaaggcctcctggcgccgcaccggcccaaggagcccgcgtggttcctggccaccgtcggcgtctcgcccgaccaccagggcaagggtctgggcagcgccgtcgtgctccccggagtggaggcggccgagcgcgccggggtgcccgccttcctggagacctccgcgccccgcaacctccccttctacgagcggctcggcttcaccgtcaccgccgacgtcgaggtgcccgaaggaccgcgcacctggtgcatgacccgcaagcccggtgcctga

SEQ ID NO: 10667 - DNA, 2802 bp, Artificial Sequence
  Synthetic Polynucloetide
atggccttaccagtgaccgccttgctcctgccgctggccttgctgctccacgccgccaggccggacatccagatgacacagagccctagcagcctgtctgccagcgtgggagacagagtgaccatcacctgtagagccagccaggacatcagcaactacctgaactggtatcagcagaagcccggcaaggcccctaagctgctgatctactacaccagcagactgcacagcggcgtgcccagcagattttctggctctggcagcggcaccgacttcaccctgacaatatctagcctccagcctgaggacttcgccacctactattgccagcagggcaacaccctgccttggacatttggacagggcaccaaggtggaaatcaagagactcgaggacctgaagaacgtgttcccacctgaggtggccgtgttcgagcctagcgaggccgagatcagccacacccagaaagccaccctcgtgtgcctggctaccggcttctaccccgaccatgtggaactgtcttggtgggtcaacggcaaagaggtgcacagcggcgtgtctaccgacccccagccactgaaagaacagcccgccctgaacgacagccggtactgcctgagcagcagactgagagtgtccgccaccttctggcagaacccccggaaccacttcagatgccaggtgcagttctacggcctgagcgagaacgacgagtggacccaggacagagccaagcccgtgacccagatcgtgtctgccgaagcctggggcagagccgattgcggctttaccagcgagagctaccagcagggcgtgctgagcgccaccatcctgtacgagatcctgctgggcaaggccaccctgtacgccgtgctggtgtctgccctggtgctgatggctatggtcaagcggaaggacagccggggaagggccaagcgatctggatctggagcaacaaacttctcactactcaaacaagcaggtgacgtggaggagaatcccgggcctactagtatggactggatttggcgcatccttttccttgtcggcgctgctaccggcgcgcattccttcgaagaagtgcagctggttgaatcaggtggcggcctggttcaacctggcggatctctgagactgagctgtgccgccagcggcttcaccttcagcgactactttatgagctgggtccgacaggcccctggcaaaggacttgaatgggtcgccaccatcagcaatggcggcacctacacttactaccccgacagcgtgaagggcagattcaccatctccagagacaacagcaagaacaccctgtacctccagatgaactccctgagagccgaggacaccgccgtgtactactgcgccagattcgacggctacatcttcgactattggggccagggcaccctggtcacagtctcttctacgcgtgagcagaaactgatctcggaagaggatgggagcggcaccccattcccttctctggcccctcccatcatgctgctggtggacggcaagcagcagatggtggtcgtgtgcctggtgctggatgtggccccacctggactggacagccccatctggtttagcgccggcaatggctctgccctggacgcctttacctacggcccaagccctgccaccgatggcacctggacaaatctggcccacctgagcctgcccagcgaggaactggcttcttgggagcctctcgtgtgccacacaggacctggcgctgagggacacagcagatccacccagcctatgcacctgtctggcgaggccagcaccgccagaacctgtcctcaggaacctctgagaggcacccctggcggagcactgtggctgggagtgctgagactgctgctgttcaagctgctgctgtttgacctgctgctgacctgctcctgtctgtgcgatcctgccggccctctgccttctcctgccaccaccacaagactgagagccctgggcagccacagactgcaccctgccacagagacaggcggcagagaggccacaagcagccctagaccccagcccagagacagaagatggggcgataccccccctggcagaaagcctggatctccagtccgcgccaagagaagcggatctggcgtgaagcagaccctgaatttcgacctgctgaagctggctggcgacgtggaatccaacccaggcccttctagaggccatatgaccgagtacaagcccacggtgcgcctcgccacccgcgacgacgtccccagggccgtacgcaccctcgccgccgcgttcgccgactaccccgccacgcgccacaccgtcgatccggaccgccacatcgagcgggtcaccgagctgcaagaactcttcctcacgcgcgtcgggctcgacatcggcaaggtgtgggtcgcggacgacggcgccgcggtggcggtctggaccacgccggagagcgtcgaagcgggggcggtgttcgccgagatcggcccgcgcatggccgagttgagcggttcccggctggccgcgcagcaacagatggaaggcctcctggcgccgcaccggcccaaggagcccgcgtggttcctggccaccgtcggcgtctcgcccgaccaccagggcaagggtctgggcagcgccgtcgtgctccccggagtggaggcggccgagcgcgccggggtgcccgccttcctggagacctccgcgccccgcaacctccccttctacgagcggctcggcttcaccgtcaccgccgacgtcgaggtgcccgaaggaccgcgcacctggtgcatgacccgcaagcccggtgcctga

SEQ ID NO: 10668 - DNA, 2856 bp, Artificial Sequence
  Synthetic Polynucloetide
atggccttaccagtgaccgccttgctcctgccgctggccttgctgctccacgccgccaggccgctcgaggacctgaagaacgtgttcccacctgaggtggccgtgttcgagcctagcgaggccgagatcagccacacccagaaagccaccctcgtgtgcctggctaccggcttctaccccgaccatgtggaactgtcttggtgggtcaacggcaaagaggtgcacagcggcgtgtctaccgacccccagccactgaaagaacagcccgccctgaacgacagccggtactgcctgagcagcagactgagagtgtccgccaccttctggcagaacccccggaaccacttcagatgccaggtgcagttctacggcctgagcgagaacgacgagtggacccaggacagagccaagcccgtgacccagatcgtgtctgccgaagcctggggcagagccgattgcggctttaccagcgagagctaccagcagggcgtgctgagcgccaccatcctgtacgagatcctgctgggcaaggccaccctgtacgccgtgctggtgtctgccctggtgctgatggctatggtcaagcggaaggacagccggggaagggccaagcgatctggatctggagcaacaaacttctcactactcaaacaagcaggtgacgtggaggagaatcccgggcctactagcatggccttaccagtgaccgccttgctcctgccgctggccttgctgctccacgccgccaggccggacatccagatgacacagagccctagcagcctgtctgccagcgtgggagacagagtgaccatcacctgtagagccagccaggacatcagcaactacctgaactggtatcagcagaagcccggcaaggcccctaagctgctgatctactacaccagcagactgcacagcggcgtgcccagcagattttctggctctggcagcggcaccgacttcaccctgacaatatctagcctccagcctgaggacttcgccacctactattgccagcagggcaacaccctgccttggacatttggacagggcaccaaggtggaaatcaagagaggcggaggcggaagtggaggcggaggatctggcggcggaggctctgaagtgcagctggttgaatcaggtggcggcctggttcaacctggcggatctctgagactgagctgtgccgccagcggcttcaccttcagcgactactttatgagctgggtccgacaggcccctggcaaaggacttgaatgggtcgccaccatcagcaatggcggcacctacacttactaccccgacagcgtgaagggcagattcaccatctccagagacaacagcaagaacaccctgtacctccagatgaactccctgagagccgaggacaccgccgtgtactactgcgccagattcgacggctacatcttcgactattggggccagggcaccctggtcacagtctcttctacgcgtgagcagaaactgatctcggaagaggatctggggagcggcaccccattcccttctctggcccctcccatcatgctgctggtggacggcaagcagcagatggtggtcgtgtgcctggtgctggatgtggccccacctggactggacagccccatctggtttagcgccggcaatggctctgccctggacgcctttacctacggcccaagccctgccaccgatggcacctggacaaatctggcccacctgagcctgcccagcgaggaactggcttcttgggagcctctcgtgtgccacacaggacctggcgctgagggacacagcagatccacccagcctatgcacctgtctggcgaggccagcaccgccagaacctgtcctcaggaacctctgagaggcacccctggcggagcactgtggctgggagtgctgagactgctgctgttcaagctgctgctgtttgacctgctgctgacctgctcctgtctgtgcgatcctgccggccctctgccttctcctgccaccaccacaagactgagagccctgggcagccacagactgcaccctgccacagagacaggcggcagagaggccacaagcagccctagaccccagcccagagacagaagatggggcgataccccccctggcagaaagcctggatctccagtccgcgccaagagaagcggatctggcgtgaagcagaccctgaatttcgacctgctgaagctggctggcgacgtggaatccaacccaggcccttctagatctagaggccatatgaccgagtacaagcccacggtgcgcctcgccacccgcgacgacgtccccagggccgtacgcaccctcgccgccgcgttcgccgactaccccgccacgcgccacaccgtcgatccggaccgccacatcgagcgggtcaccgagctgcaagaactcttcctcacgcgcgtcgggctcgacatcggcaaggtgtgggtcgcggacgacggcgccgcggtggcggtctggaccacgccggagagcgtcgaagcgggggcggtgttcgccgagatcggcccgcgcatggccgagttgagcggttcccggctggccgcgcagcaacagatggaaggcctcctggcgccgcaccggcccaaggagcccgcgtggttcctggccaccgtcggcgtctcgcccgaccaccagggcaagggtctgggcagcgccgtcgtgctccccggagtggaggcggccgagcgcgccggggtgcccgccttcctggagacctccgcgccccgcaacctccccttctacgagcggctcggcttcaccgtcaccgccgacgtcgaggtgcccgaaggaccgcgcacctggtgcatgacccgcaagcccggtgcctga

SEQ ID NO: 10669 - DNA, 2667 bp, Artificial Sequence
  Synthetic Polynucloetide
atggccttaccagtgaccgccttgctcctgccgctggccttgctgctccacgccgccaggccggacatccagatgacacagagccctagcagcctgtctgccagcgtgggagacagagtgaccatcacctgtagagccagccaggacatcagcaactacctgaactggtatcagcagaagcccggcaaggcccctaagctgctgatctactacaccagcagactgcacagcggcgtgcccagcagattttctggctctggcagcggcaccgacttcaccctgacaatatctagcctccagcctgaggacttcgccacctactattgccagcagggcaacaccctgccttggacatttggacagggcaccaaggtggaaatcaagagactcgaggggaaaccaattcccaaccctcttctgggactggattcaaccggcagcggcgacaagcagctggacgccgacgtgtcccccaagcctaccatcttcctgccctctatcgccgagacaaagctccagaaggccggcacctacctgtgcctgctggaaaagttcttcccagatgtgattaagatccactggcaggaaaagaagtccaacaccatcctgggcagccaggaaggcaacaccatgaagaccaacgacacctacatgaagttcagctggctgaccgtgcccgagaagtccctggacaaagaacacagatgcatcgtgcggcacgaaaacaacaagaacggcgtggaccaggaaatcatcttcccacccatcaagaccgatgtgattacaatggaccccaaggacaactgctccaaggacgccaacgataccctgctgctccagctgaccaacaccagcgcctactacatgtacttgttgctgctgctgaagtccgtggtgtacttcgccatcatcacatgctgcctgctgcggagaaccgccttctgctgcaacggcgagaagtctagggccaagcgatctggatctggagcaacaaacttctcactactcaaacaagcaggtgacgtggaggagaatcccgggcctactagtatggactggatttggcgcatccttttccttgtcggcgctgctaccggcgcgcattccttcgaagaagtgcagctggttgaatcaggtggcggcctggttcaacctggcggatctctgagactgagctgtgccgccagcggcttcaccttcagcgactactttatgagctgggtccgacaggcccctggcaaaggacttgaatgggtcgccaccatcagcaatggcggcacctacacttactaccccgacagcgtgaagggcagattcaccatctccagagacaacagcaagaacaccctgtacctccagatgaactccctgagagccgaggacaccgccgtgtactactgcgccagattcgacggctacatcttcgactattggggccagggcaccctggtcacagtctcttctacgcgtgagcagaaactgatctcggaagaggatgggagcggcagccagcctcacaccaagcccagcgtgttcgtgatgaagaacggcaccaacgtggcctgcctcgtgaaagagttctaccccaaggacatcaggatcaacctggtgtccagcaagaagatcaccgagttcgaccccgccatcgtgatctcccccagcggcaagtacaacgccgtgaagctggggaagtacgaggacagcaacagcgtgacctgctccgtgcagcacgacaacaagaccgtgcacagcaccgactttgaagtgaaaaccgactccaccgaccacgtgaagcccaaagagacagagaacaccaagcagcccagcaagagctgccacaagcccaaggccatcgtgcacaccgagaaagtgaacatgatgagcctgaccgtgctgggcctgcggatgctgttcgccaaaaccgtggccgtgaacttcctgctgaccgccaagctgttcttcctccgcgccaagagaagcggatctggcgtgaagcagaccctgaatttcgacctgctgaagctggctggcgacgtggaatccaacccaggcccttctagaggccatatgaccgagtacaagcccacggtgcgcctcgccacccgcgacgacgtccccagggccgtacgcaccctcgccgccgcgttcgccgactaccccgccacgcgccacaccgtcgatccggaccgccacatcgagcgggtcaccgagctgcaagaactcttcctcacgcgcgtcgggctcgacatcggcaaggtgtgggtcgcggacgacggcgccgcggtggcggtctggaccacgccggagagcgtcgaagcgggggcggtgttcgccgagatcggcccgcgcatggccgagttgagcggttcccggctggccgcgcagcaacagatggaaggcctcctggcgccgcaccggcccaaggagcccgcgtggttcctggccaccgtcggcgtctcgcccgaccaccagggcaagggtctgggcagcgccgtcgtgctccccggagtggaggcggccgagcgcgccggggtgcccgccttcctggagacctccgcgccccgcaacctccccttctacgagcggctcggcttcaccgtcaccgccgacgtcgaggtgcccgaaggaccgcgcacctggtgcatgacccgcaagcccggtgcctga

SEQ ID NO: 10670 - DNA, 1878 bp, Artificial Sequence
  Synthetic Polynucloetide
atggccttaccagtgaccgccttgctcctgccgctggccttgctgctccacgccgccaggccggacatccagatgacacagagccctagcagcctgtctgccagcgtgggagacagagtgaccatcacctgtagagccagccaggacatcagcaactacctgaactggtatcagcagaagcccggcaaggcccctaagctgctgatctactacaccagcagactgcacagcggcgtgcccagcagattttctggctctggcagcggcaccgacttcaccctgacaatatctagcctccagcctgaggacttcgccacctactattgccagcagggcaacaccctgccttggacatttggacagggcaccaaggtggaaatcaagagactcgagagccagcctcacaccaagcccagcgtgttcgtgatgaagaacggcaccaacgtggcctgcctcgtgaaagagttctaccccaaggacatcaggatcaacctggtgtccagcaagaagatcaccgagttcgaccccgccatcgtgatctcccccagcggcaagtacaacgccgtgaagctggggaagtacgaggacagcaacagcgtgacctgctccgtgcagcacgacaacaagaccgtgcacagcaccgactttgaagtgaaaaccgactccaccgaccacgtgaagcccaaagagacagagaacaccaagcagcccagcaagagctgccacaagcccaaggccatcgtgcacaccgagaaagtgaacatgatgagcctgaccgtgctgggcctgcggatgctgttcgccaaaaccgtggccgtgaacttcctgctgaccgccaagctgttcttcctcagggccaagcgatctggatctggagcaacaaacttctcactactcaaacaagcaggtgacgtggaggagaatcccgggcctactagtatggactggatttggcgcatccttttccttgtcggcgctgctaccggcgcgcattccttcgaagaagtgcagctggttgaatcaggtggcggcctggttcaacctggcggatctctgagactgagctgtgccgccagcggcttcaccttcagcgactactttatgagctgggtccgacaggcccctggcaaaggacttgaatgggtcgccaccatcagcaatggcggcacctacacttactaccccgacagcgtgaagggcagattcaccatctccagagacaacagcaagaacaccctgtacctccagatgaactccctgagagccgaggacaccgccgtgtactactgcgccagattcgacggctacatcttcgactattggggccagggcaccctggtcacagtctcttctacgcgtgacaagcagctggacgccgacgtgtcccccaagcctaccatcttcctgccctctatcgccgagacaaagctccagaaggccggcacctacctgtgcctgctggaaaagttcttcccagatgtgattaagatccactggcaggaaaagaagtccaacaccatcctgggcagccaggaaggcaacaccatgaagaccaacgacacctacatgaagttcagctggctgaccgtgcccgagaagtccctggacaaagaacacagatgcatcgtgcggcacgaaaacaacaagaacggcgtggaccaggaaatcatcttcccacccatcaagaccgatgtgattacaatggaccccaaggacaactgctccaaggacgccaacgataccctgctgctccagctgaccaacaccagcgcctactacatgtacttgttgctgctgctgaagtccgtggtgtacttcgccatcatcacatgctgcctgctgcggagaaccgccttctgctgcaacggcgagaagtct

SEQ ID NO: 10671 - DNA, 2712 bp, Artificial Sequence
  Synthetic Polynucloetide
atggccttaccagtgaccgccttgctcctgccgctggccttgctgctccacgccgccaggccgctcgaggggaaaccaattcccaaccctcttctgggactggattcaaccggcagcggcgacaagcagctggacgccgacgtgtcccccaagcctaccatcttcctgccctctatcgccgagacaaagctccagaaggccggcacctacctgtgcctgctggaaaagttcttcccagatgtgattaagatccactggcaggaaaagaagtccaacaccatcctgggcagccaggaaggcaacaccatgaagaccaacgacacctacatgaagttcagctggctgaccgtgcccgagaagtccctggacaaagaacacagatgcatcgtgcggcacgaaaacaacaagaacggcgtggaccaggaaatcatcttcccacccatcaagaccgatgtgattacaatggaccccaaggacaactgctccaaggacgccaacgataccctgctgctccagctgaccaacaccagcgcctactacatgtacttgttgctgctgctgaagtccgtggtgtacttcgccatcatcacatgctgcctgctgcggagaaccgccttctgctgcaacggcgagaagtctagggccaagcgatctggatctggagcaacaaacttctcactactcaaacaagcaggtgacgtggaggagaatcccgggcctactagcatggccttaccagtgaccgccttgctcctgccgctggccttgctgctccacgccgccaggccggacatccagatgacacagagccctagcagcctgtctgccagcgtgggagacagagtgaccatcacctgtagagccagccaggacatcagcaactacctgaactggtatcagcagaagcccggcaaggcccctaagctgctgatctactacaccagcagactgcacagcggcgtgcccagcagattttctggctctggcagcggcaccgacttcaccctgacaatatctagcctccagcctgaggacttcgccacctactattgccagcagggcaacaccctgccttggacatttggacagggcaccaaggtggaaatcaagagaggcggaggcggaagtggaggcggaggatctggcggcggaggctctgaagtgcagctggttgaatcaggtggcggcctggttcaacctggcggatctctgagactgagctgtgccgccagcggcttcaccttcagcgactactttatgagctgggtccgacaggcccctggcaaaggacttgaatgggtcgccaccatcagcaatggcggcacctacacttactaccccgacagcgtgaagggcagattcaccatctccagagacaacagcaagaacaccctgtacctccagatgaactccctgagagccgaggacaccgccgtgtactactgcgccagattcgacggctacatcttcgactattggggccagggcaccctggtcacagtctcttctacgcgtgagcagaaactgatctcggaagaggatgggagcggcagccagcctcacaccaagcccagcgtgttcgtgatgaagaacggcaccaacgtggcctgcctcgtgaaagagttctaccccaaggacatcaggatcaacctggtgtccagcaagaagatcaccgagttcgaccccgccatcgtgatctcccccagcggcaagtacaacgccgtgaagctggggaagtacgaggacagcaacagcgtgacctgctccgtgcagcacgacaacaagaccgtgcacagcaccgactttgaagtgaaaaccgactccaccgaccacgtgaagcccaaagagacagagaacaccaagcagcccagcaagagctgccacaagcccaaggccatcgtgcacaccgagaaagtgaacatgatgagcctgaccgtgctgggcctgcggatgctgttcgccaaaaccgtggccgtgaacttcctgctgaccgccaagctgttcttcctccgcgccaagagaagcggatctggcgtgaagcagaccctgaatttcgacctgctgaagctggctggcgacgtggaatccaacccaggcccttctagaggccatatgaccgagtacaagcccacggtgcgcctcgccacccgcgacgacgtccccagggccgtacgcaccctcgccgccgcgttcgccgactaccccgccacgcgccacaccgtcgatccggaccgccacatcgagcgggtcaccgagctgcaagaactcttcctcacgcgcgtcgggctcgacatcggcaaggtgtgggtcgcggacgacggcgccgcggtggcggtctggaccacgccggagagcgtcgaagcgggggcggtgttcgccgagatcggcccgcgcatggccgagttgagcggttcccggctggccgcgcagcaacagatggaaggcctcctggcgccgcaccggcccaaggagcccgcgtggttcctggccaccgtcggcgtctcgcccgaccaccagggcaagggtctgggcagcgccgtcgtgctccccggagtggaggcggccgagcgcgccggggtgcccgccttcctggagacctccgcgccccgcaacctccccttctacgagcggctcggcttcaccgtcaccgccgacgtcgaggtgcccgaaggaccgcgcacctggtgcatgacccgcaagcccggtgcctga

SEQ ID NO: 10672 - DNA, 3087 bp, Artificial Sequence
  Synthetic Polynucloetide
atggccttaccagtgaccgccttgctcctgccgctggccttgctgctccacgccgccaggccggacatccagatgacacagagccctagcagcctgtctgccagcgtgggagacagagtgaccatcacctgtagagccagccaggacatcagcaactacctgaactggtatcagcagaagcccggcaaggcccctaagctgctgatctactacaccagcagactgcacagcggcgtgcccagcagattttctggctctggcagcggcaccgacttcaccctgacaatatctagcctccagcctgaggacttcgccacctactattgccagcagggcaacaccctgccttggacatttggacagggcaccaaggtggaaatcaagagaggacagcctaaggccaatcctaccgtgacactgttccctccaagcagcgaagaactccaggccaacaaggccacacttgtgtgcctgatctccgacttctaccctggggctgtgacagtggcttggaaggccgatggatctcctgtgaaagccggcgtggaaaccaccaagccatccaagcagagcaacaacaaatacgccgccagctcctacctgagcctgacacctgagcagtggaagtcccacagatcctacagctgccaagtgacccacgaaggcagcaccgtggaaaagacagtggcccctacagagtgcagcggatcccagagcttcggcctgctggaccccaagctgtgctacctgctggatggcatcctgttcatctacggcgtgatcctgaccgccctgttcctgagagtgaagttcagcagaagcgccgacgcccctgcctaccagcagggacagaaccaactgtacaacgagctgaacctgggcagacgggaagagtacgacgtgctggacaagcggagaggcagggaccctgagatgggcggaaagccccagcggagaaagaacccccaggaaggactgtataacgaactccagaaagacaagatggccgaagcctacagcgagatcggcatgaagggcgagcggagaagaggcaagggccacgatggcctgtaccagggcctgagcaccgccaccaaggacacctatgacgccctgcacatgcaggccctgcctccaagaagggccaagcgatctggatctggagcaacaaacttctcactactcaaacaagcaggtgacgtggaggagaatcccgggcctactagtatggactggatttggcgcatccttttccttgtcggcgctgctaccggcgcgcattccttcgaagaagtgcagctggttgaatcaggtggcggcctggttcaacctggcggatctctgagactgagctgtgccgccagcggcttcaccttcagcgactactttatgagctgggtccgacaggcccctggcaaaggacttgaatgggtcgccaccatcagcaatggcggcacctacacttactaccccgacagcgtgaagggcagattcaccatctccagagacaacagcaagaacaccctgtacctccagatgaactccctgagagccgaggacaccgccgtgtactactgcgccagattcgacggctacatcttcgactattggggccagggcaccctggtcacagtctcttctgcctctacaaagggaccctccgtgtttcctctggctcccagcagcaagtctacaagcggaggaacagccgctctgggctgcctggtcaaggattactttcccgagcctgtgaccgtgtcctggaatagcggagcactgacaagcggcgtgcacacctttccagccgtgctgcaaagcagcggcctgtactctctgagcagcgtggtcacagtgcctagctctagcctgggcacccagacctacatctgcaatgtgaaccacaagcctagcaacaccaaggtggacaagagagtggaacccaagagctgtggtacccagagttttgggttgttggaccctaaattgtgctatctgttggacggaatcctgttcatttacggagtgatcctgaccgcattgttcctgcgggttaagttttccagatccgcagacgcacccgcttaccaacaagggcagaaccaactctacaatgaacttaatttggggcggagggaagagtacgacgttctggacaaaaggaggggacgagatcccgagatgggcggaaagcctcagcgaaggaagaatccgcaagaggggctttataacgaactccagaaagataaaatggcagaagcctatagtgagattgggatgaagggagaaaggaggaggggtaaaggtcacgatgggttgtaccaaggattgagcacagccactaaagatacctatgatgcgctccacatgcaggccctgccgccaagacgcgccaagagaagcggatctggcgtgaagcagaccctgaatttcgacctgctgaagctggctggcgacgtggaatccaacccaggcccttctagaggccatatgaccgagtacaagcccacggtgcgcctcgccacccgcgacgacgtccccagggccgtacgcaccctcgccgccgcgttcgccgactaccccgccacgcgccacaccgtcgatccggaccgccacatcgagcgggtcaccgagctgcaagaactcttcctcacgcgcgtcgggctcgacatcggcaaggtgtgggtcgcggacgacggcgccgcggtggcggtctggaccacgccggagagcgtcgaagcgggggcggtgttcgccgagatcggcccgcgcatggccgagttgagcggttcccggctggccgcgcagcaacagatggaaggcctcctggcgccgcaccggcccaaggagcccgcgtggttcctggccaccgtcggcgtctcgcccgaccaccagggcaagggtctgggcagcgccgtcgtgctccccggagtggaggcggccgagcgcgccggggtgcccgccttcctggagacctccgcgccccgcaacctccccttctacgagcggctcggcttcaccgtcaccgccgacgtcgaggtgcccgaaggaccgcgcacctggtgcatgacccgcaagcccggtgcctga

SEQ ID NO: 10673 - DNA, 2442 bp, Artificial Sequence
  Synthetic Polynucloetide
atggccttaccagtgaccgccttgctcctgccgctggccttgctgctccacgccgccaggccggacatccagatgacacagagccctagcagcctgtctgccagcgtgggagacagagtgaccatcacctgtagagccagccaggacatcagcaactacctgaactggtatcagcagaagcccggcaaggcccctaagctgctgatctactacaccagcagactgcacagcggcgtgcccagcagattttctggctctggcagcggcaccgacttcaccctgacaatatctagcctccagcctgaggacttcgccacctactattgccagcagggcaacaccctgccttggacatttggacagggcaccaaggtggaaatcaagagactcgaggacctgaagaacgtgttcccacctgaggtggccgtgttcgagcctagcgaggccgagatcagccacacccagaaagccaccctcgtgtgcctggctaccggcttctaccccgaccatgtggaactgtcttggtgggtcaacggcaaagaggtgcacagcggcgtgtctaccgacccccagccactgaaagaacagcccgccctgaacgacagccggtactgcctgagcagcagactgagagtgtccgccaccttctggcagaacccccggaaccacttcagatgccaggtgcagttctacggcctgagcgagaacgacgagtggacccaggacagagccaagcccgtgacccagatcgtgtctgccgaagcctggggcagagccgattgcggatcccagagcttcggcctgctggaccccaagctgtgctacctgctggatggcatcctgttcatctacggcgtgatcctgaccgccctgttcctgagagtgaagttcagcagaagcgccgacgcccctgcctaccagcagggacagaaccaactgtacaacgagctgaacctgggcagacgggaagagtacgacgtgctggacaagcggagaggcagggaccctgagatgggcggaaagccccagcggagaaagaacccccaggaaggactgtataacgaactccagaaagacaagatggccgaagcctacagcgagatcggcatgaagggcgagcggagaagaggcaagggccacgatggcctgtaccagggcctgagcaccgccaccaaggacacctatgacgccctgcacatgcaggccctgcctccaagaagggccaagcgatctggatctggagcaacaaacttctcactactcaaacaagcaggtgacgtggaggagaatcccgggcctactagtatggactggatttggcgcatccttttccttgtcggcgctgctaccggcgcgcattccttcgaagaagtgcagctggttgaatcaggtggcggcctggttcaacctggcggatctctgagactgagctgtgccgccagcggcttcaccttcagcgactactttatgagctgggtccgacaggcccctggcaaaggacttgaatgggtcgccaccatcagcaatggcggcacctacacttactaccccgacagcgtgaagggcagattcaccatctccagagacaacagcaagaacaccctgtacctccagatgaactccctgagagccgaggacaccgccgtgtactactgcgccagattcgacggctacatcttcgactattggggccagggcaccctggtcacagtctcttctacgcgtatccagaaccctgatcctgccgtgtaccagctgcgggatagcaagagcagcgacaagagcgtgtgtctgttcaccgacttcgacagccagaccaacgtgtcccagagcaaggactccgacgtgtacatcaccgataagaccgtgctggacatgcggagcatggacttcaagagcaactccgccgtggcctggtccaacaagtccgatttcgcctgcgccaacgccttcaacaacagcattatccccgaggacacattcttcccaagccccgagagcagctgcggtacccagagttttgggttgttggaccctaaattgtgctatctgttggacggaatcctgttcatttacggagtgatcctgaccgcattgttcctgcgggttaagttttccagatccgcagacgcacccgcttaccaacaagggcagaaccaactctacaatgaacttaatttggggcggagggaagagtacgacgttctggacaaaaggaggggacgagatcccgagatgggcggaaagcctcagcgaaggaagaatccgcaagaggggctttataacgaactccagaaagataaaatggcagaagcctatagtgagattgggatgaagggagaaaggaggaggggtaaaggtcacgatgggttgtaccaaggattgagcacagccactaaagatacctatgatgcgctccacatgcaggccctgccgccaaga

SEQ ID NO: 10674 - DNA, 2442 bp, Artificial Sequence
  Synthetic Polynucloetide
atggccttaccagtgaccgccttgctcctgccgctggccttgctgctccacgccgccaggccggacatccagatgacacagagccctagcagcctgtctgccagcgtgggagacagagtgaccatcacctgtagagccagccaggacatcagcaactacctgaactggtatcagcagaagcccggcaaggcccctaagctgctgatctactacaccagcagactgcacagcggcgtgcccagcagattttctggctctggcagcggcaccgacttcaccctgacaatatctagcctccagcctgaggacttcgccacctactattgccagcagggcaacaccctgccttggacatttggacagggcaccaaggtggaaatcaagagactcgaggacctgaagaacgtgttcccacctgaggtggccgtgttcgagcctagcaaggccgagatcgcccacacccagaaagccaccctcgtgtgcctggctaccggcttctaccccgaccatgtggaactgtcttggtgggtcaacggcaaagaggtgcacagcggcgtgtgtaccgacccccagccactgaaagaacagcccgccctgaacgacagccggtactgcctgagcagcagactgagagtgtccgccaccttctggcagaacccccggaaccacttcagatgccaggtgcagttctacggcctgagcgagaacgacgagtggacccaggacagagccaagcccgtgacccagatcgtgtctgccgaagcctggggcagagccgattgcggatcccagagcttcggcctgctggaccccaagctgtgctacctgctggatggcatcctgttcatctacggcgtgatcctgaccgccctgttcctgagagtgaagttcagcagaagcgccgacgcccctgcctaccagcagggacagaaccaactgtacaacgagctgaacctgggcagacgggaagagtacgacgtgctggacaagcggagaggcagggaccctgagatgggcggaaagccccagcggagaaagaacccccaggaaggactgtataacgaactccagaaagacaagatggccgaagcctacagcgagatcggcatgaagggcgagcggagaagaggcaagggccacgatggcctgtaccagggcctgagcaccgccaccaaggacacctatgacgccctgcacatgcaggccctgcctccaagaagggccaagcgatctggatctggagcaacaaacttctcactactcaaacaagcaggtgacgtggaggagaatcccgggcctactagtatggactggatttggcgcatccttttccttgtcggcgctgctaccggcgcgcattccttcgaagaagtgcagctggttgaatcaggtggcggcctggttcaacctggcggatctctgagactgagctgtgccgccagcggcttcaccttcagcgactactttatgagctgggtccgacaggcccctggcaaaggacttgaatgggtcgccaccatcagcaatggcggcacctacacttactaccccgacagcgtgaagggcagattcaccatctccagagacaacagcaagaacaccctgtacctccagatgaactccctgagagccgaggacaccgccgtgtactactgcgccagattcgacggctacatcttcgactattggggccagggcaccctggtcacagtctcttctacgcgtatccagaaccctgatcctgccgtgtaccagctgcgggatagcaagagcagcgacaagagcgtgtgtctgttcaccgacttcgacagccagaccaacgtgtcccagagcaaggactccgacgtgtacatcaccgataagtgcgtgctggacatgcggagcatggacttcaagagcaactccgccgtggcctggtccaacaagtccgatttcgcctgcgccaacgccttcaacaacagcattatccccgaggacacattcttcccaagcagcgacgtgccctgcggtacccagagttttgggttgttggaccctaaattgtgctatctgttggacggaatcctgttcatttacggagtgatcctgaccgcattgttcctgcgggttaagttttccagatccgcagacgcacccgcttaccaacaagggcagaaccaactctacaatgaacttaatttggggcggagggaagagtacgacgttctggacaaaaggaggggacgagatcccgagatgggcggaaagcctcagcgaaggaagaatccgcaagaggggctttataacgaactccagaaagataaaatggcagaagcctatagtgagattgggatgaagggagaaaggaggaggggtaaaggtcacgatgggttgtaccaaggattgagcacagccactaaagatacctatgatgcgctccacatgcaggccctgccgccaaga

SEQ ID NO: 10675 - DNA, 2655 bp, Artificial Sequence
  Synthetic Polynucloetide
atggccttaccagtgaccgccttgctcctgccgctggccttgctgctccacgccgccaggccggacatccagatgacacagagccctagcagcctgtctgccagcgtgggagacagagtgaccatcacctgtagagccagccaggacatcagcaactacctgaactggtatcagcagaagcccggcaaggcccctaagctgctgatctactacaccagcagactgcacagcggcgtgcccagcagattttctggctctggcagcggcaccgacttcaccctgacaatatctagcctccagcctgaggacttcgccacctactattgccagcagggcaacaccctgccttggacatttggacagggcaccaaggtggaaatcaagagactcgaggggaaaccaattcccaaccctcttctgggactggattcaaccggcagcggcgaggacctgaagaacgtgttcccacctgaggtggccgtgttcgagcctagcgaggccgagatcagccacacccagaaagccaccctcgtgtgcctggctaccggcttctaccccgaccatgtggaactgtcttggtgggtcaacggcaaagaggtgcacagcggcgtgtctaccgacccccagccactgaaagaacagcccgccctgaacgacagccggtactgcctgagcagcagactgagagtgtccgccaccttctggcagaacccccggaaccacttcagatgccaggtgcagttctacggcctgagcgagaacgacgagtggacccaggacagagccaagcccgtgacccagatcgtgtctgccgaagcctggggcagagccgattgcggatcccagagcttcggcctgctggaccccaagctgtgctacctgctggatggcatcctgttcatctacggcgtgatcctgaccgccctgttcctgagagtgaagttcagcagaagcgccgacgcccctgcctaccagcagggacagaaccaactgtacaacgagctgaacctgggcagacgggaagagtacgacgtgctggacaagcggagaggcagggaccctgagatgggcggaaagccccagcggagaaagaacccccaggaaggactgtataacgaactccagaaagacaagatggccgaagcctacagcgagatcggcatgaagggcgagcggagaagaggcaagggccacgatggcctgtaccagggcctgagcaccgccaccaaggacacctatgacgccctgcacatgcaggccctgcctccaagaagggccaagcgatctggatctggagcaacaaacttctcactactcaaacaagcaggtgacgtggaggagaatcccgggcctactagtatggactggatttggcgcatccttttccttgtcggcgctgctaccggcgcgcattccttcgaagaagtgcagctggttgaatcaggtggcggcctggttcaacctggcggatctctgagactgagctgtgccgccagcggcttcaccttcagcgactactttatgagctgggtccgacaggcccctggcaaaggacttgaatgggtcgccaccatcagcaatggcggcacctacacttactaccccgacagcgtgaagggcagattcaccatctccagagacaacagcaagaacaccctgtacctccagatgaactccctgagagccgaggacaccgccgtgtactactgcgccagattcgacggctacatcttcgactattggggccagggcaccctggtcacagtctcttctacgcgtgagcagaaactgatctcggaagaggatgggagcggcatccagaaccctgatcctgccgtgtaccagctgcgggatagcaagagcagcgacaagagcgtgtgtctgttcaccgacttcgacagccagaccaacgtgtcccagagcaaggactccgacgtgtacatcaccgataagaccgtgctggacatgcggagcatggacttcaagagcaactccgccgtggcctggtccaacaagtccgatttcgcctgcgccaacgccttcaacaacagcattatccccgaggacacattcttcccaagccccgagagcagctgcggtacccagagttttgggttgttggaccctaaattgtgctatctgttggacggaatcctgttcatttacggagtgatcctgaccgcattgttcctgaggagcaagcggtcacggctgctccacagcgattacatgaatatgacaccacgaagaccgggtcctactcgcaaacactaccaaccctacgcacctccccgcgactttgcagcgtaccgatctcgggttaagttttccagatccgcagacgcacccgcttaccaacaagggcagaaccaactctacaatgaacttaatttggggcggagggaagagtacgacgttctggacaaaaggaggggacgagatcccgagatgggcggaaagcctcagcgaaggaagaatccgcaagaggggctttataacgaactccagaaagataaaatggcagaagcctatagtgagattgggatgaagggagaaaggaggaggggtaaaggtcacgatgggttgtaccaaggattgagcacagccactaaagatacctatgatgcgctccacatgcaggccctgccgccaaga

SEQ ID NO: 10676 - DNA, 2778 bp, Artificial Sequence
  Synthetic Polynucloetide
atggccttaccagtgaccgccttgctcctgccgctggccttgctgctccacgccgccaggccggacatccagatgacacagagccctagcagcctgtctgccagcgtgggagacagagtgaccatcacctgtagagccagccaggacatcagcaactacctgaactggtatcagcagaagcccggcaaggcccctaagctgctgatctactacaccagcagactgcacagcggcgtgcccagcagattttctggctctggcagcggcaccgacttcaccctgacaatatctagcctccagcctgaggacttcgccacctactattgccagcagggcaacaccctgccttggacatttggacagggcaccaaggtggaaatcaagagactcgaggggaaaccaattcccaaccctcttctgggactggattcaaccggcagcggcgaggacctgaagaacgtgttcccacctgaggtggccgtgttcgagcctagcgaggccgagatcagccacacccagaaagccaccctcgtgtgcctggctaccggcttctaccccgaccatgtggaactgtcttggtgggtcaacggcaaagaggtgcacagcggcgtgtctaccgacccccagccactgaaagaacagcccgccctgaacgacagccggtactgcctgagcagcagactgagagtgtccgccaccttctggcagaacccccggaaccacttcagatgccaggtgcagttctacggcctgagcgagaacgacgagtggacccaggacagagccaagcccgtgacccagatcgtgtctgccgaagcctggggcagagccgattgcggatcccagagcttcggcctgctggaccccaagctgtgctacctgctggatggcatcctgttcatctacggcgtgatcctgaccgccctgttcctgaggagtaagaggagcaggctcctgcacagtgactacatgaacatgactccacgccgccccggacccacccgcaagcattaccagccctatgccccaccacgcgacttcgcagcctatcgctccagagtgaagttcagcagaagcgccgacgcccctgcctaccagcagggacagaaccaactgtacaacgagctgaacctgggcagacgggaagagtacgacgtgctggacaagcggagaggcagggaccctgagatgggcggaaagccccagcggagaaagaacccccaggaaggactgtataacgaactccagaaagacaagatggccgaagcctacagcgagatcggcatgaagggcgagcggagaagaggcaagggccacgatggcctgtaccagggcctgagcaccgccaccaaggacacctatgacgccctgcacatgcaggccctgcctccaagaagggccaagcgatctggatctggagcaacaaacttctcactactcaaacaagcaggtgacgtggaggagaatcccgggcctactagtatggactggatttggcgcatccttttccttgtcggcgctgctaccggcgcgcattccttcgaagaagtgcagctggttgaatcaggtggcggcctggttcaacctggcggatctctgagactgagctgtgccgccagcggcttcaccttcagcgactactttatgagctgggtccgacaggcccctggcaaaggacttgaatgggtcgccaccatcagcaatggcggcacctacacttactaccccgacagcgtgaagggcagattcaccatctccagagacaacagcaagaacaccctgtacctccagatgaactccctgagagccgaggacaccgccgtgtactactgcgccagattcgacggctacatcttcgactattggggccagggcaccctggtcacagtctcttctacgcgtgagcagaaactgatctcggaagaggatgggagcggcatccagaaccctgatcctgccgtgtaccagctgcgggatagcaagagcagcgacaagagcgtgtgtctgttcaccgacttcgacagccagaccaacgtgtcccagagcaaggactccgacgtgtacatcaccgataagaccgtgctggacatgcggagcatggacttcaagagcaactccgccgtggcctggtccaacaagtccgatttcgcctgcgccaacgccttcaacaacagcattatccccgaggacacattcttcccaagccccgagagcagctgcggtacccagagttttgggttgttggaccctaaattgtgctatctgttggacggaatcctgttcatttacggagtgatcctgaccgcattgttcctgaggagcaagcggtcacggctgctccacagcgattacatgaatatgacaccacgaagaccgggtcctactcgcaaacactaccaaccctacgcacctccccgcgactttgcagcgtaccgatctcgggttaagttttccagatccgcagacgcacccgcttaccaacaagggcagaaccaactctacaatgaacttaatttggggcggagggaagagtacgacgttctggacaaaaggaggggacgagatcccgagatgggcggaaagcctcagcgaaggaagaatccgcaagaggggctttataacgaactccagaaagataaaatggcagaagcctatagtgagattgggatgaagggagaaaggaggaggggtaaaggtcacgatgggttgtaccaaggattgagcacagccactaaagatacctatgatgcgctccacatgcaggccctgccgccaaga

SEQ ID NO: 10677 - DNA, 2661 bp, Artificial Sequence
  Synthetic Polynucloetide
atggccttaccagtgaccgccttgctcctgccgctggccttgctgctccacgccgccaggccggacatccagatgacacagagccctagcagcctgtctgccagcgtgggagacagagtgaccatcacctgtagagccagccaggacatcagcaactacctgaactggtatcagcagaagcccggcaaggcccctaagctgctgatctactacaccagcagactgcacagcggcgtgcccagcagattttctggctctggcagcggcaccgacttcaccctgacaatatctagcctccagcctgaggacttcgccacctactattgccagcagggcaacaccctgccttggacatttggacagggcaccaaggtggaaatcaagagactcgaggggaaaccaattcccaaccctcttctgggactggattcaaccggcagcggcgaggacctgaagaacgtgttcccacctgaggtggccgtgttcgagcctagcgaggccgagatcagccacacccagaaagccaccctcgtgtgcctggctaccggcttctaccccgaccatgtggaactgtcttggtgggtcaacggcaaagaggtgcacagcggcgtgtctaccgacccccagccactgaaagaacagcccgccctgaacgacagccggtactgcctgagcagcagactgagagtgtccgccaccttctggcagaacccccggaaccacttcagatgccaggtgcagttctacggcctgagcgagaacgacgagtggacccaggacagagccaagcccgtgacccagatcgtgtctgccgaagcctggggcagagccgattgcggatcccagagcttcggcctgctggaccccaagctgtgctacctgctggatggcatcctgttcatctacggcgtgatcctgaccgccctgttcctgagagtgaagttcagcagaagcgccgacgcccctgcctaccagcagggacagaaccaactgtacaacgagctgaacctgggcagacgggaagagtacgacgtgctggacaagcggagaggcagggaccctgagatgggcggaaagccccagcggagaaagaacccccaggaaggactgtataacgaactccagaaagacaagatggccgaagcctacagcgagatcggcatgaagggcgagcggagaagaggcaagggccacgatggcctgtaccagggcctgagcaccgccaccaaggacacctatgacgccctgcacatgcaggccctgcctccaagaagggccaagcgatctggatctggagcaacaaacttctcactactcaaacaagcaggtgacgtggaggagaatcccgggcctactagtatggactggatttggcgcatccttttccttgtcggcgctgctaccggcgcgcattccttcgaagaagtgcagctggttgaatcaggtggcggcctggttcaacctggcggatctctgagactgagctgtgccgccagcggcttcaccttcagcgactactttatgagctgggtccgacaggcccctggcaaaggacttgaatgggtcgccaccatcagcaatggcggcacctacacttactaccccgacagcgtgaagggcagattcaccatctccagagacaacagcaagaacaccctgtacctccagatgaactccctgagagccgaggacaccgccgtgtactactgcgccagattcgacggctacatcttcgactattggggccagggcaccctggtcacagtctcttctacgcgtgagcagaaactgatctcggaagaggatctggggagcggcatccagaaccctgatcctgccgtgtaccagctgcgggatagcaagagcagcgacaagagcgtgtgtctgttcaccgacttcgacagccagaccaacgtgtcccagagcaaggactccgacgtgtacatcaccgataagaccgtgctggacatgcggagcatggacttcaagagcaactccgccgtggcctggtccaacaagtccgatttcgcctgcgccaacgccttcaacaacagcattatccccgaggacacattcttcccaagccccgagagcagctgcggtacccagagttttgggttgttggaccctaaattgtgctatctgttggacggaatcctgttcatttacggagtgatcctgaccgcattgttcctgaagagaggccggaagaagctgctgtacatcttcaagcagcctttcatgcggcccgtgcagaccacccaggaagaggacggctgctcctgccggttccccgaggaagaagaaggcggctgcgagctgcgggttaagttttccagatccgcagacgcacccgcttaccaacaagggcagaaccaactctacaatgaacttaatttggggcggagggaagagtacgacgttctggacaaaaggaggggacgagatcccgagatgggcggaaagcctcagcgaaggaagaatccgcaagaggggctttataacgaactccagaaagataaaatggcagaagcctatagtgagattgggatgaagggagaaaggaggaggggtaaaggtcacgatgggttgtaccaaggattgagcacagccactaaagatacctatgatgcgctccacatgcaggccctgccgccaaga

SEQ ID NO: 10678 - DNA, 2787 bp, Artificial Sequence
  Synthetic Polynucloetide
atggccttaccagtgaccgccttgctcctgccgctggccttgctgctccacgccgccaggccggacatccagatgacacagagccctagcagcctgtctgccagcgtgggagacagagtgaccatcacctgtagagccagccaggacatcagcaactacctgaactggtatcagcagaagcccggcaaggcccctaagctgctgatctactacaccagcagactgcacagcggcgtgcccagcagattttctggctctggcagcggcaccgacttcaccctgacaatatctagcctccagcctgaggacttcgccacctactattgccagcagggcaacaccctgccttggacatttggacagggcaccaaggtggaaatcaagagactcgaggggaaaccaattcccaaccctcttctgggactggattcaaccggcagcggcgaggacctgaagaacgtgttcccacctgaggtggccgtgttcgagcctagcgaggccgagatcagccacacccagaaagccaccctcgtgtgcctggctaccggcttctaccccgaccatgtggaactgtcttggtgggtcaacggcaaagaggtgcacagcggcgtgtctaccgacccccagccactgaaagaacagcccgccctgaacgacagccggtactgcctgagcagcagactgagagtgtccgccaccttctggcagaacccccggaaccacttcagatgccaggtgcagttctacggcctgagcgagaacgacgagtggacccaggacagagccaagcccgtgacccagatcgtgtctgccgaagcctggggcagagccgattgcggatcccagagcttcggcctgctggaccccaagctgtgctacctgctggatggcatcctgttcatctacggcgtgatcctgaccgccctgttcctgaaacggggcagaaagaaactcctgtatatattcaaacaaccatttatgagaccagtacaaactactcaagaggaagatggctgtagctgccgatttccagaagaagaagaaggaggatgtgaactgagagtgaagttcagcagaagcgccgacgcccctgcctaccagcagggacagaaccaactgtacaacgagctgaacctgggcagacgggaagagtacgacgtgctggacaagcggagaggcagggaccctgagatgggcggaaagccccagcggagaaagaacccccaggaaggactgtataacgaactccagaaagacaagatggccgaagcctacagcgagatcggcatgaagggcgagcggagaagaggcaagggccacgatggcctgtaccagggcctgagcaccgccaccaaggacacctatgacgccctgcacatgcaggccctgcctccaagaagggccaagcgatctggatctggagcaacaaacttctcactactcaaacaagcaggtgacgtggaggagaatcccgggcctactagtatggactggatttggcgcatccttttccttgtcggcgctgctaccggcgcgcattccttcgaagaagtgcagctggttgaatcaggtggcggcctggttcaacctggcggatctctgagactgagctgtgccgccagcggcttcaccttcagcgactactttatgagctgggtccgacaggcccctggcaaaggacttgaatgggtcgccaccatcagcaatggcggcacctacacttactaccccgacagcgtgaagggcagattcaccatctccagagacaacagcaagaacaccctgtacctccagatgaactccctgagagccgaggacaccgccgtgtactactgcgccagattcgacggctacatcttcgactattggggccagggcaccctggtcacagtctcttctacgcgtgagcagaaactgatctcggaagaggatctggggagcggcatccagaaccctgatcctgccgtgtaccagctgcgggatagcaagagcagcgacaagagcgtgtgtctgttcaccgacttcgacagccagaccaacgtgtcccagagcaaggactccgacgtgtacatcaccgataagaccgtgctggacatgcggagcatggacttcaagagcaactccgccgtggcctggtccaacaagtccgatttcgcctgcgccaacgccttcaacaacagcattatccccgaggacacattcttcccaagccccgagagcagctgcggtacccagagttttgggttgttggaccctaaattgtgctatctgttggacggaatcctgttcatttacggagtgatcctgaccgcattgttcctgaagagaggccggaagaagctgctgtacatcttcaagcagcctttcatgcggcccgtgcagaccacccaggaagaggacggctgctcctgccggttccccgaggaagaagaaggcggctgcgagctgcgggttaagttttccagatccgcagacgcacccgcttaccaacaagggcagaaccaactctacaatgaacttaatttggggcggagggaagagtacgacgttctggacaaaaggaggggacgagatcccgagatgggcggaaagcctcagcgaaggaagaatccgcaagaggggctttataacgaactccagaaagataaaatggcagaagcctatagtgagattgggatgaagggagaaaggaggaggggtaaaggtcacgatgggttgtaccaaggattgagcacagccactaaagatacctatgatgcgctccacatgcaggccctgccgccaaga

SEQ ID NO: 10679 - DNA, 2460 bp, Artificial Sequence
  Synthetic Polynucloetide
atggccttaccagtgaccgccttgctcctgccgctggccttgctgctccacgccgccaggccggacatccagatgacacagagccctagcagcctgtctgccagcgtgggagacagagtgaccatcacctgtagagccagccaggacatcagcaactacctgaactggtatcagcagaagcccggcaaggcccctaagctgctgatctactacaccagcagactgcacagcggcgtgcccagcagattttctggctctggcagcggcaccgacttcaccctgacaatatctagcctccagcctgaggacttcgccacctactattgccagcagggcaacaccctgccttggacatttggacagggcaccaaggtggaaatcaagagactcgagcagagcttcggcctgctggaccccaagctgtgctacctgctggatggcatcctgttcatctacggcgtgatcctgaccgccctgttcctgagagtgaagttcagcagaagcgccgacgcccctgcctaccagcagggacagaaccaactgtacaacgagctgaacctgggcagacgggaagagtacgacgtgctggacaagcggagaggcagggaccctgagatgggcggaaagccccagcggagaaagaacccccaggaaggactgtataacgaactccagaaagacaagatggccgaagcctacagcgagatcggcatgaagggcgagcggagaagaggcaagggccacgatggcctgtaccagggcctgagcaccgccaccaaggacacctatgacgccctgcacatgcaggccctgcctccaagaagggccaagcgatctggatctggagcaacaaacttctcactactcaaacaagcaggtgacgtggaggagaatcccgggcctactagtatggactggatttggcgcatccttttccttgtcggcgctgctaccggcgcgcattccttcgaagaagtgcagctggttgaatcaggtggcggcctggttcaacctggcggatctctgagactgagctgtgccgccagcggcttcaccttcagcgactactttatgagctgggtccgacaggcccctggcaaaggacttgaatgggtcgccaccatcagcaatggcggcacctacacttactaccccgacagcgtgaagggcagattcaccatctccagagacaacagcaagaacaccctgtacctccagatgaactccctgagagccgaggacaccgccgtgtactactgcgccagattcgacggctacatcttcgactattggggccagggcaccctggtcacagtctcttctacgcgtcagagttttgggttgttggaccctaaattgtgctatctgttggacggaatcctgttcatttacggagtgatcctgaccgcattgttcctgcgggttaagttttccagatccgcagacgcacccgcttaccaacaagggcagaaccaactctacaatgaacttaatttggggcggagggaagagtacgacgttctggacaaaaggaggggacgagatcccgagatgggcggaaagcctcagcgaaggaagaatccgcaagaggggctttataacgaactccagaaagataaaatggcagaagcctatagtgagattgggatgaagggagaaaggaggaggggtaaaggtcacgatgggttgtaccaaggattgagcacagccactaaagatacctatgatgcgctccacatgcaggccctgccgccaagacgcgccaagagaagcggatctggcgtgaagcagaccctgaatttcgacctgctgaagctggctggcgacgtggaatccaacccaggcccttctagaggccatatgaccgagtacaagcccacggtgcgcctcgccacccgcgacgacgtccccagggccgtacgcaccctcgccgccgcgttcgccgactaccccgccacgcgccacaccgtcgatccggaccgccacatcgagcgggtcaccgagctgcaagaactcttcctcacgcgcgtcgggctcgacatcggcaaggtgtgggtcgcggacgacggcgccgcggtggcggtctggaccacgccggagagcgtcgaagcgggggcggtgttcgccgagatcggcccgcgcatggccgagttgagcggttcccggctggccgcgcagcaacagatggaaggcctcctggcgccgcaccggcccaaggagcccgcgtggttcctggccaccgtcggcgtctcgcccgaccaccagggcaagggtctgggcagcgccgtcgtgctccccggagtggaggcggccgagcgcgccggggtgcccgccttcctggagacctccgcgccccgcaacctccccttctacgagcggctcggcttcaccgtcaccgccgacgtcgaggtgcccgaaggaccgcgcacctggtgcatgacccgcaagcccggtgcctga

SEQ ID NO: 10680 - DNA, 1932 bp, Artificial Sequence
  Synthetic Polynucloetide
atggccttaccagtgaccgccttgctcctgccgctggccttgctgctccacgccgccaggccggacatccagatgacacagagccctagcagcctgtctgccagcgtgggagacagagtgaccatcacctgtagagccagccaggacatcagcaactacctgaactggtatcagcagaagcccggcaaggcccctaagctgctgatctactacaccagcagactgcacagcggcgtgcccagcagattttctggctctggcagcggcaccgacttcaccctgacaatatctagcctccagcctgaggacttcgccacctactattgccagcagggcaacaccctgccttggacatttggacagggcaccaaggtggaaatcaagagactcgagggacagcctaaggccaatcctaccgtgacactgttccctccaagcagcgaagaactccaggccaacaaggccacacttgtgtgcctgatctccgacttctaccctggggctgtgacagtggcttggaaggccgatggatctcctgtgaaagccggcgtggaaaccaccaagccatccaagcagagcaacaacaaatacgccgccagctcctacctgagcctgacacctgagcagtggaagtcccacagatcctacagctgccaagtgacccacgaaggcagcaccgtggaaaagacagtggcccctacagagtgcagccccatcaagaccgatgtgattacaatggaccccaaggacaactgctccaaggacgccaacgataccctgctgctccagctgaccaacaccagcgcctactacatgtacttgttgctgctgctgaagtccgtggtgtacttcgccatcatcacatgctgcctgctgcggagaaccgccttctgctgcaacggcgagaagtctagggccaagcgatctggatctggagcaacaaacttctcactactcaaacaagcaggtgacgtggaggagaatcccgggcctactagtatggactggatttggcgcatccttttccttgtcggcgctgctaccggcgcgcattccttcgaagaagtgcagctggttgaatcaggtggcggcctggttcaacctggcggatctctgagactgagctgtgccgccagcggcttcaccttcagcgactactttatgagctgggtccgacaggcccctggcaaaggacttgaatgggtcgccaccatcagcaatggcggcacctacacttactaccccgacagcgtgaagggcagattcaccatctccagagacaacagcaagaacaccctgtacctccagatgaactccctgagagccgaggacaccgccgtgtactactgcgccagattcgacggctacatcttcgactattggggccagggcaccctggtcacagtctcttctacgcgtgcctctacaaagggaccctccgtgtttcctctggctcccagcagcaagtctacaagcggaggaacagccgctctgggctgcctggtcaaggattactttcccgagcctgtgaccgtgtcctggaatagcggagcactgacaagcggcgtgcacacctttccagccgtgctgcaaagcagcggcctgtactctctgagcagcgtggtcacagtgcctagctctagcctgggcacccagacctacatctgcaatgtgaaccacaagcctagcaacaccaaggtggacaagagagtggaacccaagagctgtgaagtgaaaaccgactccaccgaccacgtgaagcccaaagagacagagaacaccaagcagcccagcaagagctgccacaagcccaaggccatcgtgcacaccgagaaagtgaacatgatgagcctgaccgtgctgggcctgcggatgctgttcgccaaaaccgtggccgtgaacttcctgctgaccgccaagctgttcttcctc

SEQ ID NO: 10681 - DNA, 1866 bp, Artificial Sequence
  Synthetic Polynucloetide
atggccttaccagtgaccgccttgctcctgccgctggccttgctgctccacgccgccaggccggacatccagatgacacagagccctagcagcctgtctgccagcgtgggagacagagtgaccatcacctgtagagccagccaggacatcagcaactacctgaactggtatcagcagaagcccggcaaggcccctaagctgctgatctactacaccagcagactgcacagcggcgtgcccagcagattttctggctctggcagcggcaccgacttcaccctgacaatatctagcctccagcctgaggacttcgccacctactattgccagcagggcaacaccctgccttggacatttggacagggcaccaaggtggaaatcaagagactcgagggacagcctaaggccaatcctaccgtgacactgttccctccaagcagcgaagaactccaggccaacaaggccacacttgtgtgcctgatctccgacttctaccctggggctgtgacagtggcttggaaggccgatggatctcctgtgaaagccggcgtggaaaccaccaagccatccaagcagagcaacaacaaatacgccgccagctcctacctgagcctgacacctgagcagtggaagtcccacagatcctacagctgccaagtgacccacgaaggcagcaccgtggaaaagacagtggcccctacagagtgcagcggcagagccgattgcggcatcaccagcgccagctaccaccagggcgtgctgagcgccaccatcctgtacgagatcctgctgggcaaggccaccctgtacgccgtgctggtgtctgccctggtgctgatggctatggtcaagcggaaggacagccggggaagggccaagcgatctggatctggagcaacaaacttctcactactcaaacaagcaggtgacgtggaggagaatcccgggcctactagtatggactggatttggcgcatccttttccttgtcggcgctgctaccggcgcgcattccttcgaagaagtgcagctggttgaatcaggtggcggcctggttcaacctggcggatctctgagactgagctgtgccgccagcggcttcaccttcagcgactactttatgagctgggtccgacaggcccctggcaaaggacttgaatgggtcgccaccatcagcaatggcggcacctacacttactaccccgacagcgtgaagggcagattcaccatctccagagacaacagcaagaacaccctgtacctccagatgaactccctgagagccgaggacaccgccgtgtactactgcgccagattcgacggctacatcttcgactattggggccagggcaccctggtcacagtctcttctacgcgtgcctctacaaagggaccctccgtgtttcctctggctcccagcagcaagtctacaagcggaggaacagccgctctgggctgcctggtcaaggattactttcccgagcctgtgaccgtgtcctggaatagcggagcactgacaagcggcgtgcacacctttccagccgtgctgcaaagcagcggcctgtactctctgagcagcgtggtcacagtgcctagctctagcctgggcacccagacctacatctgcaatgtgaaccacaagcctagcaacaccaaggtggacaagagagtggaacccaagagctgtatccccgaggacacattcttcccaagcagcgacgtgccctgcgacgtgaagctggtggaaaagagcttcgagacagacaccaacctgaacttccagaacctgagcgtgatcggcttcagaatcctgctgctgaaagtggccggctttaacctgctgatgaccctgcggctgtggtccagc

SEQ ID NO: 10682 - DNA, 1866 bp, Artificial Sequence
  Synthetic Polynucloetide
atggccttaccagtgaccgccttgctcctgccgctggccttgctgctccacgccgccaggccggacatccagatgacacagagccctagcagcctgtctgccagcgtgggagacagagtgaccatcacctgtagagccagccaggacatcagcaactacctgaactggtatcagcagaagcccggcaaggcccctaagctgctgatctactacaccagcagactgcacagcggcgtgcccagcagattttctggctctggcagcggcaccgacttcaccctgacaatatctagcctccagcctgaggacttcgccacctactattgccagcagggcaacaccctgccttggacatttggacagggcaccaaggtggaaatcaagagactcgagggacagcctaaggccaatcctaccgtgacactgttccctccaagcagcgaagaactccaggccaacaaggccacacttgtgtgcctgatctccgacttctaccctggggctgtgacagtggcttggaaggccgatggatctcctgtgaaagccggcgtggaaaccaccaagccatccaagcagagcaacaacaaatacgccgccagctcctacctgagcctgacacctgagcagtggaagtcccacagatcctacagctgccaagtgacccacgaaggcagcaccgtggaaaagacagtggcccctacagagtgcagcggcagagccgattgcggctttaccagcgagagctaccagcagggcgtgctgagcgccaccatcctgtacgagatcctgctgggcaaggccaccctgtacgccgtgctggtgtctgccctggtgctgatggctatggtcaagcggaaggacagccggggaagggccaagcgatctggatctggagcaacaaacttctcactactcaaacaagcaggtgacgtggaggagaatcccgggcctactagtatggactggatttggcgcatccttttccttgtcggcgctgctaccggcgcgcattccttcgaagaagtgcagctggttgaatcaggtggcggcctggttcaacctggcggatctctgagactgagctgtgccgccagcggcttcaccttcagcgactactttatgagctgggtccgacaggcccctggcaaaggacttgaatgggtcgccaccatcagcaatggcggcacctacacttactaccccgacagcgtgaagggcagattcaccatctccagagacaacagcaagaacaccctgtacctccagatgaactccctgagagccgaggacaccgccgtgtactactgcgccagattcgacggctacatcttcgactattggggccagggcaccctggtcacagtctcttctacgcgtgcctctacaaagggaccctccgtgtttcctctggctcccagcagcaagtctacaagcggaggaacagccgctctgggctgcctggtcaaggattactttcccgagcctgtgaccgtgtcctggaatagcggagcactgacaagcggcgtgcacacctttccagccgtgctgcaaagcagcggcctgtactctctgagcagcgtggtcacagtgcctagctctagcctgggcacccagacctacatctgcaatgtgaaccacaagcctagcaacaccaaggtggacaagagagtggaacccaagagctgtatccccgaggacacattcttcccaagccccgagagcagctgcgacgtgaagctggtggaaaagagcttcgagacagacaccaacctgaacttccagaacctgagcgtgatcggcttcagaatcctgctgctgaaagtggccggctttaacctgctgatgaccctgcggctgtggtccagc

SEQ ID NO: 10683 - DNA, 1344 bp, Artificial Sequence
  Synthetic Polynucloetide
atggccttaccagtgaccgccttgctcctgccgctggccttgctgctccacgccgccaggccggacatccagatgacacagagccctagcagcctgtctgccagcgtgggagacagagtgaccatcacctgtagagccagccaggacatcagcaactacctgaactggtatcagcagaagcccggcaaggcccctaagctgctgatctactacaccagcagactgcacagcggcgtgcccagcagattttctggctctggcagcggcaccgacttcaccctgacaatatctagcctccagcctgaggacttcgccacctactattgccagcagggcaacaccctgccttggacatttggacagggcaccaaggtggaaatcaagagaggcggaggcggaagtggaggcggaggatctggcggcggaggctctgaagtgcagctggttgaatcaggtggcggcctggttcaacctggcggatctctgagactgagctgtgccgccagcggcttcaccttcagcgactactttatgagctgggtccgacaggcccctggcaaaggacttgaatgggtcgccaccatcagcaatggcggcacctacacttactaccccgacagcgtgaagggcagattcaccatctccagagacaacagcaagaacaccctgtacctccagatgaactccctgagagccgaggacaccgccgtgtactactgcgccagattcgacggctacatcttcgactattggggccagggcaccctggtcacagtctcttctacgcgtgacggtaacgaggagatgggaggaatcactcaaaccccttacaaagtctcaatttcaggaacaactgttatccttacatgtccccagtatcctggcagcgagatcctttggcagcataacgacaagaatatagggggagatgaagacgataagaatatcggatctgacgaggatcacttgagcctgaaagagttctccgagcttgaacaaagcggatattatgtgtgctatccgcgcgggtcaaagccggaagacgctaacttttacctttatctccgagccagagtgtgcgaaaattgcatggaaatggacgttatgtccgttgctacaatagttatcgtagatatatgcatcacgggtggactgcttctgctggtttattattggtccaagaatagaaaggccaaagctaaacccgtgaccagaggcgctggcgcaggcggaaggcaaaggggacaaaacaaagaacggccaccaccagtgccaaatccagattatgagcctattcggaaaggacagagggacctgtactctggcctgaatcagagaagaatc

SEQ ID NO: 10684 - DNA, 1239 bp, Artificial Sequence
  Synthetic Polynucloetide
atggccttaccagtgaccgccttgctcctgccgctggccttgctgctccacgccgccaggccggacatccagatgacacagagccctagcagcctgtctgccagcgtgggagacagagtgaccatcacctgtagagccagccaggacatcagcaactacctgaactggtatcagcagaagcccggcaaggcccctaagctgctgatctactacaccagcagactgcacagcggcgtgcccagcagattttctggctctggcagcggcaccgacttcaccctgacaatatctagcctccagcctgaggacttcgccacctactattgccagcagggcaacaccctgccttggacatttggacagggcaccaaggtggaaatcaagagaggcggaggcggaagtggaggcggaggatctggcggcggaggctctgaagtgcagctggttgaatcaggtggcggcctggttcaacctggcggatctctgagactgagctgtgccgccagcggcttcaccttcagcgactactttatgagctgggtccgacaggcccctggcaaaggacttgaatgggtcgccaccatcagcaatggcggcacctacacttactaccccgacagcgtgaagggcagattcaccatctccagagacaacagcaagaacaccctgtacctccagatgaactccctgagagccgaggacaccgccgtgtactactgcgccagattcgacggctacatcttcgactattggggccagggcaccctggtcacagtctcttctacgcgtttcaagatccccatcgaggaactggaagatcgggtgttcgtgaactgcaacacctctatcacctgggtggaaggcaccgtgggaacactgctgagcgacatcaccagactggacctcggcaagcggattctggaccctcggggcatctacagatgcaacggcaccgacatctacaaggacaaagaaagcaccgtgcaggtccactacagaatgtgccagtcctgcgtggaactggaccctgctacagtggccggcatcatcgtgaccgatgtgatcgctactctgctgctggctctgggagtgttctgcttcgccggacacgaaacaggcagactgtctggcgctgccgatacacaggccctgctgagaaacgaccaagtgtatcagcccctgcgcgacagagatgatgcccagtattctcacctcggcggcaactgggctagaaacaag

SEQ ID NO: 10685 - DNA, 1269 bp, Artificial Sequence
  Synthetic Polynucloetide
atggccttaccagtgaccgccttgctcctgccgctggccttgctgctccacgccgccaggccggacatccagatgacacagagccctagcagcctgtctgccagcgtgggagacagagtgaccatcacctgtagagccagccaggacatcagcaactacctgaactggtatcagcagaagcccggcaaggcccctaagctgctgatctactacaccagcagactgcacagcggcgtgcccagcagattttctggctctggcagcggcaccgacttcaccctgacaatatctagcctccagcctgaggacttcgccacctactattgccagcagggcaacaccctgccttggacatttggacagggcaccaaggtggaaatcaagagaggcggaggcggaagtggaggcggaggatctggcggcggaggctctgaagtgcagctggttgaatcaggtggcggcctggttcaacctggcggatctctgagactgagctgtgccgccagcggcttcaccttcagcgactactttatgagctgggtccgacaggcccctggcaaaggacttgaatgggtcgccaccatcagcaatggcggcacctacacttactaccccgacagcgtgaagggcagattcaccatctccagagacaacagcaagaacaccctgtacctccagatgaactccctgagagccgaggacaccgccgtgtactactgcgccagattcgacggctacatcttcgactattggggccagggcaccctggtcacagtctcttctacgcgtcagagcatcaagggcaaccacctggtcaaggtgtacgactaccaagaggacggcagcgtgctgctgacatgtgatgccgaggccaagaacatcacctggtttaaggacggcaagatgatcggcttcctgaccgaggacaagaagaagtggaacctgggcagcaacgctaaggaccccagaggcatgtatcagtgcaagggcagccagaacaagagcaagcccctccaggtgtactaccggatgtgccagaactgcatcgagctgaacgccgctaccatcagcggctttctgttcgccgagatcgtgtccatcttcgtgctggccgtgggcgtgtactttatcgctggacaggatggcgtgcggcagagcagagcttccgataagcaaaccctgctgcctaacgaccagctgtaccagcctctgaaggacagagaggacgaccagtacagccacctccagggcaatcagctgagaagaaac

SEQ ID NO: 10686 - DNA, 1218 bp, Artificial Sequence
  Synthetic Polynucloetide
atggccttaccagtgaccgccttgctcctgccgctggccttgctgctccacgccgccaggccggacatccagatgacacagagccctagcagcctgtctgccagcgtgggagacagagtgaccatcacctgtagagccagccaggacatcagcaactacctgaactggtatcagcagaagcccggcaaggcccctaagctgctgatctactacaccagcagactgcacagcggcgtgcccagcagattttctggctctggcagcggcaccgacttcaccctgacaatatctagcctccagcctgaggacttcgccacctactattgccagcagggcaacaccctgccttggacatttggacagggcaccaaggtggaaatcaagagaggcggaggcggaagtggaggcggaggatctggcggcggaggctctgaagtgcagctggttgaatcaggtggcggcctggttcaacctggcggatctctgagactgagctgtgccgccagcggcttcaccttcagcgactactttatgagctgggtccgacaggcccctggcaaaggacttgaatgggtcgccaccatcagcaatggcggcacctacacttactaccccgacagcgtgaagggcagattcaccatctccagagacaacagcaagaacaccctgtacctccagatgaactccctgagagccgaggacaccgccgtgtactactgcgccagattcgacggctacatcttcgactattggggccagggcaccctggtcacagtctcttctacgcgtcagagttttgggttgttggaccctaaattgtgctatctgttggacggaatcctgttcatttacggagtgatcctgaccgcattgttcctgcgggttaagttttccagatccgcagacgcacccgcttaccaacaagggcagaaccaactctacaatgaacttaatttggggcggagggaagagtacgacgttctggacaaaaggaggggacgagatcccgagatgggcggaaagcctcagcgaaggaagaatccgcaagaggggctttataacgaactccagaaagataaaatggcagaagcctatagtgagattgggatgaagggagaaaggaggaggggtaaaggtcacgatgggttgtaccaaggattgagcacagccactaaagatacctatgatgcgctccacatgcaggccctgccgccaaga

SEQ ID NO: 10687 - DNA, 1344 bp, Artificial Sequence
  Synthetic Polynucloetide
atggccttaccagtgaccgccttgctcctgccgctggccttgctgctccacgccgccaggccggaagtgcagctggttgaatcaggtggcggcctggttcaacctggcggatctctgagactgagctgtgccgccagcggcttcaccttcagcgactactttatgagctgggtccgacaggcccctggcaaaggacttgaatgggtcgccaccatcagcaatggcggcacctacacttactaccccgacagcgtgaagggcagattcaccatctccagagacaacagcaagaacaccctgtacctccagatgaactccctgagagccgaggacaccgccgtgtactactgcgccagattcgacggctacatcttcgactattggggccagggcaccctggtcacagtctcttctggcggaggcggaagtggaggcggaggatctggcggcggaggctctgacatccagatgacacagagccctagcagcctgtctgccagcgtgggagacagagtgaccatcacctgtagagccagccaggacatcagcaactacctgaactggtatcagcagaagcccggcaaggcccctaagctgctgatctactacaccagcagactgcacagcggcgtgcccagcagattttctggctctggcagcggcaccgacttcaccctgacaatatctagcctccagcctgaggacttcgccacctactattgccagcagggcaacaccctgccttggacatttggacagggcaccaaggtggaaatcaagagaacgcgtgacggtaacgaggagatgggaggaatcactcaaaccccttacaaagtctcaatttcaggaacaactgttatccttacatgtccccagtatcctggcagcgagatcctttggcagcataacgacaagaatatagggggagatgaagacgataagaatatcggatctgacgaggatcacttgagcctgaaagagttctccgagcttgaacaaagcggatattatgtgtgctatccgcgcgggtcaaagccggaagacgctaacttttacctttatctccgagccagagtgtgcgaaaattgcatggaaatggacgttatgtccgttgctacaatagttatcgtagatatatgcatcacgggtggactgcttctgctggtttattattggtccaagaatagaaaggccaaagctaaacccgtgaccagaggcgctggcgcaggcggaaggcaaaggggacaaaacaaagaacggccaccaccagtgccaaatccagattatgagcctattcggaaaggacagagggacctgtactctggcctgaatcagagaagaatc

SEQ ID NO: 10688 - DNA, 1239 bp, Artificial Sequence
  Synthetic Polynucloetide
atggccttaccagtgaccgccttgctcctgccgctggccttgctgctccacgccgccaggccggaagtgcagctggttgaatcaggtggcggcctggttcaacctggcggatctctgagactgagctgtgccgccagcggcttcaccttcagcgactactttatgagctgggtccgacaggcccctggcaaaggacttgaatgggtcgccaccatcagcaatggcggcacctacacttactaccccgacagcgtgaagggcagattcaccatctccagagacaacagcaagaacaccctgtacctccagatgaactccctgagagccgaggacaccgccgtgtactactgcgccagattcgacggctacatcttcgactattggggccagggcaccctggtcacagtctcttctggcggaggcggaagtggaggcggaggatctggcggcggaggctctgacatccagatgacacagagccctagcagcctgtctgccagcgtgggagacagagtgaccatcacctgtagagccagccaggacatcagcaactacctgaactggtatcagcagaagcccggcaaggcccctaagctgctgatctactacaccagcagactgcacagcggcgtgcccagcagattttctggctctggcagcggcaccgacttcaccctgacaatatctagcctccagcctgaggacttcgccacctactattgccagcagggcaacaccctgccttggacatttggacagggcaccaaggtggaaatcaagagaacgcgtttcaagatccccatcgaggaactggaagatcgggtgttcgtgaactgcaacacctctatcacctgggtggaaggcaccgtgggaacactgctgagcgacatcaccagactggacctcggcaagcggattctggaccctcggggcatctacagatgcaacggcaccgacatctacaaggacaaagaaagcaccgtgcaggtccactacagaatgtgccagtcctgcgtggaactggaccctgctacagtggccggcatcatcgtgaccgatgtgatcgctactctgctgctggctctgggagtgttctgcttcgccggacacgaaacaggcagactgtctggcgctgccgatacacaggccctgctgagaaacgaccaagtgtatcagcccctgcgcgacagagatgatgcccagtattctcacctcggcggcaactgggctagaaacaag

SEQ ID NO: 10689 - DNA, 1269 bp, Artificial Sequence
  Synthetic Polynucloetide
atggccttaccagtgaccgccttgctcctgccgctggccttgctgctccacgccgccaggccggaagtgcagctggttgaatcaggtggcggcctggttcaacctggcggatctctgagactgagctgtgccgccagcggcttcaccttcagcgactactttatgagctgggtccgacaggcccctggcaaaggacttgaatgggtcgccaccatcagcaatggcggcacctacacttactaccccgacagcgtgaagggcagattcaccatctccagagacaacagcaagaacaccctgtacctccagatgaactccctgagagccgaggacaccgccgtgtactactgcgccagattcgacggctacatcttcgactattggggccagggcaccctggtcacagtctcttctggcggaggcggaagtggaggcggaggatctggcggcggaggctctgacatccagatgacacagagccctagcagcctgtctgccagcgtgggagacagagtgaccatcacctgtagagccagccaggacatcagcaactacctgaactggtatcagcagaagcccggcaaggcccctaagctgctgatctactacaccagcagactgcacagcggcgtgcccagcagattttctggctctggcagcggcaccgacttcaccctgacaatatctagcctccagcctgaggacttcgccacctactattgccagcagggcaacaccctgccttggacatttggacagggcaccaaggtggaaatcaagagaacgcgtcagagcatcaagggcaaccacctggtcaaggtgtacgactaccaagaggacggcagcgtgctgctgacatgtgatgccgaggccaagaacatcacctggtttaaggacggcaagatgatcggcttcctgaccgaggacaagaagaagtggaacctgggcagcaacgctaaggaccccagaggcatgtatcagtgcaagggcagccagaacaagagcaagcccctccaggtgtactaccggatgtgccagaactgcatcgagctgaacgccgctaccatcagcggctttctgttcgccgagatcgtgtccatcttcgtgctggccgtgggcgtgtactttatcgctggacaggatggcgtgcggcagagcagagcttccgataagcaaaccctgctgcctaacgaccagctgtaccagcctctgaaggacagagaggacgaccagtacagccacctccagggcaatcagctgagaagaaac

SEQ ID NO: 10690 - DNA, 1218 bp, Artificial Sequence
  Synthetic Polynucloetide
atggccttaccagtgaccgccttgctcctgccgctggccttgctgctccacgccgccaggccggaagtgcagctggttgaatcaggtggcggcctggttcaacctggcggatctctgagactgagctgtgccgccagcggcttcaccttcagcgactactttatgagctgggtccgacaggcccctggcaaaggacttgaatgggtcgccaccatcagcaatggcggcacctacacttactaccccgacagcgtgaagggcagattcaccatctccagagacaacagcaagaacaccctgtacctccagatgaactccctgagagccgaggacaccgccgtgtactactgcgccagattcgacggctacatcttcgactattggggccagggcaccctggtcacagtctcttctggcggaggcggaagtggaggcggaggatctggcggcggaggctctgacatccagatgacacagagccctagcagcctgtctgccagcgtgggagacagagtgaccatcacctgtagagccagccaggacatcagcaactacctgaactggtatcagcagaagcccggcaaggcccctaagctgctgatctactacaccagcagactgcacagcggcgtgcccagcagattttctggctctggcagcggcaccgacttcaccctgacaatatctagcctccagcctgaggacttcgccacctactattgccagcagggcaacaccctgccttggacatttggacagggcaccaaggtggaaatcaagagaacgcgtcagagttttgggttgttggaccctaaattgtgctatctgttggacggaatcctgttcatttacggagtgatcctgaccgcattgttcctgcgggttaagttttccagatccgcagacgcacccgcttaccaacaagggcagaaccaactctacaatgaacttaatttggggcggagggaagagtacgacgttctggacaaaaggaggggacgagatcccgagatgggcggaaagcctcagcgaaggaagaatccgcaagaggggctttataacgaactccagaaagataaaatggcagaagcctatagtgagattgggatgaagggagaaaggaggaggggtaaaggtcacgatgggttgtaccaaggattgagcacagccactaaagatacctatgatgcgctccacatgcaggccctgccgccaaga

SEQ ID NO: 10691 - DNA, 1920 bp, Artificial Sequence
  Synthetic Polynucloetide
atggccttaccagtgaccgccttgctcctgccgctggccttgctgctccacgccgccaggccggacatccagatgacacagagccctagcagcctgtctgccagcgtgggagacagagtgaccatcacctgtagagccagccaggacatcagcaactacctgaactggtatcagcagaagcccggcaaggcccctaagctgctgatctactacaccagcagactgcacagcggcgtgcccagcagattttctggctctggcagcggcaccgacttcaccctgacaatatctagcctccagcctgaggacttcgccacctactattgccagcagggcaacaccctgccttggacatttggacagggcaccaaggtggaaatcaagagaggcggaggcggaagtggaggcggaggatctggcggcggaggctctgaagtgcagctggttgaatcaggtggcggcctggttcaacctggcggatctctgagactgagctgtgccgccagcggcttcaccttcagcgactactttatgagctgggtccgacaggcccctggcaaaggacttgaatgggtcgccaccatcagcaatggcggcacctacacttactaccccgacagcgtgaagggcagattcaccatctccagagacaacagcaagaacaccctgtacctccagatgaactccctgagagccgaggacaccgccgtgtactactgcgccagattcgacggctacatcttcgactattggggccagggcaccctggtcacagtctcttctacgcgtgggagcggcatccagaaccctgatcctgccgtgtaccagctgcgggatagcaagagcagcgacaagagcgtgtgtctgttcaccgacttcgacagccagaccaacgtgtcccagagcaaggactccgacgtgtacatcaccgataagaccgtgctggacatgcggagcatggacttcaagagcaactccgccgtggcctggtccaacaagtccgatttcgcctgcgccaacgccttcaacaacagcattatccccgaggacacattcttcccaagccccgagagcagctgcgacgtgaagctggtggaaaagagcttcgagacagacaccaacctgaacttccagaacctgagcgtgatcggcttcagaatcctgctgctgaaagtggccggctttaacctgctgatgaccctgcggctgtggtccagccgcgccaagagaagcggatctggcgtgaagcagaccctgaatttcgacctgctgaagctggctggcgacgtggaatccaacccaggcccttctagaggccatatgaccgagtacaagcccacggtgcgcctcgccacccgcgacgacgtccccagggccgtacgcaccctcgccgccgcgttcgccgactaccccgccacgcgccacaccgtcgatccggaccgccacatcgagcgggtcaccgagctgcaagaactcttcctcacgcgcgtcgggctcgacatcggcaaggtgtgggtcgcggacgacggcgccgcggtggcggtctggaccacgccggagagcgtcgaagcgggggcggtgttcgccgagatcggcccgcgcatggccgagttgagcggttcccggctggccgcgcagcaacagatggaaggcctcctggcgccgcaccggcccaaggagcccgcgtggttcctggccaccgtcggcgtctcgcccgaccaccagggcaagggtctgggcagcgccgtcgtgctccccggagtggaggcggccgagcgcgccggggtgcccgccttcctggagacctccgcgccccgcaacctccccttctacgagcggctcggcttcaccgtcaccgccgacgtcgaggtgcccgaaggaccgcgcacctggtgcatgacccgcaagcccggtgcctga

SEQ ID NO: 10692 - DNA, 2016 bp, Artificial Sequence
  Synthetic Polynucloetide
atggccttaccagtgaccgccttgctcctgccgctggccttgctgctccacgccgccaggccggacatccagatgacacagagccctagcagcctgtctgccagcgtgggagacagagtgaccatcacctgtagagccagccaggacatcagcaactacctgaactggtatcagcagaagcccggcaaggcccctaagctgctgatctactacaccagcagactgcacagcggcgtgcccagcagattttctggctctggcagcggcaccgacttcaccctgacaatatctagcctccagcctgaggacttcgccacctactattgccagcagggcaacaccctgccttggacatttggacagggcaccaaggtggaaatcaagagaggcggaggcggaagtggaggcggaggatctggcggcggaggctctgaagtgcagctggttgaatcaggtggcggcctggttcaacctggcggatctctgagactgagctgtgccgccagcggcttcaccttcagcgactactttatgagctgggtccgacaggcccctggcaaaggacttgaatgggtcgccaccatcagcaatggcggcacctacacttactaccccgacagcgtgaagggcagattcaccatctccagagacaacagcaagaacaccctgtacctccagatgaactccctgagagccgaggacaccgccgtgtactactgcgccagattcgacggctacatcttcgactattggggccagggcaccctggtcacagtctcttctctcgaggacctgaagaacgtgttcccacctgaggtggccgtgttcgagcctagcgaggccgagatcagccacacccagaaagccaccctcgtgtgcctggctaccggcttctaccccgaccatgtggaactgtcttggtgggtcaacggcaaagaggtgcacagcggcgtgtctaccgacccccagccactgaaagaacagcccgccctgaacgacagccggtactgcctgagcagcagactgagagtgtccgccaccttctggcagaacccccggaaccacttcagatgccaggtgcagttctacggcctgagcgagaacgacgagtggacccaggacagagccaagcccgtgacccagatcgtgtctgccgaagcctggggcagagccgattgcggctttaccagcgagagctaccagcagggcgtgctgagcgccaccatcctgtacgagatcctgctgggcaaggccaccctgtacgccgtgctggtgtctgccctggtgctgatggctatggtcaagcggaaggacagccggggaagggccaagcgatctggatctggagcaacaaacttctcactactcaaacaagcaggtgacgtggaggagaatcccgggcctactagaggccatatgaccgagtacaagcccacggtgcgcctcgccacccgcgacgacgtccccagggccgtacgcaccctcgccgccgcgttcgccgactaccccgccacgcgccacaccgtcgatccggaccgccacatcgagcgggtcaccgagctgcaagaactcttcctcacgcgcgtcgggctcgacatcggcaaggtgtgggtcgcggacgacggcgccgcggtggcggtctggaccacgccggagagcgtcgaagcgggggcggtgttcgccgagatcggcccgcgcatggccgagttgagcggttcccggctggccgcgcagcaacagatggaaggcctcctggcgccgcaccggcccaaggagcccgcgtggttcctggccaccgtcggcgtctcgcccgaccaccagggcaagggtctgggcagcgccgtcgtgctccccggagtggaggcggccgagcgcgccggggtgcccgccttcctggagacctccgcgccccgcaacctccccttctacgagcggctcggcttcaccgtcaccgccgacgtcgaggtgcccgaaggaccgcgcacctggtgcatgacccgcaagcccggtgcctga

SEQ ID NO: 10693 - DNA, 2166 bp, Artificial Sequence
  Synthetic Polynucloetide
atggccttaccagtgaccgccttgctcctgccgctggccttgctgctccacgccgccaggccggacatccagatgacacagagccctagcagcctgtctgccagcgtgggagacagagtgaccatcacctgtagagccagccaggacatcagcaactacctgaactggtatcagcagaagcccggcaaggcccctaagctgctgatctactacaccagcagactgcacagcggcgtgcccagcagattttctggctctggcagcggcaccgacttcaccctgacaatatctagcctccagcctgaggacttcgccacctactattgccagcagggcaacaccctgccttggacatttggacagggcaccaaggtggaaatcaagagaggcggaggcggaagtggaggcggaggatctggcggcggaggctctgaagtgcagctggttgaatcaggtggcggcctggttcaacctggcggatctctgagactgagctgtgccgccagcggcttcaccttcagcgactactttatgagctgggtccgacaggcccctggcaaaggacttgaatgggtcgccaccatcagcaatggcggcacctacacttactaccccgacagcgtgaagggcagattcaccatctccagagacaacagcaagaacaccctgtacctccagatgaactccctgagagccgaggacaccgccgtgtactactgcgccagattcgacggctacatcttcgactattggggccagggcaccctggtcacagtctcttctacgcgtgagcagaaactgatctcggaagaggatctggggagcggcaccccattcccttctctggcccctcccatcatgctgctggtggacggcaagcagcagatggtggtcgtgtgcctggtgctggatgtggccccacctggactggacagccccatctggtttagcgccggcaatggctctgccctggacgcctttacctacggcccaagccctgccaccgatggcacctggacaaatctggcccacctgagcctgcccagcgaggaactggcttcttgggagcctctcgtgtgccacacaggacctggcgctgagggacacagcagatccacccagcctatgcacctgtctggcgaggccagcaccgccagaacctgtcctcaggaacctctgagaggcacccctggcggagcactgtggctgggagtgctgagactgctgctgttcaagctgctgctgtttgacctgctgctgacctgctcctgtctgtgcgatcctgccggccctctgccttctcctgccaccaccacaagactgagagccctgggcagccacagactgcaccctgccacagagacaggcggcagagaggccacaagcagccctagaccccagcccagagacagaagatggggcgataccccccctggcagaaagcctggatctccagtccgcgccaagagaagcggatctggcgtgaagcagaccctgaatttcgacctgctgaagctggctggcgacgtggaatccaacccaggcccttctagatctagaggccatatgaccgagtacaagcccacggtgcgcctcgccacccgcgacgacgtccccagggccgtacgcaccctcgccgccgcgttcgccgactaccccgccacgcgccacaccgtcgatccggaccgccacatcgagcgggtcaccgagctgcaagaactcttcctcacgcgcgtcgggctcgacatcggcaaggtgtgggtcgcggacgacggcgccgcggtggcggtctggaccacgccggagagcgtcgaagcgggggcggtgttcgccgagatcggcccgcgcatggccgagttgagcggttcccggctggccgcgcagcaacagatggaaggcctcctggcgccgcaccggcccaaggagcccgcgtggttcctggccaccgtcggcgtctcgcccgaccaccagggcaagggtctgggcagcgccgtcgtgctccccggagtggaggcggccgagcgcgccggggtgcccgccttcctggagacctccgcgccccgcaacctccccttctacgagcggctcggcttcaccgtcaccgccgacgtcgaggtgcccgaaggaccgcgcacctggtgcatgacccgcaagcccggtgcctga

SEQ ID NO: 10694 - DNA, 1620 bp, Artificial Sequence
  Synthetic Polynucloetide
atggccttaccagtgaccgccttgctcctgccgctggccttgctgctccacgccgccaggccggacatccagatgacacagagccctagcagcctgtctgccagcgtgggagacagagtgaccatcacctgtagagccagccaggacatcagcaactacctgaactggtatcagcagaagcccggcaaggcccctaagctgctgatctactacaccagcagactgcacagcggcgtgcccagcagattttctggctctggcagcggcaccgacttcaccctgacaatatctagcctccagcctgaggacttcgccacctactattgccagcagggcaacaccctgccttggacatttggacagggcaccaaggtggaaatcaagagactcgaggacctgaagaacgtgttcccacctgaggtggccgtgttcgagcctagcgaggccgagatcagccacacccagaaagccaccctcgtgtgcctggctaccggcttctaccccgaccatgtggaactgtcttggtgggtcaacggcaaagaggtgcacagcggcgtgtctaccgacccccagccactgaaagaacagcccgccctgaacgacagccggtactgcctgagcagcagactgagagtgtccgccaccttctggcagaacccccggaaccacttcagatgccaggtgcagttctacggcctgagcgagaacgacgagtggacccaggacagagccaagcccgtgacccagatcgtgtctgccgaagcctggggcagagccgattgcggctttaccagcgagagctaccagcagggcgtgctgagcgccaccatcctgtacgagatcctgctgggcaaggccaccctgtacgccgtgctggtgtctgccctggtgctgatggctatggtcaagcggaaggacagccggggaagggccaagcgatctggatctggagcaacaaacttctcactactcaaacaagcaggtgacgtggaggagaatcccgggcctactagaggccatatgaccgagtacaagcccacggtgcgcctcgccacccgcgacgacgtccccagggccgtacgcaccctcgccgccgcgttcgccgactaccccgccacgcgccacaccgtcgatccggaccgccacatcgagcgggtcaccgagctgcaagaactcttcctcacgcgcgtcgggctcgacatcggcaaggtgtgggtcgcggacgacggcgccgcggtggcggtctggaccacgccggagagcgtcgaagcgggggcggtgttcgccgagatcggcccgcgcatggccgagttgagcggttcccggctggccgcgcagcaacagatggaaggcctcctggcgccgcaccggcccaaggagcccgcgtggttcctggccaccgtcggcgtctcgcccgaccaccagggcaagggtctgggcagcgccgtcgtgctccccggagtggaggcggccgagcgcgccggggtgcccgccttcctggagacctccgcgccccgcaacctccccttctacgagcggctcggcttcaccgtcaccgccgacgtcgaggtgcccgaaggaccgcgcacctggtgcatgacccgcaagcccggtgcctga

SEQ ID NO: 10695 - DNA, 927 bp, Artificial Sequence
  Synthetic Polynucloetide
atggccttaccagtgaccgccttgctcctgccgctggccttgctgctccacgccgccaggccggacatccagatgacacagagccctagcagcctgtctgccagcgtgggagacagagtgaccatcacctgtagagccagccaggacatcagcaactacctgaactggtatcagcagaagcccggcaaggcccctaagctgctgatctactacaccagcagactgcacagcggcgtgcccagcagattttctggctctggcagcggcaccgacttcaccctgacaatatctagcctccagcctgaggacttcgccacctactattgccagcagggcaacaccctgccttggacatttggacagggcaccaaggtggaaatcaagagactcgaggacctgaagaacgtgttcccacctgaggtggccgtgttcgagcctagcgaggccgagatcagccacacccagaaagccaccctcgtgtgcctggctaccggcttctaccccgaccatgtggaactgtcttggtgggtcaacggcaaagaggtgcacagcggcgtgtctaccgacccccagccactgaaagaacagcccgccctgaacgacagccggtactgcctgagcagcagactgagagtgtccgccaccttctggcagaacccccggaaccacttcagatgccaggtgcagttctacggcctgagcgagaacgacgagtggacccaggacagagccaagcccgtgacccagatcgtgtctgccgaagcctggggcagagccgattgcggctttaccagcgagagctaccagcagggcgtgctgagcgccaccatcctgtacgagatcctgctgggcaaggccaccctgtacgccgtgctggtgtctgccctggtgctgatggctatggtcaagcggaaggacagccgggga

SEQ ID NO: 10696 - DNA, 1341 bp, Artificial Sequence; identical to SEQ ID NO: 10627
  Synthetic Polynucloetide

SEQ ID NO: 10697 - DNA, 840 bp, Artificial Sequence; identical to SEQ ID NO: 10628
  Synthetic Polynucloetide

SEQ ID NO: 10698 - DNA, 1674 bp, Artificial Sequence
  Synthetic Polynucloetide
atggccttaccagtgaccgccttgctcctgccgctggccttgctgctccacgccgccaggccggacatccagatgacacagagccctagcagcctgtctgccagcgtgggagacagagtgaccatcacctgtagagccagccaggacatcagcaactacctgaactggtatcagcagaagcccggcaaggcccctaagctgctgatctactacaccagcagactgcacagcggcgtgcccagcagattttctggctctggcagcggcaccgacttcaccctgacaatatctagcctccagcctgaggacttcgccacctactattgccagcagggcaacaccctgccttggacatttggacagggcaccaaggtggaaatcaagagactcgaggggaaaccaattcccaaccctcttctgggactggattcaaccggcagcggcgaggacctgaagaacgtgttcccacctgaggtggccgtgttcgagcctagcgaggccgagatcagccacacccagaaagccaccctcgtgtgcctggctaccggcttctaccccgaccatgtggaactgtcttggtgggtcaacggcaaagaggtgcacagcggcgtgtgtaccgacccccagccactgaaagaacagcccgccctgaacgacagccggtactgcctgagcagcagactgagagtgtccgccaccttctggcagaacccccggaaccacttcagatgccaggtgcagttctacggcctgagcgagaacgacgagtggacccaggacagagccaagcccgtgacccagatcgtgtctgccgaagcctggggcagagccgattgcggctttaccagcgagagctaccagcagggcgtgctgagcgccaccatcctgtacgagatcctgctgggcaaggccaccctgtacgccgtgctggtgtctgccctggtgctgatggctatggtcaagcggaaggacagccggggaagggccaagcgatctggatctggagcaacaaacttctcactactcaaacaagcaggtgacgtggaggagaatcccgggcctactagaggccatatgaccgagtacaagcccacggtgcgcctcgccacccgcgacgacgtccccagggccgtacgcaccctcgccgccgcgttcgccgactaccccgccacgcgccacaccgtcgatccggaccgccacatcgagcgggtcaccgagctgcaagaactcttcctcacgcgcgtcgggctcgacatcggcaaggtgtgggtcgcggacgacggcgccgcggtggcggtctggaccacgccggagagcgtcgaagcgggggcggtgttcgccgagatcggcccgcgcatggccgagttgagcggttcccggctggccgcgcagcaacagatggaaggcctcctggcgccgcaccggcccaaggagcccgcgtggttcctggccaccgtcggcgtctcgcccgaccaccagggcaagggtctgggcagcgccgtcgtgctccccggagtggaggcggccgagcgcgccggggtgcccgccttcctggagacctccgcgccccgcaacctccccttctacgagcggctcggcttcaccgtcaccgccgacgtcgaggtgcccgaaggaccgcgcacctggtgcatgacccgcaagcccggtgcctga

SEQ ID NO: 10699 - DNA, 984 bp, Artificial Sequence
  Synthetic Polynucloetide
atggccttaccagtgaccgccttgctcctgccgctggccttgctgctccacgccgccaggccggacatccagatgacacagagccctagcagcctgtctgccagcgtgggagacagagtgaccatcacctgtagagccagccaggacatcagcaactacctgaactggtatcagcagaagcccggcaaggcccctaagctgctgatctactacaccagcagactgcacagcggcgtgcccagcagattttctggctctggcagcggcaccgacttcaccctgacaatatctagcctccagcctgaggacttcgccacctactattgccagcagggcaacaccctgccttggacatttggacagggcaccaaggtggaaatcaagagactcgaggggaaaccaattcccaaccctcttctgggactggattcaaccggcagcggcgaggacctgaagaacgtgttcccacctgaggtggccgtgttcgagcctagcgaggccgagatcagccacacccagaaagccaccctcgtgtgcctggctaccggcttctaccccgaccatgtggaactgtcttggtgggtcaacggcaaagaggtgcacagcggcgtgtgtaccgacccccagccactgaaagaacagcccgccctgaacgacagccggtactgcctgagcagcagactgagagtgtccgccaccttctggcagaacccccggaaccacttcagatgccaggtgcagttctacggcctgagcgagaacgacgagtggacccaggacagagccaagcccgtgacccagatcgtgtctgccgaagcctggggcagagccgattgcggctttaccagcgagagctaccagcagggcgtgctgagcgccaccatcctgtacgagatcctgctgggcaaggccaccctgtacgccgtgctggtgtctgccctggtgctgatggctatggtcaagcggaaggacagccggggatga

SEQ ID NO: 10700 - DNA, 1377 bp, Artificial Sequence; identical to SEQ ID NO: 10631
  Synthetic Polynucloetide

SEQ ID NO: 10701 - DNA, 879 bp, Artificial Sequence; identical to SEQ ID NO: 10632
  Synthetic Polynucloetide

SEQ ID NO: 10702 - DNA, 1920 bp, Artificial Sequence
  Synthetic Polynucloetide
atggccttaccagtgaccgccttgctcctgccgctggccttgctgctccacgccgccaggccggacatccagatgacacagagccctagcagcctgtctgccagcgtgggagacagagtgaccatcacctgtagagccagccaggacatcagcaactacctgaactggtatcagcagaagcccggcaaggcccctaagctgctgatctactacaccagcagactgcacagcggcgtgcccagcagattttctggctctggcagcggcaccgacttcaccctgacaatatctagcctccagcctgaggacttcgccacctactattgccagcagggcaacaccctgccttggacatttggacagggcaccaaggtggaaatcaagagaggcggaggcggaagtggaggcggaggatctggcggcggaggctctgaagtgcagctggttgaatcaggtggcggcctggttcaacctggcggatctctgagactgagctgtgccgccagcggcttcaccttcagcgactactttatgagctgggtccgacaggcccctggcaaaggacttgaatgggtcgccaccatcagcaatggcggcacctacacttactaccccgacagcgtgaagggcagattcaccatctccagagacaacagcaagaacaccctgtacctccagatgaactccctgagagccgaggacaccgccgtgtactactgcgccagattcgacggctacatcttcgactattggggccagggcaccctggtcacagtctcttctacgcgtgggagcggcatccagaaccctgatcctgccgtgtaccagctgcgggatagcaagagcagcgacaagagcgtgtgtctgttcaccgacttcgacagccagaccaacgtgtcccagagcaaggactccgacgtgtacatcaccgataagaccgtgctggacatgcggagcatggacttcaagagcaactccgccgtggcctggtccaacaagtccgatttcgcctgcgccaacgccttcaacaacagcattatccccgaggacacattcttcccaagcagcgacgtgccctgcgacgtgaagctggtggaaaagagcttcgagacagacaccaacctgaacttccagaacctgagcgtgatcggcttcagaatcctgctgctgaaagtggccggctttaacctgctgatgaccctgcggctgtggtccagccgcgccaagagaagcggatctggcgtgaagcagaccctgaatttcgacctgctgaagctggctggcgacgtggaatccaacccaggcccttctagaggccatatgaccgagtacaagcccacggtgcgcctcgccacccgcgacgacgtccccagggccgtacgcaccctcgccgccgcgttcgccgactaccccgccacgcgccacaccgtcgatccggaccgccacatcgagcgggtcaccgagctgcaagaactcttcctcacgcgcgtcgggctcgacatcggcaaggtgtgggtcgcggacgacggcgccgcggtggcggtctggaccacgccggagagcgtcgaagcgggggcggtgttcgccgagatcggcccgcgcatggccgagttgagcggttcccggctggccgcgcagcaacagatggaaggcctcctggcgccgcaccggcccaaggagcccgcgtggttcctggccaccgtcggcgtctcgcccgaccaccagggcaagggtctgggcagcgccgtcgtgctccccggagtggaggcggccgagcgcgccggggtgcccgccttcctggagacctccgcgccccgcaacctccccttctacgagcggctcggcttcaccgtcaccgccgacgtcgaggtgcccgaaggaccgcgcacctggtgcatgacccgcaagcccggtgcctga

SEQ ID NO: 10703 - DNA, 2016 bp, Artificial Sequence
  Synthetic Polynucloetide
atggccttaccagtgaccgccttgctcctgccgctggccttgctgctccacgccgccaggccggacatccagatgacacagagccctagcagcctgtctgccagcgtgggagacagagtgaccatcacctgtagagccagccaggacatcagcaactacctgaactggtatcagcagaagcccggcaaggcccctaagctgctgatctactacaccagcagactgcacagcggcgtgcccagcagattttctggctctggcagcggcaccgacttcaccctgacaatatctagcctccagcctgaggacttcgccacctactattgccagcagggcaacaccctgccttggacatttggacagggcaccaaggtggaaatcaagagaggcggaggcggaagtggaggcggaggatctggcggcggaggctctgaagtgcagctggttgaatcaggtggcggcctggttcaacctggcggatctctgagactgagctgtgccgccagcggcttcaccttcagcgactactttatgagctgggtccgacaggcccctggcaaaggacttgaatgggtcgccaccatcagcaatggcggcacctacacttactaccccgacagcgtgaagggcagattcaccatctccagagacaacagcaagaacaccctgtacctccagatgaactccctgagagccgaggacaccgccgtgtactactgcgccagattcgacggctacatcttcgactattggggccagggcaccctggtcacagtctcttctctcgaggacctgaagaacgtgttcccacctgaggtggccgtgttcgagcctagcaaggccgagatcgcccacacccagaaagccaccctcgtgtgcctggctaccggcttctaccccgaccatgtggaactgtcttggtgggtcaacggcaaagaggtgcacagcggcgtgtctaccgacccccagccactgaaagaacagcccgccctgaacgacagccggtactgcctgagcagcagactgagagtgtccgccaccttctggcagaacccccggaaccacttcagatgccaggtgcagttctacggcctgagcgagaacgacgagtggacccaggacagagccaagcccgtgacccagatcgtgtctgccgaagcctggggcagagccgattgcggcatcaccagcgccagctaccaccagggcgtgctgagcgccaccatcctgtacgagatcctgctgggcaaggccaccctgtacgccgtgctggtgtctgccctggtgctgatggctatggtcaagcggaaggacagccggggaagggccaagcgatctggatctggagcaacaaacttctcactactcaaacaagcaggtgacgtggaggagaatcccgggcctactagaggccatatgaccgagtacaagcccacggtgcgcctcgccacccgcgacgacgtccccagggccgtacgcaccctcgccgccgcgttcgccgactaccccgccacgcgccacaccgtcgatccggaccgccacatcgagcgggtcaccgagctgcaagaactcttcctcacgcgcgtcgggctcgacatcggcaaggtgtgggtcgcggacgacggcgccgcggtggcggtctggaccacgccggagagcgtcgaagcgggggcggtgttcgccgagatcggcccgcgcatggccgagttgagcggttcccggctggccgcgcagcaacagatggaaggcctcctggcgccgcaccggcccaaggagcccgcgtggttcctggccaccgtcggcgtctcgcccgaccaccagggcaagggtctgggcagcgccgtcgtgctccccggagtggaggcggccgagcgcgccggggtgcccgccttcctggagacctccgcgccccgcaacctccccttctacgagcggctcggcttcaccgtcaccgccgacgtcgaggtgcccgaaggaccgcgcacctggtgcatgacccgcaagcccggtgcctga

SEQ ID NO: 10704 - DNA, 2085 bp, Artificial Sequence
  Synthetic Polynucloetide
atggccttaccagtgaccgccttgctcctgccgctggccttgctgctccacgccgccaggccggacatccagatgacacagagccctagcagcctgtctgccagcgtgggagacagagtgaccatcacctgtagagccagccaggacatcagcaactacctgaactggtatcagcagaagcccggcaaggcccctaagctgctgatctactacaccagcagactgcacagcggcgtgcccagcagattttctggctctggcagcggcaccgacttcaccctgacaatatctagcctccagcctgaggacttcgccacctactattgccagcagggcaacaccctgccttggacatttggacagggcaccaaggtggaaatcaagagaggcggaggcggaagtggaggcggaggatctggcggcggaggctctgaagtgcagctggttgaatcaggtggcggcctggttcaacctggcggatctctgagactgagctgtgccgccagcggcttcaccttcagcgactactttatgagctgggtccgacaggcccctggcaaaggacttgaatgggtcgccaccatcagcaatggcggcacctacacttactaccccgacagcgtgaagggcagattcaccatctccagagacaacagcaagaacaccctgtacctccagatgaactccctgagagccgaggacaccgccgtgtactactgcgccagattcgacggctacatcttcgactattggggccagggcaccctggtcacagtctcttctacgcgtgggtctggaggcggaggcagcggcggaggcgggagcggcgacggtaacgaggagatgggaggaatcactcaaaccccttacaaagtctcaatttcaggaacaactgttatccttacatgtccccagtatcctggcagcgagatcctttggcagcataacgacaagaatatagggggagatgaagacgataagaatatcggatctgacgaggatcacttgagcctgaaagagttctccgagcttgaacaaagcggatattatgtgtgctatccgcgcgggtcaaagccggaagacgctaacttttacctttatctccgagccagagtgtgcgaaaattgcatggaaatggacgttatgtccgttgctacaatagttatcgtagatatatgcatcacgggtggactgcttctgctggtttattattggtccaagaatagaaaggccaaagctaaacccgtgaccagaggcgctggcgcaggcggaaggcaaaggggacaaaacaaagaacggccaccaccagtgccaaatccagattatgagcctattcggaaaggacagagggacctgtactctggcctgaatcagagaagaatccgcgccaagagaagcggatctggcgtgaagcagaccctgaatttcgacctgctgaagctggctggcgacgtggaatccaacccaggcccttctagaggccatatgaccgagtacaagcccacggtgcgcctcgccacccgcgacgacgtccccagggccgtacgcaccctcgccgccgcgttcgccgactaccccgccacgcgccacaccgtcgatccggaccgccacatcgagcgggtcaccgagctgcaagaactcttcctcacgcgcgtcgggctcgacatcggcaaggtgtgggtcgcggacgacggcgccgcggtggcggtctggaccacgccggagagcgtcgaagcgggggcggtgttcgccgagatcggcccgcgcatggccgagttgagcggttcccggctggccgcgcagcaacagatggaaggcctcctggcgccgcaccggcccaaggagcccgcgtggttcctggccaccgtcggcgtctcgcccgaccaccagggcaagggtctgggcagcgccgtcgtgctccccggagtggaggcggccgagcgcgccggggtgcccgccttcctggagacctccgcgccccgcaacctccccttctacgagcggctcggcttcaccgtcaccgccgacgtcgaggtgcccgaaggaccgcgcacctggtgcatgacccgcaagcccggtgcctga

SEQ ID NO: 10705 - DNA, 1980 bp, Artificial Sequence
  Synthetic Polynucloetide
atggccttaccagtgaccgccttgctcctgccgctggccttgctgctccacgccgccaggccggacatccagatgacacagagccctagcagcctgtctgccagcgtgggagacagagtgaccatcacctgtagagccagccaggacatcagcaactacctgaactggtatcagcagaagcccggcaaggcccctaagctgctgatctactacaccagcagactgcacagcggcgtgcccagcagattttctggctctggcagcggcaccgacttcaccctgacaatatctagcctccagcctgaggacttcgccacctactattgccagcagggcaacaccctgccttggacatttggacagggcaccaaggtggaaatcaagagaggcggaggcggaagtggaggcggaggatctggcggcggaggctctgaagtgcagctggttgaatcaggtggcggcctggttcaacctggcggatctctgagactgagctgtgccgccagcggcttcaccttcagcgactactttatgagctgggtccgacaggcccctggcaaaggacttgaatgggtcgccaccatcagcaatggcggcacctacacttactaccccgacagcgtgaagggcagattcaccatctccagagacaacagcaagaacaccctgtacctccagatgaactccctgagagccgaggacaccgccgtgtactactgcgccagattcgacggctacatcttcgactattggggccagggcaccctggtcacagtctcttctacgcgtgggtctggaggcggaggcagcggcggaggcgggagcggcttcaagatccccatcgaggaactggaagatcgggtgttcgtgaactgcaacacctctatcacctgggtggaaggcaccgtgggaacactgctgagcgacatcaccagactggacctcggcaagcggattctggaccctcggggcatctacagatgcaacggcaccgacatctacaaggacaaagaaagcaccgtgcaggtccactacagaatgtgccagtcctgcgtggaactggaccctgctacagtggccggcatcatcgtgaccgatgtgatcgctactctgctgctggctctgggagtgttctgcttcgccggacacgaaacaggcagactgtctggcgctgccgatacacaggccctgctgagaaacgaccaagtgtatcagcccctgcgcgacagagatgatgcccagtattctcacctcggcggcaactgggctagaaacaagcgcgccaagagaagcggatctggcgtgaagcagaccctgaatttcgacctgctgaagctggctggcgacgtggaatccaacccaggcccttctagaggccatatgaccgagtacaagcccacggtgcgcctcgccacccgcgacgacgtccccagggccgtacgcaccctcgccgccgcgttcgccgactaccccgccacgcgccacaccgtcgatccggaccgccacatcgagcgggtcaccgagctgcaagaactcttcctcacgcgcgtcgggctcgacatcggcaaggtgtgggtcgcggacgacggcgccgcggtggcggtctggaccacgccggagagcgtcgaagcgggggcggtgttcgccgagatcggcccgcgcatggccgagttgagcggttcccggctggccgcgcagcaacagatggaaggcctcctggcgccgcaccggcccaaggagcccgcgtggttcctggccaccgtcggcgtctcgcccgaccaccagggcaagggtctgggcagcgccgtcgtgctccccggagtggaggcggccgagcgcgccggggtgcccgccttcctggagacctccgcgccccgcaacctccccttctacgagcggctcggcttcaccgtcaccgccgacgtcgaggtgcccgaaggaccgcgcacctggtgcatgacccgcaagcccggtgcctga

SEQ ID NO: 10706 - DNA, 2010 bp, Artificial Sequence
  Synthetic Polynucloetide
atggccttaccagtgaccgccttgctcctgccgctggccttgctgctccacgccgccaggccggacatccagatgacacagagccctagcagcctgtctgccagcgtgggagacagagtgaccatcacctgtagagccagccaggacatcagcaactacctgaactggtatcagcagaagcccggcaaggcccctaagctgctgatctactacaccagcagactgcacagcggcgtgcccagcagattttctggctctggcagcggcaccgacttcaccctgacaatatctagcctccagcctgaggacttcgccacctactattgccagcagggcaacaccctgccttggacatttggacagggcaccaaggtggaaatcaagagaggcggaggcggaagtggaggcggaggatctggcggcggaggctctgaagtgcagctggttgaatcaggtggcggcctggttcaacctggcggatctctgagactgagctgtgccgccagcggcttcaccttcagcgactactttatgagctgggtccgacaggcccctggcaaaggacttgaatgggtcgccaccatcagcaatggcggcacctacacttactaccccgacagcgtgaagggcagattcaccatctccagagacaacagcaagaacaccctgtacctccagatgaactccctgagagccgaggacaccgccgtgtactactgcgccagattcgacggctacatcttcgactattggggccagggcaccctggtcacagtctcttctacgcgtgggtctggaggcggaggcagcggcggaggcgggagcggccagagcatcaagggcaaccacctggtcaaggtgtacgactaccaagaggacggcagcgtgctgctgacatgtgatgccgaggccaagaacatcacctggtttaaggacggcaagatgatcggcttcctgaccgaggacaagaagaagtggaacctgggcagcaacgctaaggaccccagaggcatgtatcagtgcaagggcagccagaacaagagcaagcccctccaggtgtactaccggatgtgccagaactgcatcgagctgaacgccgctaccatcagcggctttctgttcgccgagatcgtgtccatcttcgtgctggccgtgggcgtgtactttatcgctggacaggatggcgtgcggcagagcagagcttccgataagcaaaccctgctgcctaacgaccagctgtaccagcctctgaaggacagagaggacgaccagtacagccacctccagggcaatcagctgagaagaaaccgcgccaagagaagcggatctggcgtgaagcagaccctgaatttcgacctgctgaagctggctggcgacgtggaatccaacccaggcccttctagaggccatatgaccgagtacaagcccacggtgcgcctcgccacccgcgacgacgtccccagggccgtacgcaccctcgccgccgcgttcgccgactaccccgccacgcgccacaccgtcgatccggaccgccacatcgagcgggtcaccgagctgcaagaactcttcctcacgcgcgtcgggctcgacatcggcaaggtgtgggtcgcggacgacggcgccgcggtggcggtctggaccacgccggagagcgtcgaagcgggggcggtgttcgccgagatcggcccgcgcatggccgagttgagcggttcccggctggccgcgcagcaacagatggaaggcctcctggcgccgcaccggcccaaggagcccgcgtggttcctggccaccgtcggcgtctcgcccgaccaccagggcaagggtctgggcagcgccgtcgtgctccccggagtggaggcggccgagcgcgccggggtgcccgccttcctggagacctccgcgccccgcaacctccccttctacgagcggctcggcttcaccgtcaccgccgacgtcgaggtgcccgaaggaccgcgcacctggtgcatgacccgcaagcccggtgcctga

SEQ ID NO: 10707 - DNA, 1959 bp, Artificial Sequence
  Synthetic Polynucloetide
atggccttaccagtgaccgccttgctcctgccgctggccttgctgctccacgccgccaggccggacatccagatgacacagagccctagcagcctgtctgccagcgtgggagacagagtgaccatcacctgtagagccagccaggacatcagcaactacctgaactggtatcagcagaagcccggcaaggcccctaagctgctgatctactacaccagcagactgcacagcggcgtgcccagcagattttctggctctggcagcggcaccgacttcaccctgacaatatctagcctccagcctgaggacttcgccacctactattgccagcagggcaacaccctgccttggacatttggacagggcaccaaggtggaaatcaagagaggcggaggcggaagtggaggcggaggatctggcggcggaggctctgaagtgcagctggttgaatcaggtggcggcctggttcaacctggcggatctctgagactgagctgtgccgccagcggcttcaccttcagcgactactttatgagctgggtccgacaggcccctggcaaaggacttgaatgggtcgccaccatcagcaatggcggcacctacacttactaccccgacagcgtgaagggcagattcaccatctccagagacaacagcaagaacaccctgtacctccagatgaactccctgagagccgaggacaccgccgtgtactactgcgccagattcgacggctacatcttcgactattggggccagggcaccctggtcacagtctcttctacgcgtgggtctggaggcggaggcagcggcggaggcgggagcggccagagttttgggttgttggaccctaaattgtgctatctgttggacggaatcctgttcatttacggagtgatcctgaccgcattgttcctgcgggttaagttttccagatccgcagacgcacccgcttaccaacaagggcagaaccaactctacaatgaacttaatttggggcggagggaagagtacgacgttctggacaaaaggaggggacgagatcccgagatgggcggaaagcctcagcgaaggaagaatccgcaagaggggctttataacgaactccagaaagataaaatggcagaagcctatagtgagattgggatgaagggagaaaggaggaggggtaaaggtcacgatgggttgtaccaaggattgagcacagccactaaagatacctatgatgcgctccacatgcaggccctgccgccaagacgcgccaagagaagcggatctggcgtgaagcagaccctgaatttcgacctgctgaagctggctggcgacgtggaatccaacccaggcccttctagaggccatatgaccgagtacaagcccacggtgcgcctcgccacccgcgacgacgtccccagggccgtacgcaccctcgccgccgcgttcgccgactaccccgccacgcgccacaccgtcgatccggaccgccacatcgagcgggtcaccgagctgcaagaactcttcctcacgcgcgtcgggctcgacatcggcaaggtgtgggtcgcggacgacggcgccgcggtggcggtctggaccacgccggagagcgtcgaagcgggggcggtgttcgccgagatcggcccgcgcatggccgagttgagcggttcccggctggccgcgcagcaacagatggaaggcctcctggcgccgcaccggcccaaggagcccgcgtggttcctggccaccgtcggcgtctcgcccgaccaccagggcaagggtctgggcagcgccgtcgtgctccccggagtggaggcggccgagcgcgccggggtgcccgccttcctggagacctccgcgccccgcaacctccccttctacgagcggctcggcttcaccgtcaccgccgacgtcgaggtgcccgaaggaccgcgcacctggtgcatgacccgcaagcccggtgcctga

SEQ ID NO: 10708 - DNA, 2259 bp, Artificial Sequence
  Synthetic Polynucloetide
atggccttaccagtgaccgccttgctcctgccgctggccttgctgctccacgccgccaggccggaagtgcagctggttgaatctggcggaggactggttcagcctggcggatctctgagactgtcttgtgccgccagcggcttcagcttcagcgacttttggatgagctgggtccgacaggcccctggcaaaggacttgaatgggtcgccacaatcagccaggccggcagcgagaaggactacgtggactctgtgaagggcagattcaccatcagccgggacaacgccaagaagtccctgtacctccagatgaacagcctgagagccgaggacaccgccgtgtactattgtgcctctggcgtgtacagcttcgactacagaggccagggcaccctggtcacagtctcttctggtaccggcggaggcggatctggcggcggaggtagcggtggcggaggatctgaattcgacatccagatgacacagagccctagcagcctgtctgccagcgtgggagacagagtgaccatcacctgtagagccagccaggacatcagcaactacctgaactggtatcagcagaagcccggcaaggcccctaagctgctgatctactacaccagcagactgcacagcggcgtgcccagcagattttctggctctggcagcggcaccgacttcaccctgacaatatctagcctccagcctgaggacttcgccacctactattgccagcagggcaacaccctgccttggacatttggacagggcaccaaggtggaaatcaagagactcgaggacctgaagaacgtgttcccacctgaggtggccgtgttcgagcctagcgaggccgagatcagccacacccagaaagccaccctcgtgtgcctggctaccggcttctaccccgaccatgtggaactgtcttggtgggtcaacggcaaagaggtgcacagcggcgtgtgtaccgacccccagccactgaaagaacagcccgccctgaacgacagccggtactgcctgagcagcagactgagagtgtccgccaccttctggcagaacccccggaaccacttcagatgccaggtgcagttctacggcctgagcgagaacgacgagtggacccaggacagagccaagcccgtgacccagatcgtgtctgccgaagcctggggcagagccgattgcggctttaccagcgagagctaccagcagggcgtgctgagcgccaccatcctgtacgagatcctgctgggcaaggccaccctgtacgccgtgctggtgtctgccctggtgctgatggctatggtcaagcggaaggacagccggggaagggccaagcgatctggatctggagcaacaaacttctcactactcaaacaagcaggtgacgtggaggagaatcccgggcctactagtatggactggatttggcgcatccttttccttgtcggcgctgctaccggcgcgcattccttcgaagaagtgcagctggttgaatcaggtggcggcctggttcaacctggcggatctctgagactgagctgtgccgccagcggcttcaccttcagcgactactttatgagctgggtccgacaggcccctggcaaaggacttgaatgggtcgccaccatcagcaatggcggcacctacacttactaccccgacagcgtgaagggcagattcaccatctccagagacaacagcaagaacaccctgtacctccagatgaactccctgagagccgaggacaccgccgtgtactactgcgccagattcgacggctacatcttcgactattggggccagggcaccctggtcacagtctcttctacgcgtatccagaaccctgatcctgccgtgtaccagctgcgggatagcaagagcagcgacaagagcgtgtgtctgttcaccgacttcgacagccagaccaacgtgtcccagagcaaggactccgacgtgtacatcaccgataagtgcgtgctggacatgcggagcatggacttcaagagcaactccgccgtggcctggtccaacaagtccgatttcgcctgcgccaacgccttcaacaacagcattatccccgaggacacattcttcccaagccccgagagcagctgcgacgtgaagctggtggaaaagagcttcgagacagacaccaacctgaacttccagaacctgagcgtgatcggcttcagaatcctgctgctgaaagtggccggctttaacctgctgatgaccctgcggctgtggtccagc

SEQ ID NO: 10709 - DNA, 2271 bp, Artificial Sequence
  Synthetic Polynucloetide
atggccttaccagtgaccgccttgctcctgccgctggccttgctgctccacgccgccaggccggaagtgcagctggttgaatctggcggaggactggttcagcctggcggatctctgagactgtcttgtgccgccagcggcttcagcttcagcgacttttggatgagctgggtccgacaggcccctggcaaaggacttgaatgggtcgccacaatcagccaggccggcagcgagaaggactacgtggactctgtgaagggcagattcaccatcagccgggacaacgccaagaagtccctgtacctccagatgaacagcctgagagccgaggacaccgccgtgtactattgtgcctctggcgtgtacagcttcgactacagaggccagggcaccctggtcacagtctcttctggtaccggcggaggcggatctggcggcggaggtagcggtggcggaggatctgaattcgacatccagatgacacagagccctagcagcctgtctgccagcgtgggagacagagtgaccatcacctgtagagccagccaggacatcagcaactacctgaactggtatcagcagaagcccggcaaggcccctaagctgctgatctactacaccagcagactgcacagcggcgtgcccagcagattttctggctctggcagcggcaccgacttcaccctgacaatatctagcctccagcctgaggacttcgccacctactattgccagcagggcaacaccctgccttggacatttggacagggcaccaaggtggaaatcaagagactcgagatccagaaccctgatcctgccgtgtaccagctgcgggatagcaagagcagcgacaagagcgtgtgtctgttcaccgacttcgacagccagaccaacgtgtcccagagcaaggactccgacgtgtacatcaccgataagtgcgtgctggacatgcggagcatggacttcaagagcaactccgccgtggcctggtccaacaagtccgatttcgcctgcgccaacgccttcaacaacagcattatccccgaggacacattcttcccaagccccgagagcagctgcgacgtgaagctggtggaaaagagcttcgagacagacaccaacctgaacttccagaacctgagcgtgatcggcttcagaatcctgctgctgaaagtggccggctttaacctgctgatgaccctgcggctgtggtccagccgcgccaagagaagcggatctggcgtgaagcagaccctgaatttcgacctgctgaagctggctggcgacgtggaatccaacccaggccctactagtatggactggatttggcgcatccttttccttgtcggcgctgctaccggcgcgcattccttcgaagaagtgcagctggttgaatcaggtggcggcctggttcaacctggcggatctctgagactgagctgtgccgccagcggcttcaccttcagcgactactttatgagctgggtccgacaggcccctggcaaaggacttgaatgggtcgccaccatcagcaatggcggcacctacacttactaccccgacagcgtgaagggcagattcaccatctccagagacaacagcaagaacaccctgtacctccagatgaactccctgagagccgaggacaccgccgtgtactactgcgccagattcgacggctacatcttcgactattggggccagggcaccctggtcacagtctcttctacgcgtgaggacctgaagaacgtgttcccacctgaggtggccgtgttcgagcctagcgaggccgagatcagccacacccagaaagccaccctcgtgtgcctggctaccggcttctaccccgaccatgtggaactgtcttggtgggtcaacggcaaagaggtgcacagcggcgtgtgtaccgacccccagccactgaaagaacagcccgccctgaacgacagccggtactgcctgagcagcagactgagagtgtccgccaccttctggcagaacccccggaaccacttcagatgccaggtgcagttctacggcctgagcgagaacgacgagtggacccaggacagagccaagcccgtgacccagatcgtgtctgccgaagcctggggcagagccgattgcggctttaccagcgagagctaccagcagggcgtgctgagcgccaccatcctgtacgagatcctgctgggcaaggccaccctgtacgccgtgctggtgtctgccctggtgctgatggctatggtcaagcggaaggacagccgggga

SEQ ID NO: 10710 - DNA, 2847 bp, Artificial Sequence
  Synthetic Polynucloetide
atggccttaccagtgaccgccttgctcctgccgctggccttgctgctccacgccgccaggccggaagtgcagctggttgaatctggcggaggactggttcagcctggcggatctctgagactgtcttgtgccgccagcggcttcagcttcagcgacttttggatgagctgggtccgacaggcccctggcaaaggacttgaatgggtcgccacaatcagccaggccggcagcgagaaggactacgtggactctgtgaagggcagattcaccatcagccgggacaacgccaagaagtccctgtacctccagatgaacagcctgagagccgaggacaccgccgtgtactattgtgcctctggcgtgtacagcttcgactacagaggccagggcaccctggtcacagtctcttctggtaccggcggaggcggatctggcggcggaggtagcggtggcggaggatctgaattcgacatccagatgacacagagccctagcagcctgtctgccagcgtgggagacagagtgaccatcacctgtagagccagccaggacatcagcaactacctgaactggtatcagcagaagcccggcaaggcccctaagctgctgatctactacaccagcagactgcacagcggcgtgcccagcagattttctggctctggcagcggcaccgacttcaccctgacaatatctagcctccagcctgaggacttcgccacctactattgccagcagggcaacaccctgccttggacatttggacagggcaccaaggtggaaatcaagagactcgaggacctgaagaacgtgttcccacctgaggtggccgtgttcgagcctagcgaggccgagatcagccacacccagaaagccaccctcgtgtgcctggctaccggcttctaccccgaccatgtggaactgtcttggtgggtcaacggcaaagaggtgcacagcggcgtgtctaccgacccccagccactgaaagaacagcccgccctgaacgacagccggtactgcctgagcagcagactgagagtgtccgccaccttctggcagaacccccggaaccacttcagatgccaggtgcagttctacggcctgagcgagaacgacgagtggacccaggacagagccaagcccgtgacccagatcgtgtctgccgaagcctggggcagagccgattgcggatcccagagcttcggcctgctggaccccaagctgtgctacctgctggatggcatcctgttcatctacggcgtgatcctgaccgccctgttcctgagagtgaagttcagcagaagcgccgacgcccctgcctaccagcagggacagaaccaactgtacaacgagctgaacctgggcagacgggaagagtacgacgtgctggacaagcggagaggcagggaccctgagatgggcggaaagccccagcggagaaagaacccccaggaaggactgtataacgaactccagaaagacaagatggccgaagcctacagcgagatcggcatgaagggcgagcggagaagaggcaagggccacgatggcctgtaccagggcctgagcaccgccaccaaggacacctatgacgccctgcacatgcaggccctgcctccaagaagggccaagcgatctggatctggagcaacaaacttctcactactcaaacaagcaggtgacgtggaggagaatcccgggcctactagtatggactggatttggcgcatccttttccttgtcggcgctgctaccggcgcgcattccttcgaagaagtgcagctggttgaatcaggtggcggcctggttcaacctggcggatctctgagactgagctgtgccgccagcggcttcaccttcagcgactactttatgagctgggtccgacaggcccctggcaaaggacttgaatgggtcgccaccatcagcaatggcggcacctacacttactaccccgacagcgtgaagggcagattcaccatctccagagacaacagcaagaacaccctgtacctccagatgaactccctgagagccgaggacaccgccgtgtactactgcgccagattcgacggctacatcttcgactattggggccagggcaccctggtcacagtctcttctacgcgtatccagaaccctgatcctgccgtgtaccagctgcgggatagcaagagcagcgacaagagcgtgtgtctgttcaccgacttcgacagccagaccaacgtgtcccagagcaaggactccgacgtgtacatcaccgataagaccgtgctggacatgcggagcatggacttcaagagcaactccgccgtggcctggtccaacaagtccgatttcgcctgcgccaacgccttcaacaacagcattatccccgaggacacattcttcccaagccccgagagcagctgcggtacccagagttttgggttgttggaccctaaattgtgctatctgttggacggaatcctgttcatttacggagtgatcctgaccgcattgttcctgcgggttaagttttccagatccgcagacgcacccgcttaccaacaagggcagaaccaactctacaatgaacttaatttggggcggagggaagagtacgacgttctggacaaaaggaggggacgagatcccgagatgggcggaaagcctcagcgaaggaagaatccgcaagaggggctttataacgaactccagaaagataaaatggcagaagcctatagtgagattgggatgaagggagaaaggaggaggggtaaaggtcacgatgggttgtaccaaggattgagcacagccactaaagatacctatgatgcgctccacatgcaggccctgccgccaaga

SEQ ID NO: 10711 - DNA, 2337 bp, Artificial Sequence
  Synthetic Polynucloetide
atggccttaccagtgaccgccttgctcctgccgctggccttgctgctccacgccgccaggccggaagtgcagctggttgaatctggcggaggactggttcagcctggcggatctctgagactgtcttgtgccgccagcggcttcagcttcagcgacttttggatgagctgggtccgacaggcccctggcaaaggacttgaatgggtcgccacaatcagccaggccggcagcgagaaggactacgtggactctgtgaagggcagattcaccatcagccgggacaacgccaagaagtccctgtacctccagatgaacagcctgagagccgaggacaccgccgtgtactattgtgcctctggcgtgtacagcttcgactacagaggccagggcaccctggtcacagtctcttctggtaccggcggaggcggatctggcggcggaggtagcggtggcggaggatctgaattcgacatccagatgacacagagccctagcagcctgtctgccagcgtgggagacagagtgaccatcacctgtagagccagccaggacatcagcaactacctgaactggtatcagcagaagcccggcaaggcccctaagctgctgatctactacaccagcagactgcacagcggcgtgcccagcagattttctggctctggcagcggcaccgacttcaccctgacaatatctagcctccagcctgaggacttcgccacctactattgccagcagggcaacaccctgccttggacatttggacagggcaccaaggtggaaatcaagagactcgagggacagcctaaggccaatcctaccgtgacactgttccctccaagcagcgaagaactccaggccaacaaggccacacttgtgtgcctgatctccgacttctaccctggggctgtgacagtggcttggaaggccgatggatctcctgtgaaagccggcgtggaaaccaccaagccatccaagcagagcaacaacaaatacgccgccagctcctacctgagcctgacacctgagcagtggaagtcccacagatcctacagctgccaagtgacccacgaaggcagcaccgtggaaaagacagtggcccctacagagtgcagccccatcaagaccgatgtgattacaatggaccccaaggacaactgctccaaggacgccaacgataccctgctgctccagctgaccaacaccagcgcctactacatgtacttgttgctgctgctgaagtccgtggtgtacttcgccatcatcacatgctgcctgctgcggagaaccgccttctgctgcaacggcgagaagtctagggccaagcgatctggatctggagcaacaaacttctcactactcaaacaagcaggtgacgtggaggagaatcccgggcctactagtatggactggatttggcgcatccttttccttgtcggcgctgctaccggcgcgcattccttcgaagaagtgcagctggttgaatcaggtggcggcctggttcaacctggcggatctctgagactgagctgtgccgccagcggcttcaccttcagcgactactttatgagctgggtccgacaggcccctggcaaaggacttgaatgggtcgccaccatcagcaatggcggcacctacacttactaccccgacagcgtgaagggcagattcaccatctccagagacaacagcaagaacaccctgtacctccagatgaactccctgagagccgaggacaccgccgtgtactactgcgccagattcgacggctacatcttcgactattggggccagggcaccctggtcacagtctcttctacgcgtgcctctacaaagggaccctccgtgtttcctctggctcccagcagcaagtctacaagcggaggaacagccgctctgggctgcctggtcaaggattactttcccgagcctgtgaccgtgtcctggaatagcggagcactgacaagcggcgtgcacacctttccagccgtgctgcaaagcagcggcctgtactctctgagcagcgtggtcacagtgcctagctctagcctgggcacccagacctacatctgcaatgtgaaccacaagcctagcaacaccaaggtggacaagagagtggaacccaagagctgtgaagtgaaaaccgactccaccgaccacgtgaagcccaaagagacagagaacaccaagcagcccagcaagagctgccacaagcccaaggccatcgtgcacaccgagaaagtgaacatgatgagcctgaccgtgctgggcctgcggatgctgttcgccaaaaccgtggccgtgaacttcctgctgaccgccaagctgttcttcctc

SEQ ID NO: 10712 - DNA, 2280 bp, Artificial Sequence
  Synthetic Polynucloetide
atggccttaccagtgaccgccttgctcctgccgctggccttgctgctccacgccgccaggccggaagtgcagctggttgaatctggcggaggactggttcagcctggcggatctctgagactgtcttgtgccgccagcggcttcagcttcagcgacttttggatgagctgggtccgacaggcccctggcaaaggacttgaatgggtcgccacaatcagccaggccggcagcgagaaggactacgtggactctgtgaagggcagattcaccatcagccgggacaacgccaagaagtccctgtacctccagatgaacagcctgagagccgaggacaccgccgtgtactattgtgcctctggcgtgtacagcttcgactacagaggccagggcaccctggtcacagtctcttctggtaccggcggaggcggatctggcggcggaggtagcggtggcggaggatctgaattcgacatccagatgacacagagccctagcagcctgtctgccagcgtgggagacagagtgaccatcacctgtagagccagccaggacatcagcaactacctgaactggtatcagcagaagcccggcaaggcccctaagctgctgatctactacaccagcagactgcacagcggcgtgcccagcagattttctggctctggcagcggcaccgacttcaccctgacaatatctagcctccagcctgaggacttcgccacctactattgccagcagggcaacaccctgccttggacatttggacagggcaccaaggtggaaatcaagagactcgagggacagcctaaggccaatcctaccgtgacactgttccctccaagcagcgaagaactccaggccaacaaggccacacttgtgtgcctgatctccgacttctaccctggggctgtgacagtggcttggaaggccgatggatctcctgtgaaagccggcgtggaaaccaccaagccatccaagcagagcaacaacaaatacgccgccagctcctacctgagcctgacacctgagcagtggaagtcccacagatcctacagctgccaagtgacccacgaaggcagcaccgtggaaaagacagtggcccctacagagtgcagcggcagagccgattgcggctttaccagcgagagctaccagcagggcgtgctgagcgccaccatcctgtacgagatcctgctgggcaaggccaccctgtacgccgtgctggtgtctgccctggtgctgatggctatggtcaagcggaaggacagccggggacgcgccaagagaagcggatctggcgtgaagcagaccctgaatttcgacctgctgaagctggctggcgacgtggaatccaacccaggccctactagtatggactggatttggcgcatccttttccttgtcggcgctgctaccggcgcgcattccttcgaagaagtgcagctggttgaatcaggtggcggcctggttcaacctggcggatctctgagactgagctgtgccgccagcggcttcaccttcagcgactactttatgagctgggtccgacaggcccctggcaaaggacttgaatgggtcgccaccatcagcaatggcggcacctacacttactaccccgacagcgtgaagggcagattcaccatctccagagacaacagcaagaacaccctgtacctccagatgaactccctgagagccgaggacaccgccgtgtactactgcgccagattcgacggctacatcttcgactattggggccagggcaccctggtcacagtctcttctacgcgtgcctctacaaagggaccctccgtgtttcctctggctcccagcagcaagtctacaagcggaggaacagccgctctgggctgcctggtcaaggattactttcccgagcctgtgaccgtgtcctggaatagcggagcactgacaagcggcgtgcacacctttccagccgtgctgcaaagcagcggcctgtactctctgagcagcgtggtcacagtgcctagctctagcctgggcacccagacctacatctgcaatgtgaaccacaagcctagcaacaccaaggtggacaagagagtggaacccaagagctgtatccccgaggacacattcttcccaagccccgagagcagctgcgacgtgaagctggtggaaaagagcttcgagacagacaccaacctgaacttccagaacctgagcgtgatcggcttcagaatcctgctgctgaaagtggccggctttaacctgctgatgaccctgcggctgtggtccagc

SEQ ID NO: 10713 - DNA, 2682 bp, Artificial Sequence
  Synthetic Polynucloetide
atggccttaccagtgaccgccttgctcctgccgctggccttgctgctccacgccgccaggccggaagtgcagctggttgaatctggcggaggactggttcagcctggcggatctctgagactgtcttgtgccgccagcggcttcagcttcagcgacttttggatgagctgggtccgacaggcccctggcaaaggacttgaatgggtcgccacaatcagccaggccggcagcgagaaggactacgtggactctgtgaagggcagattcaccatcagccgggacaacgccaagaagtccctgtacctccagatgaacagcctgagagccgaggacaccgccgtgtactattgtgcctctggcgtgtacagcttcgactacagaggccagggcaccctggtcacagtctcttctggtaccggcggaggcggatctggcggcggaggtagcggtggcggaggatctgaattcgacatccagatgacacagagccctagcagcctgtctgccagcgtgggagacagagtgaccatcacctgtagagccagccaggacatcagcaactacctgaactggtatcagcagaagcccggcaaggcccctaagctgctgatctactacaccagcagactgcacagcggcgtgcccagcagattttctggctctggcagcggcaccgacttcaccctgacaatatctagcctccagcctgaggacttcgccacctactattgccagcagggcaacaccctgccttggacatttggacagggcaccaaggtggaaatcaagagactcgagatccagaaccctgatcctgccgtgtaccagctgcgggatagcaagagcagcgacaagagcgtgtgtctgttcaccgacttcgacagccagaccaacgtgtcccagagcaaggactccgacgtgtacatcaccgataagtgcgtgctggacatgcggagcatggacttcaagagcaactccgccgtggcctggtccaacaagtccgatttcgcctgcgccaacgccttcaacaacagcattatccccgaggacacattcttcccaagccccgagagcagctgcgacgtgaagctggtggaaaagagcttcgagacagacaccaacctgaacttccagaacctgagcgtgatcggcttcagaatcctgctgctgaaagtggccggctttaacctgctgatgaccctgcggctgtggtccagccgcgccaagagaagcggatctggcgtgaagcagaccctgaatttcgacctgctgaagctggctggcgacgtggaatccaacccaggccctactagtatggactggatttggcgcatccttttccttgtcggcgctgctaccggcgcgcattccgggccccagctccagctgcaagagtctggacctggcctggtcaagcctagcgagacactgagcctgacctgtaccgtgtccggcgatagcatcagcagcggcgattactactggggctggatcagacagcctcctggcaaaggactggaatggatcggccacatctactacagcggcgtgacctactacaaccccagcctgaagtccagagtgaccatcagcgtggacaccagccggaaccagttctccctgaagctgtctagcgtgacagccgccgataccgccgtgtactactgcaccagagaggacagcagcaactggcggagtagaggccagggaacactggtcacagttagctctggatccggcggaggcggaagtggaggcggaggatctggcggcggaggctctttcgaagaagtgcagctggttgaatcaggtggcggcctggttcaacctggcggatctctgagactgagctgtgccgccagcggcttcaccttcagcgactactttatgagctgggtccgacaggcccctggcaaaggacttgaatgggtcgccaccatcagcaatggcggcacctacacttactaccccgacagcgtgaagggcagattcaccatctccagagacaacagcaagaacaccctgtacctccagatgaactccctgagagccgaggacaccgccgtgtactactgcgccagattcgacggctacatcttcgactattggggccagggcaccctggtcacagtctcttctacgcgtgaggacctgaagaacgtgttcccacctgaggtggccgtgttcgagcctagcgaggccgagatcagccacacccagaaagccaccctcgtgtgcctggctaccggcttctaccccgaccatgtggaactgtcttggtgggtcaacggcaaagaggtgcacagcggcgtgtgtaccgacccccagccactgaaagaacagcccgccctgaacgacagccggtactgcctgagcagcagactgagagtgtccgccaccttctggcagaacccccggaaccacttcagatgccaggtgcagttctacggcctgagcgagaacgacgagtggacccaggacagagccaagcccgtgacccagatcgtgtctgccgaagcctggggcagagccgattgcggctttaccagcgagagctaccagcagggcgtgctgagcgccaccatcctgtacgagatcctgctgggcaaggccaccctgtacgccgtgctggtgtctgccctggtgctgatggctatggtcaagcggaaggacagccgggga

SEQ ID NO: 10714 - DNA, 3258 bp, Artificial Sequence
  Synthetic Polynucloetide
atggccttaccagtgaccgccttgctcctgccgctggccttgctgctccacgccgccaggccggaagtgcagctggttgaatctggcggaggactggttcagcctggcggatctctgagactgtcttgtgccgccagcggcttcagcttcagcgacttttggatgagctgggtccgacaggcccctggcaaaggacttgaatgggtcgccacaatcagccaggccggcagcgagaaggactacgtggactctgtgaagggcagattcaccatcagccgggacaacgccaagaagtccctgtacctccagatgaacagcctgagagccgaggacaccgccgtgtactattgtgcctctggcgtgtacagcttcgactacagaggccagggcaccctggtcacagtctcttctggtaccggcggaggcggatctggcggcggaggtagcggtggcggaggatctgaattcgacatccagatgacacagagccctagcagcctgtctgccagcgtgggagacagagtgaccatcacctgtagagccagccaggacatcagcaactacctgaactggtatcagcagaagcccggcaaggcccctaagctgctgatctactacaccagcagactgcacagcggcgtgcccagcagattttctggctctggcagcggcaccgacttcaccctgacaatatctagcctccagcctgaggacttcgccacctactattgccagcagggcaacaccctgccttggacatttggacagggcaccaaggtggaaatcaagagactcgaggacctgaagaacgtgttcccacctgaggtggccgtgttcgagcctagcgaggccgagatcagccacacccagaaagccaccctcgtgtgcctggctaccggcttctaccccgaccatgtggaactgtcttggtgggtcaacggcaaagaggtgcacagcggcgtgtctaccgacccccagccactgaaagaacagcccgccctgaacgacagccggtactgcctgagcagcagactgagagtgtccgccaccttctggcagaacccccggaaccacttcagatgccaggtgcagttctacggcctgagcgagaacgacgagtggacccaggacagagccaagcccgtgacccagatcgtgtctgccgaagcctggggcagagccgattgcggatcccagagcttcggcctgctggaccccaagctgtgctacctgctggatggcatcctgttcatctacggcgtgatcctgaccgccctgttcctgagagtgaagttcagcagaagcgccgacgcccctgcctaccagcagggacagaaccaactgtacaacgagctgaacctgggcagacgggaagagtacgacgtgctggacaagcggagaggcagggaccctgagatgggcggaaagccccagcggagaaagaacccccaggaaggactgtataacgaactccagaaagacaagatggccgaagcctacagcgagatcggcatgaagggcgagcggagaagaggcaagggccacgatggcctgtaccagggcctgagcaccgccaccaaggacacctatgacgccctgcacatgcaggccctgcctccaagaagggccaagcgatctggatctggagcaacaaacttctcactactcaaacaagcaggtgacgtggaggagaatcccgggcctactagtatggactggatttggcgcatccttttccttgtcggcgctgctaccggcgcgcattccgggccccagctccagctgcaagagtctggacctggcctggtcaagcctagcgagacactgagcctgacctgtaccgtgtccggcgatagcatcagcagcggcgattactactggggctggatcagacagcctcctggcaaaggactggaatggatcggccacatctactacagcggcgtgacctactacaaccccagcctgaagtccagagtgaccatcagcgtggacaccagccggaaccagttctccctgaagctgtctagcgtgacagccgccgataccgccgtgtactactgcaccagagaggacagcagcaactggcggagtagaggccagggaacactggtcacagttagctctggatccggcggaggcggaagtggaggcggaggatctggcggcggaggctctttcgaagaagtgcagctggttgaatcaggtggcggcctggttcaacctggcggatctctgagactgagctgtgccgccagcggcttcaccttcagcgactactttatgagctgggtccgacaggcccctggcaaaggacttgaatgggtcgccaccatcagcaatggcggcacctacacttactaccccgacagcgtgaagggcagattcaccatctccagagacaacagcaagaacaccctgtacctccagatgaactccctgagagccgaggacaccgccgtgtactactgcgccagattcgacggctacatcttcgactattggggccagggcaccctggtcacagtctcttctacgcgtatccagaaccctgatcctgccgtgtaccagctgcgggatagcaagagcagcgacaagagcgtgtgtctgttcaccgacttcgacagccagaccaacgtgtcccagagcaaggactccgacgtgtacatcaccgataagaccgtgctggacatgcggagcatggacttcaagagcaactccgccgtggcctggtccaacaagtccgatttcgcctgcgccaacgccttcaacaacagcattatccccgaggacacattcttcccaagccccgagagcagctgcggtacccagagttttgggttgttggaccctaaattgtgctatctgttggacggaatcctgttcatttacggagtgatcctgaccgcattgttcctgcgggttaagttttccagatccgcagacgcacccgcttaccaacaagggcagaaccaactctacaatgaacttaatttggggcggagggaagagtacgacgttctggacaaaaggaggggacgagatcccgagatgggcggaaagcctcagcgaaggaagaatccgcaagaggggctttataacgaactccagaaagataaaatggcagaagcctatagtgagattgggatgaagggagaaaggaggaggggtaaaggtcacgatgggttgtaccaaggattgagcacagccactaaagatacctatgatgcgctccacatgcaggccctgccgccaaga

SEQ ID NO: 10715 - DNA, 2748 bp, Artificial Sequence
  Synthetic Polynucloetide
atggccttaccagtgaccgccttgctcctgccgctggccttgctgctccacgccgccaggccggaagtgcagctggttgaatctggcggaggactggttcagcctggcggatctctgagactgtcttgtgccgccagcggcttcagcttcagcgacttttggatgagctgggtccgacaggcccctggcaaaggacttgaatgggtcgccacaatcagccaggccggcagcgagaaggactacgtggactctgtgaagggcagattcaccatcagccgggacaacgccaagaagtccctgtacctccagatgaacagcctgagagccgaggacaccgccgtgtactattgtgcctctggcgtgtacagcttcgactacagaggccagggcaccctggtcacagtctcttctggtaccggcggaggcggatctggcggcggaggtagcggtggcggaggatctgaattcgacatccagatgacacagagccctagcagcctgtctgccagcgtgggagacagagtgaccatcacctgtagagccagccaggacatcagcaactacctgaactggtatcagcagaagcccggcaaggcccctaagctgctgatctactacaccagcagactgcacagcggcgtgcccagcagattttctggctctggcagcggcaccgacttcaccctgacaatatctagcctccagcctgaggacttcgccacctactattgccagcagggcaacaccctgccttggacatttggacagggcaccaaggtggaaatcaagagactcgagggacagcctaaggccaatcctaccgtgacactgttccctccaagcagcgaagaactccaggccaacaaggccacacttgtgtgcctgatctccgacttctaccctggggctgtgacagtggcttggaaggccgatggatctcctgtgaaagccggcgtggaaaccaccaagccatccaagcagagcaacaacaaatacgccgccagctcctacctgagcctgacacctgagcagtggaagtcccacagatcctacagctgccaagtgacccacgaaggcagcaccgtggaaaagacagtggcccctacagagtgcagccccatcaagaccgatgtgattacaatggaccccaaggacaactgctccaaggacgccaacgataccctgctgctccagctgaccaacaccagcgcctactacatgtacttgttgctgctgctgaagtccgtggtgtacttcgccatcatcacatgctgcctgctgcggagaaccgccttctgctgcaacggcgagaagtctagggccaagcgatctggatctggagcaacaaacttctcactactcaaacaagcaggtgacgtggaggagaatcccgggcctactagtatggactggatttggcgcatccttttccttgtcggcgctgctaccggcgcgcattccgggccccagctccagctgcaagagtctggacctggcctggtcaagcctagcgagacactgagcctgacctgtaccgtgtccggcgatagcatcagcagcggcgattactactggggctggatcagacagcctcctggcaaaggactggaatggatcggccacatctactacagcggcgtgacctactacaaccccagcctgaagtccagagtgaccatcagcgtggacaccagccggaaccagttctccctgaagctgtctagcgtgacagccgccgataccgccgtgtactactgcaccagagaggacagcagcaactggcggagtagaggccagggaacactggtcacagttagctctggatccggcggaggcggaagtggaggcggaggatctggcggcggaggctctttcgaagaagtgcagctggttgaatcaggtggcggcctggttcaacctggcggatctctgagactgagctgtgccgccagcggcttcaccttcagcgactactttatgagctgggtccgacaggcccctggcaaaggacttgaatgggtcgccaccatcagcaatggcggcacctacacttactaccccgacagcgtgaagggcagattcaccatctccagagacaacagcaagaacaccctgtacctccagatgaactccctgagagccgaggacaccgccgtgtactactgcgccagattcgacggctacatcttcgactattggggccagggcaccctggtcacagtctcttctacgcgtgcctctacaaagggaccctccgtgtttcctctggctcccagcagcaagtctacaagcggaggaacagccgctctgggctgcctggtcaaggattactttcccgagcctgtgaccgtgtcctggaatagcggagcactgacaagcggcgtgcacacctttccagccgtgctgcaaagcagcggcctgtactctctgagcagcgtggtcacagtgcctagctctagcctgggcacccagacctacatctgcaatgtgaaccacaagcctagcaacaccaaggtggacaagagagtggaacccaagagctgtgaagtgaaaaccgactccaccgaccacgtgaagcccaaagagacagagaacaccaagcagcccagcaagagctgccacaagcccaaggccatcgtgcacaccgagaaagtgaacatgatgagcctgaccgtgctgggcctgcggatgctgttcgccaaaaccgtggccgtgaacttcctgctgaccgccaagctgttcttcctc

SEQ ID NO: 10716 - DNA, 2691 bp, Artificial Sequence
  Synthetic Polynucloetide
atggccttaccagtgaccgccttgctcctgccgctggccttgctgctccacgccgccaggccggaagtgcagctggttgaatctggcggaggactggttcagcctggcggatctctgagactgtcttgtgccgccagcggcttcagcttcagcgacttttggatgagctgggtccgacaggcccctggcaaaggacttgaatgggtcgccacaatcagccaggccggcagcgagaaggactacgtggactctgtgaagggcagattcaccatcagccgggacaacgccaagaagtccctgtacctccagatgaacagcctgagagccgaggacaccgccgtgtactattgtgcctctggcgtgtacagcttcgactacagaggccagggcaccctggtcacagtctcttctggtaccggcggaggcggatctggcggcggaggtagcggtggcggaggatctgaattcgacatccagatgacacagagccctagcagcctgtctgccagcgtgggagacagagtgaccatcacctgtagagccagccaggacatcagcaactacctgaactggtatcagcagaagcccggcaaggcccctaagctgctgatctactacaccagcagactgcacagcggcgtgcccagcagattttctggctctggcagcggcaccgacttcaccctgacaatatctagcctccagcctgaggacttcgccacctactattgccagcagggcaacaccctgccttggacatttggacagggcaccaaggtggaaatcaagagactcgagggacagcctaaggccaatcctaccgtgacactgttccctccaagcagcgaagaactccaggccaacaaggccacacttgtgtgcctgatctccgacttctaccctggggctgtgacagtggcttggaaggccgatggatctcctgtgaaagccggcgtggaaaccaccaagccatccaagcagagcaacaacaaatacgccgccagctcctacctgagcctgacacctgagcagtggaagtcccacagatcctacagctgccaagtgacccacgaaggcagcaccgtggaaaagacagtggcccctacagagtgcagcggcagagccgattgcggctttaccagcgagagctaccagcagggcgtgctgagcgccaccatcctgtacgagatcctgctgggcaaggccaccctgtacgccgtgctggtgtctgccctggtgctgatggctatggtcaagcggaaggacagccggggacgcgccaagagaagcggatctggcgtgaagcagaccctgaatttcgacctgctgaagctggctggcgacgtggaatccaacccaggccctactagtatggactggatttggcgcatccttttccttgtcggcgctgctaccggcgcgcattccgggccccagctccagctgcaagagtctggacctggcctggtcaagcctagcgagacactgagcctgacctgtaccgtgtccggcgatagcatcagcagcggcgattactactggggctggatcagacagcctcctggcaaaggactggaatggatcggccacatctactacagcggcgtgacctactacaaccccagcctgaagtccagagtgaccatcagcgtggacaccagccggaaccagttctccctgaagctgtctagcgtgacagccgccgataccgccgtgtactactgcaccagagaggacagcagcaactggcggagtagaggccagggaacactggtcacagttagctctggatccggcggaggcggaagtggaggcggaggatctggcggcggaggctctttcgaagaagtgcagctggttgaatcaggtggcggcctggttcaacctggcggatctctgagactgagctgtgccgccagcggcttcaccttcagcgactactttatgagctgggtccgacaggcccctggcaaaggacttgaatgggtcgccaccatcagcaatggcggcacctacacttactaccccgacagcgtgaagggcagattcaccatctccagagacaacagcaagaacaccctgtacctccagatgaactccctgagagccgaggacaccgccgtgtactactgcgccagattcgacggctacatcttcgactattggggccagggcaccctggtcacagtctcttctacgcgtgcctctacaaagggaccctccgtgtttcctctggctcccagcagcaagtctacaagcggaggaacagccgctctgggctgcctggtcaaggattactttcccgagcctgtgaccgtgtcctggaatagcggagcactgacaagcggcgtgcacacctttccagccgtgctgcaaagcagcggcctgtactctctgagcagcgtggtcacagtgcctagctctagcctgggcacccagacctacatctgcaatgtgaaccacaagcctagcaacaccaaggtggacaagagagtggaacccaagagctgtatccccgaggacacattcttcccaagccccgagagcagctgcgacgtgaagctggtggaaaagagcttcgagacagacaccaacctgaacttccagaacctgagcgtgatcggcttcagaatcctgctgctgaaagtggccggctttaacctgctgatgaccctgcggctgtggtccagc

SEQ ID NO: 10717 - DNA, 2262 bp, Artificial Sequence
  Synthetic Polynucloetide
atggccttaccagtgaccgccttgctcctgccgctggccttgctgctccacgccgccaggccggaagtgcaggttttggagtctggcggaggactggttcagcctggcggatctctgagactgtcttgtgccgccagcggcttcaccttcagcaactttgccatgagctgggtccgacaggcccctggcaaaggacttgaatgggtgtccacaatcagcggcagcgccggcacaacagattacgccgattctgtgaagggcagattcaccatcagccgggacaacagcaagaaaaccctgtacctccagatgaacagcctgcgcgtggaagataccgccgtgtactactgtgccgatggcagaggccccttcttcgattatcgcggccagggcacactggtcaccgtttcttctggtaccggcggaggcggatctggcggcggaggtagcggtggcggaggatctgaattcgacatccagatgacacagagccctagcagcctgtctgccagcgtgggagacagagtgaccatcacctgtagagccagccaggacatcagcaactacctgaactggtatcagcagaagcccggcaaggcccctaagctgctgatctactacaccagcagactgcacagcggcgtgcccagcagattttctggctctggcagcggcaccgacttcaccctgacaatatctagcctccagcctgaggacttcgccacctactattgccagcagggcaacaccctgccttggacatttggacagggcaccaaggtggaaatcaagagactcgaggacctgaagaacgtgttcccacctgaggtggccgtgttcgagcctagcgaggccgagatcagccacacccagaaagccaccctcgtgtgcctggctaccggcttctaccccgaccatgtggaactgtcttggtgggtcaacggcaaagaggtgcacagcggcgtgtgtaccgacccccagccactgaaagaacagcccgccctgaacgacagccggtactgcctgagcagcagactgagagtgtccgccaccttctggcagaacccccggaaccacttcagatgccaggtgcagttctacggcctgagcgagaacgacgagtggacccaggacagagccaagcccgtgacccagatcgtgtctgccgaagcctggggcagagccgattgcggctttaccagcgagagctaccagcagggcgtgctgagcgccaccatcctgtacgagatcctgctgggcaaggccaccctgtacgccgtgctggtgtctgccctggtgctgatggctatggtcaagcggaaggacagccggggaagggccaagcgatctggatctggagcaacaaacttctcactactcaaacaagcaggtgacgtggaggagaatcccgggcctactagtatggactggatttggcgcatccttttccttgtcggcgctgctaccggcgcgcattccttcgaagaagtgcagctggttgaatcaggtggcggcctggttcaacctggcggatctctgagactgagctgtgccgccagcggcttcaccttcagcgactactttatgagctgggtccgacaggcccctggcaaaggacttgaatgggtcgccaccatcagcaatggcggcacctacacttactaccccgacagcgtgaagggcagattcaccatctccagagacaacagcaagaacaccctgtacctccagatgaactccctgagagccgaggacaccgccgtgtactactgcgccagattcgacggctacatcttcgactattggggccagggcaccctggtcacagtctcttctacgcgtatccagaaccctgatcctgccgtgtaccagctgcgggatagcaagagcagcgacaagagcgtgtgtctgttcaccgacttcgacagccagaccaacgtgtcccagagcaaggactccgacgtgtacatcaccgataagtgcgtgctggacatgcggagcatggacttcaagagcaactccgccgtggcctggtccaacaagtccgatttcgcctgcgccaacgccttcaacaacagcattatccccgaggacacattcttcccaagccccgagagcagctgcgacgtgaagctggtggaaaagagcttcgagacagacaccaacctgaacttccagaacctgagcgtgatcggcttcagaatcctgctgctgaaagtggccggctttaacctgctgatgaccctgcggctgtggtccagc

SEQ ID NO: 10718 - DNA, 2265 bp, Artificial Sequence
  Synthetic Polynucloetide
atggccttaccagtgaccgccttgctcctgccgctggccttgctgctccacgccgccaggccggacatccagatgacacagagccctagcagcctgtctgccagcgtgggagacagagtgaccatcacctgtagagccagccaggacatcagcaactacctgaactggtatcagcagaagcccggcaaggcccctaagctgctgatctactacaccagcagactgcacagcggcgtgcccagcagattttctggctctggcagcggcaccgacttcaccctgacaatatctagcctccagcctgaggacttcgccacctactattgccagcagggcaacaccctgccttggacatttggacagggcaccaaggtggaaatcaagagactcgaggacctgaagaacgtgttcccacctgaggtggccgtgttcgagcctagcgaggccgagatcagccacacccagaaagccaccctcgtgtgcctggctaccggcttctaccccgaccatgtggaactgtcttggtgggtcaacggcaaagaggtgcacagcggcgtgtgtaccgacccccagccactgaaagaacagcccgccctgaacgacagccggtactgcctgagcagcagactgagagtgtccgccaccttctggcagaacccccggaaccacttcagatgccaggtgcagttctacggcctgagcgagaacgacgagtggacccaggacagagccaagcccgtgacccagatcgtgtctgccgaagcctggggcagagccgattgcggctttaccagcgagagctaccagcagggcgtgctgagcgccaccatcctgtacgagatcctgctgggcaaggccaccctgtacgccgtgctggtgtctgccctggtgctgatggctatggtcaagcggaaggacagccggggaagggccaagcgatctggatctggagcaacaaacttctcactactcaaacaagcaggtgacgtggaggagaatcccgggcctactagtatggactggatttggcgcatccttttccttgtcggcgctgctaccggcgcccattccgggcccgaagtgcagctggttgaatctggcggaggactggttcaggctggcggatctctgagactgtcttgtgccgccagcggcagaacctttagcatgggctggtttagacaggcccctggcaaagagagagagttcgtcgccgccatcacatactctggcggcagcccttactacgccgactctgtgaagggcagattcaccatcagccgggacaacgccaagaacaccgtgtacctccagatgaacagcctgaagcctgaggacaccgccgtgtactactgcgccgccaatccaacatacggcagcgactggaacgccgagaattggggccagggaacccaagtgacagtgtctagcggatccggcggcggaggatctggcggaggcggatctgggggcggaggctctttcgaagaagtgcagctggttgaatcaggtggcggcctggttcaacctggcggatctctgagactgagctgtgccgccagcggcttcaccttcagcgactactttatgagctgggtccgacaggcccctggcaaaggacttgaatgggtcgccaccatcagcaatggcggcacctacacttactaccccgacagcgtgaagggcagattcaccatctccagagacaacagcaagaacaccctgtacctccagatgaactccctgagagccgaggacaccgccgtgtactactgcgccagattcgacggctacatcttcgactattggggccagggcaccctggtcacagtctcttctacgcgtatccagaaccctgatcctgccgtgtaccagctgcgggatagcaagagcagcgacaagagcgtgtgtctgttcaccgacttcgacagccagaccaacgtgtcccagagcaaggactccgacgtgtacatcaccgataagtgcgtgctggacatgcggagcatggacttcaagagcaactccgccgtggcctggtccaacaagtccgatttcgcctgcgccaacgccttcaacaacagcattatccccgaggacacattcttcccaagccccgagagcagctgcgacgtgaagctggtggaaaagagcttcgagacagacaccaacctgaacttccagaacctgagcgtgatcggcttcagaatcctgctgctgaaagtggccggctttaacctgctgatgaccctgcggctgtggtccagc

SEQ ID NO: 10719 - DNA, 2646 bp, Artificial Sequence
  Synthetic Polynucloetide
atggccttaccagtgaccgccttgctcctgccgctggccttgctgctccacgccgccaggccggacatccagatgacacagagccctagcagcctgtctgccagcgtgggagacagagtgaccatcacctgtagagccagccaggacatcagcaactacctgaactggtatcagcagaagcccggcaaggcccctaagctgctgatctactacaccagcagactgcacagcggcgtgcccagcagattttctggctctggcagcggcaccgacttcaccctgacaatatctagcctccagcctgaggacttcgccacctactattgccagcagggcaacaccctgccttggacatttggacagggcaccaaggtggaaatcaagagactcgaggacctgaagaacgtgttcccacctgaggtggccgtgttcgagcctagcgaggccgagatcagccacacccagaaagccaccctcgtgtgcctggctaccggcttctaccccgaccatgtggaactgtcttggtgggtcaacggcaaagaggtgcacagcggcgtgtgtaccgacccccagccactgaaagaacagcccgccctgaacgacagccggtactgcctgagcagcagactgagagtgtccgccaccttctggcagaacccccggaaccacttcagatgccaggtgcagttctacggcctgagcgagaacgacgagtggacccaggacagagccaagcccgtgacccagatcgtgtctgccgaagcctggggcagagccgattgcggctttaccagcgagagctaccagcagggcgtgctgagcgccaccatcctgtacgagatcctgctgggcaaggccaccctgtacgccgtgctggtgtctgccctggtgctgatggctatggtcaagcggaaggacagccggggaagggccaagcgatctggatctggagcaacaaacttctcactactcaaacaagcaggtgacgtggaggagaatcccgggcctactagtatggactggatttggcgcatccttttccttgtcggcgctgctaccggcgcccattcccaactgcaactgcaagagtctggccctggcctggtcaagccttctgaaaccctgagcctgacctgtaccgtgtccggcggctctatcagcagcggcgattactactggggctggatcagacagcctccaggcaagggactcgaatggatcggcagcatcagctacagcggctccacctactacaacccaagcctgaagtccagagtgaccatcagcgtggacaccagcagaaaccagttctccctgaagctgagcagcgtgacagccgccgatacagccgtgtattattgcaccagagaggacagcagcaactggcggagtagaggacagggcacactggtcacagtgtcctcttctggaggcggtggaagcggtggaggaggatctgaagtgcagctggttgaatctggcggaggactggttcaggctggcggatctctgagactgtcttgtgccgccagcggcagaacctttagcatgggctggtttagacaggcccctggcaaagagagagagttcgtcgccgccatcacatactctggcggcagcccttactacgccgactctgtgaagggcagattcaccatcagccgggacaacgccaagaacaccgtgtacctccagatgaacagcctgaagcctgaggacaccgccgtgtactactgcgccgccaatccaacatacggcagcgactggaacgccgagaattggggccagggaacccaagtgacagtgtctagcggatccggcggcggaggatctggcggaggcggatctgggggcggaggctctttcgaagaagtgcagctggttgaatcaggtggcggcctggttcaacctggcggatctctgagactgagctgtgccgccagcggcttcaccttcagcgactactttatgagctgggtccgacaggcccctggcaaaggacttgaatgggtcgccaccatcagcaatggcggcacctacacttactaccccgacagcgtgaagggcagattcaccatctccagagacaacagcaagaacaccctgtacctccagatgaactccctgagagccgaggacaccgccgtgtactactgcgccagattcgacggctacatcttcgactattggggccagggcaccctggtcacagtctcttctacgcgtatccagaaccctgatcctgccgtgtaccagctgcgggatagcaagagcagcgacaagagcgtgtgtctgttcaccgacttcgacagccagaccaacgtgtcccagagcaaggactccgacgtgtacatcaccgataagtgcgtgctggacatgcggagcatggacttcaagagcaactccgccgtggcctggtccaacaagtccgatttcgcctgcgccaacgccttcaacaacagcattatccccgaggacacattcttcccaagccccgagagcagctgcgacgtgaagctggtggaaaagagcttcgagacagacaccaacctgaacttccagaacctgagcgtgatcggcttcagaatcctgctgctgaaagtggccggctttaacctgctgatgaccctgcggctgtggtccagc

SEQ ID NO: 10720 - DNA, 2673 bp, Artificial Sequence
  Synthetic Polynucloetide
atggccttaccagtgaccgccttgctcctgccgctggccttgctgctccacgccgccaggccggaagtgcaggttttggagtctggcggaggactggttcagcctggcggatctctgagactgtcttgtgccgccagcggcttcaccttcagcaactttgccatgagctgggtccgacaggcccctggcaaaggacttgaatgggtgtccacaatcagcggcagcgccggcacaacagattacgccgattctgtgaagggcagattcaccatcagccgggacaacagcaagaaaaccctgtacctccagatgaacagcctgcgcgtggaagataccgccgtgtactactgtgccgatggcagaggccccttcttcgattatcgcggccagggcacactggtcaccgtttcttctggtaccggcggaggcggatctggcggcggaggtagcggtggcggaggatctgaattcgacatccagatgacacagagccctagcagcctgtctgccagcgtgggagacagagtgaccatcacctgtagagccagccaggacatcagcaactacctgaactggtatcagcagaagcccggcaaggcccctaagctgctgatctactacaccagcagactgcacagcggcgtgcccagcagattttctggctctggcagcggcaccgacttcaccctgacaatatctagcctccagcctgaggacttcgccacctactattgccagcagggcaacaccctgccttggacatttggacagggcaccaaggtggaaatcaagagactcgaggacctgaagaacgtgttcccacctgaggtggccgtgttcgagcctagcgaggccgagatcagccacacccagaaagccaccctcgtgtgcctggctaccggcttctaccccgaccatgtggaactgtcttggtgggtcaacggcaaagaggtgcacagcggcgtgtgtaccgacccccagccactgaaagaacagcccgccctgaacgacagccggtactgcctgagcagcagactgagagtgtccgccaccttctggcagaacccccggaaccacttcagatgccaggtgcagttctacggcctgagcgagaacgacgagtggacccaggacagagccaagcccgtgacccagatcgtgtctgccgaagcctggggcagagccgattgcggctttaccagcgagagctaccagcagggcgtgctgagcgccaccatcctgtacgagatcctgctgggcaaggccaccctgtacgccgtgctggtgtctgccctggtgctgatggctatggtcaagcggaaggacagccggggaagggccaagcgatctggatctggagcaacaaacttctcactactcaaacaagcaggtgacgtggaggagaatcccgggcctactagtatggactggatttggcgcatccttttccttgtcggcgctgctaccggcgcccattccgggcccgaagtgcagctggttgaatctggcggaggactggttcaggctggcggatctctgagactgtcttgtgccgccagcggcagaacctttagcatgggctggtttagacaggcccctggcaaagagagagagttcgtcgccgccatcacatacagcggcggcagcccttactacgcctcttctgtcagaggccggttcaccatcagccgggacaacgccaagaacaccgtgtacctccagatgaacagcctgaagccagaggacaccgccgtgtactactgtgccgccaatccaacctacggcagcgactggaatgccgagaattggggccagggcacccaagtgacagtgtctagtggatccggcggcggaggatctggcggaggcggatctgggggcggaggctctttcgaagaagtgcagctggttgaatcaggtggcggcctggttcaacctggcggatctctgagactgagctgtgccgccagcggcttcaccttcagcgactactttatgagctgggtccgacaggcccctggcaaaggacttgaatgggtcgccaccatcagcaatggcggcacctacacttactaccccgacagcgtgaagggcagattcaccatctccagagacaacagcaagaacaccctgtacctccagatgaactccctgagagccgaggacaccgccgtgtactactgcgccagattcgacggctacatcttcgactattggggccagggcaccctggtcacagtctcttctacgcgtatccagaaccctgatcctgccgtgtaccagctgcgggatagcaagagcagcgacaagagcgtgtgtctgttcaccgacttcgacagccagaccaacgtgtcccagagcaaggactccgacgtgtacatcaccgataagtgcgtgctggacatgcggagcatggacttcaagagcaactccgccgtggcctggtccaacaagtccgatttcgcctgcgccaacgccttcaacaacagcattatccccgaggacacattcttcccaagccccgagagcagctgcgacgtgaagctggtggaaaagagcttcgagacagacaccaacctgaacttccagaacctgagcgtgatcggcttcagaatcctgctgctgaaagtggccggctttaacctgctgatgaccctgcggctgtggtccagc

SEQ ID NO: 10721 - protein, 21 aa, Artificial Sequence
  Synthetic Polypeptide
MALPVTALLLPLALLLHAARP

SEQ ID NO: 10722 - protein, 21 aa, Artificial Sequence
  Synthetic Polypeptide
MALPVTALLLPLALLLHAARP

SEQ ID NO: 10723 - protein, 19 aa, Artificial Sequence
  Synthetic Polypeptide
MDWIWRILFLVGAATGAHS

SEQ ID NO: 10724 - protein, 19 aa, Artificial Sequence
  Synthetic Polypeptide
MDWIWRILFLVGAATGAHS

SEQ ID NO: 10725 - protein, 20 aa, Artificial Sequence
  Synthetic Polypeptide
MACPGFLWALVISTCLEFSM

SEQ ID NO: 10726 - protein, 19 aa, Artificial Sequence
  Synthetic Polypeptide
MTIRLLCYMGFYFLGAGLM

SEQ ID NO: 10727 - protein, 15 aa, Artificial Sequence
  Synthetic Polypeptide
GGGGSGGGGSGGGGS

SEQ ID NO: 10728 - protein, 15 aa, Artificial Sequence
  Synthetic Polypeptide
GGGGSGGGGSGGGGS

SEQ ID NO: 10729 - protein, 15 aa, Artificial Sequence
  Synthetic Polypeptide
GGGGSGGGGSGGGGS

SEQ ID NO: 10730 - protein, 15 aa, Artificial Sequence
  Synthetic Polypeptide
GGGGSGGGGSGGGGS

SEQ ID NO: 10731 - protein, 15 aa, Artificial Sequence
  Synthetic Polypeptide
GGGGSGGGGSGGGGS

SEQ ID NO: 10732 - protein, 15 aa, Artificial Sequence
  Synthetic Polypeptide
GGGGSGGGGSGGGGS

SEQ ID NO: 10733 - protein, 35 aa, Artificial Sequence
  Synthetic Polypeptide
GGSGSGGGGSGGGGSGSGGSGSGGSGSGGSGSGGS

SEQ ID NO: 10734 - protein, 35 aa, Artificial Sequence
  Synthetic Polypeptide
GGGGSGGGGSGGGGSGSGGSGSGGSGSGGSGSGGS

SEQ ID NO: 10735 - protein, 25 aa, Artificial Sequence
  Synthetic Polypeptide
SSADDAKKDAAKKDDAKKDDAKKDG

SEQ ID NO: 10736 - protein, 111 aa, Artificial Sequence
  Synthetic Polypeptide
DVQMIQTPDSLAVSLGQRATISCRASESVDNYGISFMHWYQQKPGQSPKLLIYRASNLESGIPARFSGSGSRTDFTLTINPVETDDVATYYCQQNNKDPPTFGGGTKLEIK

SEQ ID NO: 10737 - protein, 107 aa, Artificial Sequence
  Synthetic Polypeptide
DVQMIQTPSSLSASLGDRVTISCRASQDIGNYLNWYQQKPDGTVKLLIYYTSRLHSGVPSRFSGSGSGTEYSLTISNLEQEDIATYFCQQGSALPPTFGGGTKLEIN

SEQ ID NO: 10738 - protein, 112 aa, Artificial Sequence
  Synthetic Polypeptide
DIVLTQSPATLSLSPGDRATISCRASESVTILGSHLIYWYQQKPGQPPRLLIQLASNVQTGVPARFSGSGSRTDFTLTISSVEPEDFAVYYCLQSRTIPRTFGQGTKLEIKR

SEQ ID NO: 10739 - protein, 108 aa, Artificial Sequence
  Synthetic Polypeptide
DIQMTQSPSSLSASVGDRVTITCSASQDISNYLNWYQQKPGKAPKLLIYYTSNLHSGVPSRFSGSGSGTDFTLTISSLQPEDFATYYCQQYRKLPWTFGQGTKLEIKR

SEQ ID NO: 10740 - protein, 114 aa, Artificial Sequence
  Synthetic Polypeptide
DIVMTQSPDSLAVSLGERATINCESSQSLLNSGNQKNYLTWYQQKPGQPPKPLIYWASTRESGVPDRFSGSGSGTDFTLTISSLQAEDVAVYYCQNDYSYPYTFGQGTKLEIKR

SEQ ID NO: 10741 - protein, 107 aa, Artificial Sequence
  Synthetic Polypeptide
DIQMTQSTSSLSASLGDRVTISCSASQGINNYLNWYQQKPDGTVELLIYYTSTLQSGVPSRFSGSGSGTDYSLTISNLEPEDIGTYYCQQYSKLPRTFGGGTKLEIK

SEQ ID NO: 10742 - protein, 106 aa, Artificial Sequence
  Synthetic Polypeptide
DIQMTQSPASLSVSVGETVTITCRASENIYSNLAWYQQKQGKSPQLLVYAATNLADGVPSRFSGSGSGTQYSLKINSLQSEDFGSYYCQHFWGTWTFGGGTTLEIK

SEQ ID NO: 10743 - protein, 107 aa, Artificial Sequence
  Synthetic Polypeptide
EIVLTQSPATLSLSPGERATLSCSASSSVSYMHWYQQKPGQAPRLLIYDTSKLASGIPARFSGSGSGTDFTLTISSLEPEDVAVYYCFQGSVYPFTFGQGTKLEIKR

SEQ ID NO: 10744 - protein, 107 aa, Artificial Sequence
  Synthetic Polypeptide
DIQMTQTTSSLSASLGDRVTISCRASQDISKYLNWYQQKPDGTVKLLIYHTSRLHSGVPSRFSGSGSGTDYSLTISNLEQEDIATYFCQQGNTLPYTFGGGTKLEIT

SEQ ID NO: 10745 - protein, 107 aa, Artificial Sequence
  Synthetic Polypeptide
EIVMTQSPATLSLSPGERATLSCRASQDISKYLNWYQQKPGQAPRLLIYHTSRLHSGIPARFSGSGSGTDYTLTISSLQPEDFAVYFCQQGNTLPYTFGQGTKLEIK

SEQ ID NO: 10746 - protein, 107 aa, Artificial Sequence
  Synthetic Polypeptide
EIVLTQSPATLSLSPGERATLSCRASQSVSSYLAWYQQKPGQAPRLLIYDASNRATGIPARFSGSGSGTDFTLTISSLEPEDFAVYYCQQRSNWPITFGQGTRLEIK

SEQ ID NO: 10747 - protein, 113 aa, Artificial Sequence
  Synthetic Polypeptide
DIVMTQTPLSLPVTPGEPASISCRSSKSLLHSNGITYLYWYLQKPGQSPQLLIYQMSNLVSGVPDRFSGSGSGTDFTLKISRVEAEDVGVYYCAQNLELPYTFGGGTKVEIKR

SEQ ID NO: 10748 - protein, 113 aa, Artificial Sequence
  Synthetic Polypeptide
DIQMTQSPSSLSASVGDRVTITCRSSQSIVHSVGNTFLEWYQQKPGKAPKLLIYKVSNRFSGVPSRFSGSGSGTDFTLTISSLQPEDFATYYCFQGSQFPYTFGQGTKVEIKR

SEQ ID NO: 10749 - protein, 110 aa, Artificial Sequence
  Synthetic Polypeptide
EIVLTQSPGTLSLSPGERATLSCRASQSVGGYLAWYQQKPGQAPRLLIYDASNRATGIPARFSGSGSGTDFTLTISSLEPEDFAVYYCQQRNNWPPMYTFGQGTKLEIKR

SEQ ID NO: 10750 - protein, 112 aa, Artificial Sequence
  Synthetic Polypeptide
DIQMTQSPATIENTSLSASVGDRVTITCRASQGISSWLTWYQQKPEKAPKSLIYAASSLQSGVPSRFSGSGSGTDFTLTISSLQPEDFATYYCQQYDSYPITFGQGTRLEIK

SEQ ID NO: 10751 - protein, 112 aa, Artificial Sequence
  Synthetic Polypeptide
DEIVLTQSPDSLAVSLGERATINCKASQSVDFDGDSYLNWYQQKPGQPPKVLIYAASTLQSGVPSRFSGSGSGTDFTLTINSLEAEDAATYYCQQSNEDPWTFGGGTKVEIK

SEQ ID NO: 10752 - protein, 107 aa, Artificial Sequence
  Synthetic Polypeptide
DIQMTQSPSSLSASVGDRVTITCRASQGISSWLAWYQQKPEKAPKSLIYAASSLQSGVPSRFSGSGSGTDFTLTISSLQPEDFATYYCQQYNSYPPTFGGGTKVEIK

SEQ ID NO: 10753 - protein, 112 aa, Artificial Sequence
  Synthetic Polypeptide
DVVMTQSPLSLPVTLGQPASISCRSSQSIVHSDGNTYLEWYQQRPGQSPRRLIYKVSNRFSGVPDRFSGSGSGTDFTLKISRVEAEDVGVYYCFQGSHAPWTFGGGTKVEIK

SEQ ID NO: 10754 - protein, 106 aa, Artificial Sequence
  Synthetic Polypeptide
QIVLTQSPALMSASPGEKVTMTCSASSSVRYMYWYQQKPRSSPKPWIHLTSNLASGVPARFSGSGSGTSYSLTISSMEAEDAATYYCQQWSSHPFTFGSGTKLEIK

SEQ ID NO: 10755 - protein, 113 aa, Artificial Sequence
  Synthetic Polypeptide
EIVLTQSPGSLAVSPGERVTMSCKSSQSVFFSSSQKNYLAWYQQIPGQSPRLLIYWASTRESGVPDRFTGSGSGTDFTLTISSVQPEDLAIYYCHQYLSSRTFGQGTKLEIKR

SEQ ID NO: 10756 - protein, 114 aa, Artificial Sequence
  Synthetic Polypeptide
DDIVMTQSPDSLTVSLGERTTINCKSSQSVLDSSKNKNSLAWYQQKPGQPPKLLLSWASTRESGIPDRFSGSGSGTDFTLTIDSLQPEDSATYYCQQSAHFPITFGQGTRLEIK

SEQ ID NO: 10757 - protein, 113 aa, Artificial Sequence
  Synthetic Polypeptide
DVLLTQSPLSLPVTLGQPASISCRSSQTIVHSNGNTYLEWFQQRPGQSPRLLIYQVSNRFSGVPDRFSGSGSGTDFTLKISRVEAEDVGVYYCFQGSHVPRTFGGGTKVEIKR

SEQ ID NO: 10758 - protein, 108 aa, Artificial Sequence
  Synthetic Polypeptide
HIVLTQSPSSLSASLGDRVTISCRASQDISTYLNWYQQKPDGTVKLLIFYTSRLHAGVPSRFSGSGSGTHHSLTISNLEQEDIATYFCQQGNSLPFTFGSGTKLEIKR

SEQ ID NO: 10759 - protein, 109 aa, Artificial Sequence
  Synthetic Polypeptide
DHIVLTQSPSSLSASLGDRVTISCRASQDISTYLNWYQQKPDGTVKLLIFYTSRLHAGVPSRFSGSGSGTHHSLTISNLEQEDIATYFCQQGNSLPFTFGSGTKLEIKR

SEQ ID NO: 10760 - protein, 112 aa, Artificial Sequence
  Synthetic Polypeptide
DIVMTQSPDSLAVSLGERATINCRASKSVSTSGYSFMHWYQQKPGQPPKLLIYLASNLESGVPDRFSGSGSGTDFTLTISSLQAEDVAVYYCQHSREVPWTFGQGTKVEIKR

SEQ ID NO: 10761 - protein, 113 aa, Artificial Sequence
  Synthetic Polypeptide
DIVMTQTPLTLSVTIGQPASISCKSSQSLLDSDGKTYLNWLLQRPGQSPERLIYLVSKLDSGVPDRFTGSGSGTDFTLKISRVEAEDLGVYCCWQGTHFPYTFGGGTKVEIKG

SEQ ID NO: 10762 - protein, 113 aa, Artificial Sequence
  Synthetic Polypeptide
DDIQLTQSPSSLSASVGDRVTITCKASQSVDYEGDSFLNWYQQKPGKAPKLLIYAASNLESGVPSRFSGSGSGTDFTLTISSLQPEDFATYYCQQSNEDPLTFGQGTKVEIKR

SEQ ID NO: 10763 - protein, 114 aa, Artificial Sequence
  Synthetic Polypeptide
DIVMSQSPSSLAVSVGEKVTMSCKSSQSLLHSSNQKNYLAWYQQKPGQSPKVLIYWASTRESGVPDRFTGSGSGTDFTLTITSVKSEDLAVYYCQQYYSYPWTFGGGTRLEIKR

SEQ ID NO: 10764 - protein, 109 aa, Artificial Sequence
  Synthetic Polypeptide
EIVLTQSPGTLSLSPGERATLSCRASQSVSSSYLAWYQQKPGQAPRLLIYGTSSRATGIPDRFSGSGSGTDFTLTISRLEPEDFAVYYCQQYGSSPFTFGGGTKVEIKR

SEQ ID NO: 10765 - protein, 108 aa, Artificial Sequence
  Synthetic Polypeptide
DIQMTQSPSSLSASVGDRVTITCRASQSISLWLNWYQQKPGKAPKLLIYAASTLQSGVPSRFSGSGSGTDFTLTISSLQPEDFATYYCQQYYTSPYTFGQGTKVEIKR

SEQ ID NO: 10766 - protein, 109 aa, Artificial Sequence
  Synthetic Polypeptide
DIQMTQSPSSLSASVGDRVTITCRASQSISSYLNWYQQKPGKAPKLLIYAVSTLQSGVPSRFSGSGSGTDFTLTISSLQPEDFATYYCQQSGTFPPTTFGQGTKVEIKR

SEQ ID NO: 10767 - protein, 106 aa, Artificial Sequence
  Synthetic Polypeptide
QSPSSLAVSAGEKVTMSCKSSQSLLNSRTRKNYLAWYQQKPGQSPKLLIYWASTRESGVPDRFTGSGSGTDFTLTISSVQAEDLAVYYCKQSNLYTFGGGTKLEIK

SEQ ID NO: 10768 - protein, 104 aa, Artificial Sequence
  Synthetic Polypeptide
MTQSPKFLLVSAGDRVTLTCKASQSVNNDVYWYQQEPGQSPKLLIYWASTRESGVPDRFTGSGSGTDFTLTISSVQAEDLAVYYCKQSYNLYTFGGGTKLEIKR

SEQ ID NO: 10769 - protein, 107 aa, Artificial Sequence
  Synthetic Polypeptide
DIQMTQSPSSLSASLGERVSLTCRATQELSGYLSWLQQKPDGTIKRLIYAASTLDSGVPKRFSGNRSGSDYSLTISSLESEDFADYYCLQYAIYPYTFGGGTKLEIK

SEQ ID NO: 10770 - protein, 112 aa, Artificial Sequence
  Synthetic Polypeptide
DTIVLTQSPASLAVSLGQRATISCRASESVDSYGNSFMHWYQQKPGQPPKLLIYLASNLESGVPARFSGSGSRTDFTLTIDPVEADDAATYYCQQNNYDPWTFGGGTKLEIK

SEQ ID NO: 10771 - protein, 108 aa, Artificial Sequence
  Synthetic Polypeptide
DIQMTQSPSSLSASVGDRVTITCKASQDVGIAVAWYQQKPGKVPKLLIYWASTRHTGVPDRFSGSGSGTDFTLTISSLQPEDVATYYCQQYSSYPYTFGQGTKVEIKR

SEQ ID NO: 10772 - protein, 107 aa, Artificial Sequence
  Synthetic Polypeptide
DIVMTQSQKSMSTSVGDRVSITCKASQDVITGVAWYQQKPGQSPKLLIYSASYRYTGVPDRFTGSGSGTDFTFTISNVQAEDLAVYYCQQHYSTPLTFGAGTKLELK

SEQ ID NO: 10773 - protein, 113 aa, Artificial Sequence
  Synthetic Polypeptide
QSVLTQPPSVSGAPGQRVTISCTGSGSNIGAPYDVSWYQQLPGTAPKLLIYHNNKRPSGVPDRFSGSKSGTSASLAITGLQAEDEADYYCQSYDSSSISTIFGGGTKLTVLGA

SEQ ID NO: 10774 - protein, 113 aa, Artificial Sequence
  Synthetic Polypeptide
QSVLTQPPSVSGAPGQRVTISCTGSGSNIGAPYDVSWYQQLPGTAPKLLIYHNNKRPSGVPDRFSGSKSGTSASLAITGLQAEDEADYYCATVEAGLSGSVFGGGTKLTVLGA

SEQ ID NO: 10775 - protein, 107 aa, Artificial Sequence
  Synthetic Polypeptide
DIQMTQSPSSLSASVGDRVTITCSASSSVSYMYWYQQKPGKAPKLLIYLTSNLASGVPSRFSGSGSGTDFTLTISSLQPEDFATYYCQQWRSNPFTFGQGTKLEIKR

SEQ ID NO: 10776 - protein, 108 aa, Artificial Sequence
  Synthetic Polypeptide
EIVMTQSPATLSVSPGERATLSCKASQSVSNDVVWYQQKPGQAPRLLIYYASNRYTGIPARFSGSGSGTEFTLTISSLQSEDFAVYYCQQDYTSPWTFGQGTKLEIKR

SEQ ID NO: 10777 - protein, 107 aa, Artificial Sequence
  Synthetic Polypeptide
DILLTQSPVILSVSPGERVSFSCRASQSIGTNIHWYQQRTNGSPRLLIKYASESISGIPSRFSGSGSGTDFTLSINSVESEDIADYYCQQNNNWPTTFGAGTKLELK

SEQ ID NO: 10778 - protein, 112 aa, Artificial Sequence
  Synthetic Polypeptide
DVVMTQSPDSLAVSLGERATINCKSSQSLLDSDGKTYLNWLQQKPGQPPKRLISLVSKLDSGVPDRFSGSGSGTDFTLTISSLQAEDVAVYYCWQGTHFPGTFGGGTKVEIK

SEQ ID NO: 10779 - protein, 107 aa, Artificial Sequence
  Synthetic Polypeptide
ELQMTQSPSSLSASVGDRVTITCRASQSISSYLNWYQQKPGQPPKLLIYWASTRESGVPDRFSGSESGTNYTLTISSLQPEDFATYFCQQSDSLPITFGQGTRLDIQ

SEQ ID NO: 10780 - protein, 113 aa, Artificial Sequence
  Synthetic Polypeptide
ELVMTQSPSSLTVTAGEKVTMSCKSSQSLLNSGNQKNYLTWYQQKPGQPPKLLIYWASTRESGVPDRFTGSGSGTDFTLTISSVQAEDLAVYYCQNDYSYPLTFGAGTKLEIK

SEQ ID NO: 10781 - protein, 107 aa, Artificial Sequence
  Synthetic Polypeptide
DIQMTQSPSSLSASVGDRVTITCRASQSISSYLNWYQQKPGKAPKLLIYAASSLQSGVPSRFSGSGSGTDFTLTISSLQPEDLATYYCQQSYSTPFTFGPGTKVDIK

SEQ ID NO: 10782 - protein, 103 aa, Artificial Sequence
  Synthetic Polypeptide
YIHVTQSPSSLSVSIGDRVTINCQTSQGVGSDLHWYQHKPGRAPKLLIHHASSVEDGVPSRFSGTGFHTSFNLTINDLQADDIGTYYCQVLQSFGRGSRLDTK

SEQ ID NO: 10783 - protein, 112 aa, Artificial Sequence
  Synthetic Polypeptide
DIVLTQSPLSLAVSLGQPAIISCKASQSVSFAGTSLMHWYHQKPGQQPRLLIYRASNLEAGVPDRFSGSGSKTDFTLTISPVEAEDAATYYCQQSREYPYTFGGGTKLEIKR

SEQ ID NO: 10784 - protein, 113 aa, Artificial Sequence
  Synthetic Polypeptide
DVVMTQTPLSLPVTPGEPASISCRSSQSLVHRNGNTYLHWYLQKPGQSPKLLIHKVSNRFSGVPDRFSGSGSGTDFTLKISRVEAEDLGVYFCSQSTHVPPLTFGAGTKLELK

SEQ ID NO: 10785 - protein, 105 aa, Artificial Sequence
  Synthetic Polypeptide
EIVMTQTPATLSVSAGERVTITCKASQSVSNDVTWYQQKPGQAPRLLIYSASNRYSGVPARFSGSGYGTEFTFTISSVQSEDFAVYFCQQDYSSFGQGTKLEIKR

SEQ ID NO: 10786 - protein, 108 aa, Artificial Sequence
  Synthetic Polypeptide
DIQMTQTASSLPASLGDRVTISCSASQDISNYLNWYQQKPDGTVKLLIFYSSNLHSGVPSRFSGGGSGTDYSLTISNLEPEDIATYFCHQYSKLPWTFGGGTKLEIKR

SEQ ID NO: 10787 - protein, 111 aa, Artificial Sequence
  Synthetic Polypeptide
QFVLTQSPSASAALGASAKLTCTLSSAHKTYTIDWYQQQKGKAPRYLIQVKSDGTYTKATGVPDRFSGSSSGADRYLIIPSVQADDEADYYCGTDYTGGYVFGGGTQLTVT

SEQ ID NO: 10788 - protein, 107 aa, Artificial Sequence; identical to SEQ ID NO: 10752
  Synthetic Polypeptide

SEQ ID NO: 10789 - protein, 111 aa, Artificial Sequence
  Synthetic Polypeptide
QSVVTQPPSMSAAPGQQVTISCSGGNSNIERNYVSWYLQLPGTAPKLVIFDNDRRPSGIPDRFSGSKSGTSATLGITGLQTGDEADYYCGTWDSSLRGWVFGGGTKLTVLG

SEQ ID NO: 10790 - protein, 111 aa, Artificial Sequence
  Synthetic Polypeptide
QSVLTQPPSASGTPGQRVTISCSGSRSNVGGNYVFWYQQVPGATPKLLIYRSNQRPSGVPDRFAGSKSGSSASLAISGLRSEDEADYYCATWDDSLSGFVFGTGTKVTVLG

SEQ ID NO: 10791 - protein, 107 aa, Artificial Sequence
  Synthetic Polypeptide
DIQMTQSPSSLSASVGDRVTITCRASQDVNTAVAWYQQKPGKAPKLLIYSASFLESGVPSRFSGSRSGTDFTLTISSLQPEDFATYYCQQHYTTPPTFGQTKVEIKR

SEQ ID NO: 10792 - protein, 105 aa, Artificial Sequence
  Synthetic Polypeptide
QSALTQPPSASGSPGQSITISCTGTSNNFVSWYQQHAGKAPKLVIYDVNKRPSGVPDRFSGSKSGNTASLTVSGLQTDDEAVYYCGSLVGNWDVIFGGGTKLTVL

SEQ ID NO: 10793 - protein, 107 aa, Artificial Sequence
  Synthetic Polypeptide
ELVLTQSPGTLSLSAGERATLSCRASQSVSSGSLAWYQQKPGQAPRLLIYGASTRATGIPDRFSGSGSGTDFTLTIGRLEPEDLAVYYCQQYGTSPYTFGQGTKLEI

SEQ ID NO: 10794 - protein, 97 aa, Artificial Sequence
  Synthetic Polypeptide
DIQMTQSPSSLSASVGDRVTITCQASQDINNYLNWYQQKPGKAPKLLIYDASNLQTGVPSRFSGSGSGTDFTFTIEDIATYYCQQYTFGPGTKVDIK

SEQ ID NO: 10795 - protein, 109 aa, Artificial Sequence
  Synthetic Polypeptide
DIQMTQSPSSLSASVGDRVTITCTASLSVSSTYLHWYQQKPGSSPKLWIYSTSNLASGVPSRFSGSGSGTSYTLTISSLQPEDFATYYCHQYHRSPLTFGGGTKVEIKR

SEQ ID NO: 10796 - protein, 107 aa, Artificial Sequence
  Synthetic Polypeptide
DIQMTQSPSSLSASVGDRVTITCKASQDVGTAVAWYQQKPGKAPKLLIYSASYRSTGVPSRFSGSGSGTDFTLTISSLQPEDFATYYCQHHYSAPWTFGGGTKVEIK

SEQ ID NO: 10797 - protein, 108 aa, Artificial Sequence
  Synthetic Polypeptide
DIQMTQSFSSLSASVGDRVTITCRASQDISNYLNWYQQKPGKAPKLLIYYTSRLHSGVPSRFSGSGSGTDYTLTISSLQPEDFATYFCQQGNTLPWTFGGGTKLEIKR

SEQ ID NO: 10798 - protein, 107 aa, Artificial Sequence
  Synthetic Polypeptide
DIQMTQSPPSLSASVGGKVTITCKASQDIDRYMAWYQDKPGKGPKLLIHDTSTLQPGIPSRFSGSGSGRDYSFSISNLEPEDIATYYCLQYDNLWTFGGGTKLEIKR

SEQ ID NO: 10799 - protein, 107 aa, Artificial Sequence
  Synthetic Polypeptide
DIQMTQSPASLSASVGETVTITCRVSGNIHNYLAWYQQKQGKSPQLLVYNAKTLADGVPSRFSGSGSGTQYSLKINSLQPEDFGSYYCQHFWSNPYTFGGGTKLEIK

SEQ ID NO: 10800 - protein, 107 aa, Artificial Sequence
  Synthetic Polypeptide
DIQMTQSPASLSASVGETVTIICRASVNIYSYLAWYQQKQGKSPQLLVYNAKILAEGVPSRFSGSGSGTQFSLKINSLQPEDFGSYYCQHHYGTFTFGSGTKLEIKR

SEQ ID NO: 10801 - protein, 107 aa, Artificial Sequence
  Synthetic Polypeptide
DIVMTQSHKFMSTSVGDRVSVTCKASQNVGNNVAWYQQKPGQSPKVLIYSASYRYSGVPDRFTGSGSGTDFTLTISNVQSEDLAEYFCQQYNTYPFTFGSGTKLEIK

SEQ ID NO: 10802 - protein, 108 aa, Artificial Sequence
  Synthetic Polypeptide
DIQMTQSSSSFSVSLGDRVTITCKASEDIYIRLAWYQQKPGNAPRLLISAATSLETGIPSRFSGSGSGEDYTLTITSLQTEDVATYYCQQYWTTPWTFGGGTKLEIKR

SEQ ID NO: 10803 - protein, 107 aa, Artificial Sequence
  Synthetic Polypeptide
DIQMTQSSSSFSVSLGDRVTITCMASEDIYIRLAWYQQKPGNAPRLLISAATSLETGVPSRFSGSGSGKDYTLSITSLQTEDVGTYYCQQYWSSPWTFGGGTKLEIN

SEQ ID NO: 10804 - protein, 107 aa, Artificial Sequence; identical to SEQ ID NO: 10803
  Synthetic Polypeptide

SEQ ID NO: 10805 - protein, 106 aa, Artificial Sequence
  Synthetic Polypeptide
QIVLTQSPAIMSASPGEKVTISCSASSSVSYMYWYQQKPGSSPKPWIYRTSNLASGVPARFSGSGSGTSYSLTISNMEAEDAAAYYCQQYHSYPTTFGGGTKLEVK

SEQ ID NO: 10806 - protein, 108 aa, Artificial Sequence
  Synthetic Polypeptide
DIQMTQSPSSLSASVGDRVTITCRASQSISSYLNWYQQKPGKAPKLLIYDASNLETGVPSRFSGSGSGTDFTFTISSLQPEDIATYYCQQYDNLPLTFGGGTKVDIKR

SEQ ID NO: 10807 - protein, 113 aa, Artificial Sequence
  Synthetic Polypeptide
DVVMTQSPLSLPVSLGDQASISCRSSQRLVHSNGNTYLHWYLQKPGQSPKLLIYRVSNRFPGVPDRFSGSGSGTDFTLKISRVEAEDLGIYFCSQSTHVPYTFGGGTKLEIKR

SEQ ID NO: 10808 - protein, 109 aa, Artificial Sequence
  Synthetic Polypeptide
SYELTQPPSVSVSPGQTATISCSGDQLGGKYGHWYQKKPGQSPVLVLYQDRKRPAGIPERFSGSSSGNTITLTISGTQAVDEADYYCQAWDTNLGGVFGGGTKVTVLGQ

SEQ ID NO: 10809 - protein, 113 aa, Artificial Sequence
  Synthetic Polypeptide
NFMLTQPHSVSESPGKTVTISCTRSSGSIASKYVQWYQQRPGSSPTTVIYEDNQRPSGVPDRFSGSIDTSSNSASLTISGLRTEDEADYYCHSYDSNNHSVFGGGTKVTVLGQ

SEQ ID NO: 10810 - protein, 108 aa, Artificial Sequence
  Synthetic Polypeptide
DIQMNQSPSSLSASLGDTITITCHASQNINVWLSWYQQKPGNIPKLLIYKASNLHTGVPSRFSGSGSGTGFTITISSLQPEDIATYYCQQGQSYPWTFGGGTKLEIKR

SEQ ID NO: 10811 - protein, 108 aa, Artificial Sequence
  Synthetic Polypeptide
DILLTQSPAILSVSPGERVSFSCRASQNIGTSIHWYQQRTNGSPRLLIKYASESVSGIPSRFSGSGSGTDFTLSINSVESEDIADYYCQHTNSWPTTFGGGTKLEIKR

SEQ ID NO: 10812 - protein, 113 aa, Artificial Sequence
  Synthetic Polypeptide
DIVMTQSPDSLAVSLGERATINCKSSQSLLNSGDQKNYLTWYQQKPGQPPKLLIYWASTRESGVPDRFSGSGSGTDFTLTISSLQAEDVAVYYCQNDYSYPLTFGQGTKVEIK

SEQ ID NO: 10813 - protein, 107 aa, Artificial Sequence
  Synthetic Polypeptide
DIQMTQSPSSLSASVGDRVTITCKASQDVSIAVAWYQQKPGKAPKVLIYSASYRYTGVPDRFSGSGSGTDFTFTISSLQPEDIAVYYCQQHYITPLTFGGGTKVEIK

SEQ ID NO: 10814 - protein, 110 aa, Artificial Sequence
  Synthetic Polypeptide
QAVVTQPPSASGTPGQRVTISCSGSSSNIGSNTVNWYQQVPGTAPKLLIYSNNQRPSGVPDRFSGSKSGTSASLAISGLQSEDEADYYCAAWDDSLNGWVFGGGTKLTVL

SEQ ID NO: 10815 - protein, 107 aa, Artificial Sequence
  Synthetic Polypeptide
DIQMTQSPSTLSASVGDRVTITCRASQNINKWLAWYQQRPGKAPQLLIYKASSLESGVPSRFSGSGSGTEYTLTISSLQPDDFATYYCQQYNSYATFGQGTKVEIKR

SEQ ID NO: 10816 - protein, 109 aa, Artificial Sequence
  Synthetic Polypeptide
QSVVTQPPSVSVAPGKTARITCGRNNIGSKSVHWYQQKPGQAPVLVVYDDSDRPSGIPERFSGSNSGNTATLTISRVEAGDEADYYCQVWDSSSDHVVFGGGTKLTVLG

SEQ ID NO: 10817 - protein, 111 aa, Artificial Sequence
  Synthetic Polypeptide
DIVLTQSPASLAVSLGQRATISCRASESVDNYGNTFMHWYQQKPGQPPKLLIYRASNLESGIPARFSGSGSRTDFTLTINPVEADDVATYYCQQSNEDPPTFGAGTKLELK

SEQ ID NO: 10818 - protein, 108 aa, Artificial Sequence
  Synthetic Polypeptide
EIVLTQSPGTLSLSPGERATLSCRASQSVSNTYLAWYHQRPGQAPRLLIYGASSRATGIPDRFSGSGSGTDFALTISSLEPEDFAVYYCQQYSNSWTFGQGTKVEIKR

SEQ ID NO: 10819 - protein, 108 aa, Artificial Sequence
  Synthetic Polypeptide
ELTQDPAVSVALGQTVRITCQGDSLRSNYANWYQQKPGQAPVLVIYGQNNRPSGIPDRFSGSSSGNTASLTITGAQAADEADYYCDSRVSTGNHVVFGGGTKLTVLGQ

SEQ ID NO: 10820 - protein, 106 aa, Artificial Sequence
  Synthetic Polypeptide
DIQMTQSPSSLSASVGDRVTITCSATSSISYMHWYQQKPGKAPKGWIYDTSKLAHGVPSRFSGSGSGTDFTLTISSLQPEDFATYYCHQRRSYPFTFGQGTKVEIK

SEQ ID NO: 10821 - protein, 108 aa, Artificial Sequence
  Synthetic Polypeptide
DIQMTQSPSSLSASVGDRVTITCKASQGFNKYVAWYQQKPGKAPKLLIYYTSTLQPGVPSRFSGSGSGRDYTLTISSLQPEDFATYYCLQYGNLLYAFGQGTKVEIKR

SEQ ID NO: 10822 - protein, 107 aa, Artificial Sequence
  Synthetic Polypeptide
DIQMTQSPSSLSASVGDRVTITCRASQDIRYYLNWYQQKPGKAPKLLIYVASSLQSGVPSRFSGSGSGTEFTLTVSSLQPEDFATYYCLQVYSTPRTFGQGTKVEIK

SEQ ID NO: 10823 - protein, 107 aa, Artificial Sequence
  Synthetic Polypeptide
EIVMTPSSATLSVSPGERATLSCRASQSVSRNLAWYQQKPGQAPRLLIYGASTRATGIPARFSGSGSGTEFTLTISSLQSEDFAVYYCHQYSNWMCSFGQGTKLEIK

SEQ ID NO: 10824 - protein, 108 aa, Artificial Sequence
  Synthetic Polypeptide
DIQMTQSPSSLSASVGDRVTITCKASKNIRSYLAWYQQKPGKAPKLLIYSGSTLHSGVPSRFSGSGSGTDFTLTISSLQPEDFATYYCQQHHEYPLTFGQGTKVEIKR

SEQ ID NO: 10825 - protein, 110 aa, Artificial Sequence
  Synthetic Polypeptide
QSVVTQPPSVSAAPGQKVTISCSGSSSNIGNNYVSWYQQLPGTAPKLLIYDNNKRPSGIPDRFSGSKSGTSATLGITGLQTGDEADYYCGTWDGSLYTMLFGGGTKLTVL

SEQ ID NO: 10826 - protein, 113 aa, Artificial Sequence
  Synthetic Polypeptide
QSVLTQPPSVSGAPGQRVTISCTGSSSNIGAGYDVHWYQQLPGTAPKLLIFGNSNRPSGVPDRFSGFKSGTSASLAITGLQAEDEADYFCQSYDSSLSGSGVFGTGTKVTVLG

SEQ ID NO: 10827 - protein, 114 aa, Artificial Sequence
  Synthetic Polypeptide
LPVLTQPPSASGTPGQRVTISCSGRSSNIGSNSVNWYRQLPGAAPKLLIYSNNQRPPGVPVRFSGSKSGTSASLAISGLQSEDEATYYCATWDDNLNVHYVFGTGTKVTVLGSR

SEQ ID NO: 10828 - protein, 111 aa, Artificial Sequence
  Synthetic Polypeptide
DIVLTQSPASLAVSLGERATINCRASESVSVIGAHLIHWYQQKPGQPPKLLIYLASNLETGVPARFSGSGSGTDFTLTISSLQAEDAAIYYCLQSRIFPRTFGQGTKLEIK

SEQ ID NO: 10829 - protein, 112 aa, Artificial Sequence
  Synthetic Polypeptide
DIVLTQSPATLSLSPGDRATLSCRASESVTILGSHLIYWYQQKPGQAPRLLIQLASNVQTGIPARFSGSGSRTDFTLTISSLEPEDFAVYYCLQSRTIPRTFGQGTKLEIKR

SEQ ID NO: 10830 - protein, 113 aa, Artificial Sequence
  Synthetic Polypeptide
DFVMTQSPDSLAVSLGERVTMSCKSSQSLLNSGNQKNYLTWYQQKPGQPPKLLIYWASTRESGVPDRFSGSGSGTDFTLTISSLQAEDVAVYYCQNDYSYPYTFGQGTKLEIK

SEQ ID NO: 10831 - protein, 113 aa, Artificial Sequence; identical to SEQ ID NO: 10830
  Synthetic Polypeptide

SEQ ID NO: 10832 - protein, 108 aa, Artificial Sequence
  Synthetic Polypeptide
DVQITQSPSYLAASPGETITINCRASKSISKDLAWYQEKPGKTNKLLIYSGSTLQSGIPSRFSGSGSGTDFTLTISSLEPEDFAMYYCQQHNKYPYTFGGGTKLEIKR

SEQ ID NO: 10833 - protein, 106 aa, Artificial Sequence
  Synthetic Polypeptide
EIVLTQSPTSMTASPGEQVTITCRASSSINYMHWYQQKPGASPRPWIYETSKLASGVPDRFSGSASGTSYSLTINNMEAEDAATYYCQQWNYPSWTFGGGTKLELK

SEQ ID NO: 10834 - protein, 113 aa, Artificial Sequence
  Synthetic Polypeptide
DIVMTQSPSSLAVSEGETVTINCKSSQSFLSSGDGKNYVAWYQYKPGQSPKLLIYWASTRQSGVPDRFIGSGSGTDFTLTISTVQAEDLAIYYCQQYYDTPLTFGSGTKLEIK

SEQ ID NO: 10835 - protein, 113 aa, Artificial Sequence
  Synthetic Polypeptide
DVLMTQTPVSLPVSLGGQVSISCRSSQSLVHSDGDTYLHWYLQKPGQSPQLLIYRVSNRFSGVPDRFSGSGSGTDFTLKISRVEPEDLGLYYCLQTTHFPPWTFGGGTKLEMK

SEQ ID NO: 10836 - protein, 111 aa, Artificial Sequence
  Synthetic Polypeptide
EIVLTQSPDFQSVTPKEKVTITCRASESVDTFGISFMNWFQQKPDQSPKLLIHAASNQGSGVPSRFSGSGSGTDFTLTINSLEAEDAATYYCQQSKEVPFTFGGGTKVEIK

SEQ ID NO: 10837 - protein, 107 aa, Artificial Sequence
  Synthetic Polypeptide
AIQLTQSPSSLSASVGDRVTITCRASQGISSAQQKPGKAPKLLILAWYSSLESGVPSRFSGYDASGSGTDFTLTISSLQPEDFATYYCQQFNSYPYTFGQGTKLEIK

SEQ ID NO: 10838 - protein, 112 aa, Artificial Sequence
  Synthetic Polypeptide
DIVMTQSPATLSLSPGERATLSCRSSKSLQNVNGNTYLYWFQQKPGQSPQLLIYRMSNLNSGVPDRFSGSGSGTEFTLTISSLEPEDFAVYYCMQHLEYPITFGAGTKLEIK

SEQ ID NO: 10839 - protein, 108 aa, Artificial Sequence
  Synthetic Polypeptide
DIQMTQSPSSLSASVGDRVTITCKASDHINNWLAWYQQKPGQAPKLLIYGATTLETGVPSRFSGSGSGTDYTLTISSLQPEDFATYYCQQSWNTPWTFGQGTKLEIKR

SEQ ID NO: 10840 - protein, 111 aa, Artificial Sequence
  Synthetic Polypeptide
QIVLSQSPAILSASPGEKVTMTCRASSSVSYMHWYQQKPGSSPKPWIYATSNLASGVPARFSGSGSGTSYSFTISRVEAEDAATYYCQQWTFNPPTFGGGTRLEIKRTVAA

SEQ ID NO: 10841 - protein, 107 aa, Artificial Sequence; identical to SEQ ID NO: 10746
  Synthetic Polypeptide

SEQ ID NO: 10842 - protein, 107 aa, Artificial Sequence
  Synthetic Polypeptide
DIQMTQSPSSLSASVGDRVTINCKASQDINSYLSWFQQKPGKAPKTLIYRANRLVDGVPSRFSGSGSGQDYTLTISSLQPEDFATYYCLQYDEFPLTFGGGTKVEIK

SEQ ID NO: 10843 - protein, 112 aa, Artificial Sequence
  Synthetic Polypeptide
DIVMTQTPLSLSVTPGQPASISCKSSQSLLDGDGKTYLNWLLQKPGQSPQRLIYLVSKLDSGVPDRFSGSGSGTDFTLKISRVEAEDVGVYYCWQGTHFPRTFGQGTKLEIK

SEQ ID NO: 10844 - protein, 106 aa, Artificial Sequence
  Synthetic Polypeptide
DIQMTQSPSSLSASVGDRVTITCKASQDVSTAVAWFQQKPGKAPKLLIYSPSYRYTGVPSRFSGSGSGTDFTLTISSLQPEDFTYYCQQLYSTPYTFGQGTKVEIK

SEQ ID NO: 10845 - protein, 111 aa, Artificial Sequence
  Synthetic Polypeptide
DIQMTQSPSSLSASVGDRVTITCRASQSVSTSSYNYMHWYQQKPGKPPKLLIKYASNLESGVPSRFSGSGSGTDFTLTISSLQPEDFATYYCQHSWEIPLTFGQGTKVEIK

SEQ ID NO: 10846 - protein, 108 aa, Artificial Sequence
  Synthetic Polypeptide
EIVLTQSPATLSASPGERVTLTCRASSNVISSYVHWYQQKPGSSPRLFLYSTSNLASGVPSRFSGSGSGTDFTFTISSLEAEDAATYYCQQYSGYPLTFGQGTRLEIK

SEQ ID NO: 10847 - protein, 108 aa, Artificial Sequence
  Synthetic Polypeptide
EIVLTQSPATLSLSPGERATLSCRASSNVISSYVHWYQQKPGQAPRLLIYSTSNLASGIPARFSGSGSGTDFTLTISSLEPEDFAVYYCQQYSGYPLTFGQGTRLEIK

SEQ ID NO: 10848 - protein, 112 aa, Artificial Sequence
  Synthetic Polypeptide
DVVMTQTPLSLPVSLGDQASISCRSSQSLVHSNGNTYLRWYLQKPGQSPKVLIYKVSNRVSGVPDRFSGSGSGTDFTLKINRVEAEDLGVYFCSQSTHVPWTFGGGTKLEIK

SEQ ID NO: 10849 - protein, 110 aa, Artificial Sequence [sequence omitted]

SEQ ID NO: 10850 - protein, 113 aa, Artificial Sequence
  Synthetic Polypeptide
QSVVTQPPSVSGAPGQRVTISCTGSSSNIGAGYDVHWYQQLPGTAPKLLIYGNSNRPSGVPDRFSGSKSGTSASLAITGLQAEDEADYYCQSYDSSLSGSYVFGTGTKLTVLG

SEQ ID NO: 10851 - protein, 111 aa, Artificial Sequence
  Synthetic Polypeptide
QSVVTQPASVSGSPGQSITISCTGTSSDVGGYNYVSWYQQHPGKAPKLMIYDVSKRPSGVSNRFSGSKSGNTASLTISGLQAEDEADYYCSSYTSSSTLVFGGGTKLTVLG

SEQ ID NO: 10852 - protein, 108 aa, Artificial Sequence
  Synthetic Polypeptide
DVVMTQSPSSLSASVGDRVTITCQSSLDISHYLNWYQQKPGKAPKLLIYDASNLETGVPSRFSGSGSGTHFTFTISSLQPEDFATYYCQQYDNLPLTFGGGTKLEIKR

SEQ ID NO: 10853 - protein, 124 aa, Artificial Sequence
  Synthetic Polypeptide
DVMLTQTPLSLPVSLGDQASISCRSSQSILHSTGDTYLEWYLQKPGQSPKLLINKVSNRLSGVPDRFSGSGSGTDFTLKISRVEAEDLGVYYCFQGSHVPWTFGGGTKLEIKRADAAPTVSIFP

SEQ ID NO: 10854 - protein, 108 aa, Artificial Sequence
  Synthetic Polypeptide
LPVLTQPPSVSVAPGKTARITCGGNNIGSKSVHWYQQKPGQAPVLVVYDDSDRPSGIPERFSGSNSGNTATLTISRVEAGDEADYYCQVWDSSSDYVVFGGGTKLTVL

SEQ ID NO: 10855 - protein, 111 aa, Artificial Sequence
  Synthetic Polypeptide
ELVMTQSPASLAVSLGQRATISCRASESVDSYGKSFMHWYQLKPGQPPKLLIYRASNLESGVPARFSGSGSRTDFTLTIDPVEADDAATYYCQQNNEDPWTFGGGTKLEIK

SEQ ID NO: 10856 - protein, 112 aa, Artificial Sequence; identical to SEQ ID NO: 10829
  Synthetic Polypeptide

SEQ ID NO: 10857 - protein, 112 aa, Artificial Sequence; identical to SEQ ID NO: 10738
  Synthetic Polypeptide

SEQ ID NO: 10858 - protein, 107 aa, Artificial Sequence
  Synthetic Polypeptide
DVVMTQSPSSLSASVGDRVTITCMASEDIYIRLAWYQQKPGNAPKLLIYAATSLETGVPSRFSGSGSGTDFTLTISSLQPEDFATYYCQQYWSSPWTFGGGTKVEIK

SEQ ID NO: 10859 - protein, 106 aa, Artificial Sequence
  Synthetic Polypeptide
SSELTQDPAVSVALGQTVRITCQGDSLRSYYASWYQQKPGQAPVLVIYGKNNRPSGIPDRFSGSSSGNTASLTITGAQAEDEADYYCNSRDSSGWVFGGGTKLTVL

SEQ ID NO: 10860 - protein, 112 aa, Artificial Sequence
  Synthetic Polypeptide
QSALTQPASVSGSPGQSITISCTGTSSDVGGYNYVSWYQQHPGKAPKLMIYDVSNRPSGVSNRFSGSKSGNTASLTISGLQAEDEADYYCSSYTSSSTLVYVFGTGTKVTVL

SEQ ID NO: 10861 - protein, 110 aa, Artificial Sequence
  Synthetic Polypeptide
QSVLTQPRSVSGSPGQSVTISCTGTSSDVGGYNYVSWYQQHPGEAPKLIIYDADKRPSGISNRFSSGKSGNTASLTISGLQVEDEADYYCCSYAGGSTWVFGGGTKVTVL

SEQ ID NO: 10862 - protein, 112 aa, Artificial Sequence
  Synthetic Polypeptide
QSALTQPASVSGSPGQSITISCTGTSSDVGGYNYVSWYQQHPGKAPKVIISEVNNRPSGVSHRFSGSKSGNTASLTISGLQAEDEADYFCSSYTSGRTLYVFGTGSKVTVLG

SEQ ID NO: 10863 - protein, 111 aa, Artificial Sequence
  Synthetic Polypeptide
QSALTQPASASGSPGQSVTISCTGTSSDVGGYNYVSWYQQHPGKAPKLMIYDVSNRPSGVSNRFSGSKSGNTASLTISGLQAEDEADYYCSSYTSSSTLYVFGTGTQLTVL

SEQ ID NO: 10864 - protein, 109 aa, Artificial Sequence
  Synthetic Polypeptide
EIVLTQSPATLSLSPGERATLSCSASSSVSYMYWYQQKPGQAPRLLIYRTSNLASGIPARFSGSGSGTDFTLTISSLEPEDFAVYYCQQYHSYPTTFGQGTKVEIKRTV

SEQ ID NO: 10865 - protein, 107 aa, Artificial Sequence
  Synthetic Polypeptide
DVVMTQSPSSLSASVGDRVTITCKASEDIYIRLAWYQQKPGKAPKLLIYAATSLETGVPSRFSGSGSGTDFTLTISSLQPEDFATYYCQQYWTTPWTFGGGTKVEIK

SEQ ID NO: 10866 - protein, 108 aa, Artificial Sequence
  Synthetic Polypeptide
DIQLTQSPSFLSASVGDRVTITCRASQGISTDLNWYQQKPGKAPKLLIYAASNLESGVPSRFSGSGSGTEFTLTISSLQPEDFATYYCQQSYNWPYTFGGGTKVEIKR

SEQ ID NO: 10867 - protein, 108 aa, Artificial Sequence
  Synthetic Polypeptide
DIQLTQSPSFLSASVGDRVTITCSLSLGISTWRDWFPPRLGRGLEPLTYAASTLQSGVPSRFSGSGSGTEFTLTISSLQPEDFATYYCQQLNSYPLTFGGGTKVEIKR

SEQ ID NO: 10868 - protein, 108 aa, Artificial Sequence
  Synthetic Polypeptide
DIQMTQTTSSLSASLGDRVTISCRASQDISNYLNWYQQKPDGTVKLLIYYTSILHSGVPSRFSGSGSGTDYSLTISNLEQEDFATYFCQQGNTLPWTFGGGTKLEIKA

SEQ ID NO: 10869 - protein, 116 aa, Artificial Sequence
  Synthetic Polypeptide
DIVMTQSPDSLAVSLGERATINCKSSQSLLYRSNQKNYLAWYQQKPGQPPKLLIYWASTRESGVPDRFSGSGSGTDFTLTISSLQAEDVAVYYCQQYYNYPRTFGQGTKVEIKRTV

SEQ ID NO: 10870 - protein, 113 aa, Artificial Sequence
  Synthetic Polypeptide
DVVMTQSPLSLPVTLGQPASISCRSSQSLLHSSGNTYLEWYQQRPGQSPRPLIYKISTRFSGVPDRFSGSGSGTDFTLKISRVEAEDVGVYYCFQGSHVPYTFGGGTKVEIKR

SEQ ID NO: 10871 - protein, 109 aa, Artificial Sequence
  Synthetic Polypeptide
DIQMTQSPSSLSASVGDRVTITCRASENIYSNLAWYQQKPGKAPKLLIYAATNLADGVPSRFSGSGSGTDFTLTISSLQPEDFATYYCQHFWGTPTFGQGTKVEIKRTV

SEQ ID NO: 10872 - protein, 113 aa, Artificial Sequence
  Synthetic Polypeptide
DFVMTQSPLSLPVTPGEPASISCRSSQSIVHSNGNTYLEWYLQKPGQSPQLLIYKVSNRFSGVPDRFSGSGSGTDFTLKISRVEAEDVGVYYCFQGSHVPLTFGQGTKLEIKR

SEQ ID NO: 10873 - protein, 106 aa, Artificial Sequence
  Synthetic Polypeptide
DIQLTQSPSFLSASVGDRVTITCSARSSISFMYWYQQKPGKAPKLLIYDTSNLASGVPSRFSGSGSGTEFTLTISSLEAEDAATYYCQQWSSYPLTFGQGTKLEIK

SEQ ID NO: 10874 - protein, 112 aa, Artificial Sequence
  Synthetic Polypeptide
QLVLTQSPSASASLGSSVKLTCTLSSGHKTDTIDWYQQQPGKAPRYLMKLEGSGSYNKGSGVPDRFSGSSSGADWYLTISSLQSEDEADYYCGTDYPGNYLFGGGTQLTVLG

SEQ ID NO: 10875 - protein, 111 aa, Artificial Sequence
  Synthetic Polypeptide
DIVLTQSPPSLAMSLGKRATISCRASESVTILGSHLIHWYQQKPGQPPTLLIQLASNVQTGVPARFSGSGSRTDFTLTIDPVEEDDVAVYYCLQSRTIPRTFGGGTKLEIK

SEQ ID NO: 10876 - protein, 108 aa, Artificial Sequence
  Synthetic Polypeptide
DIQLTQSPSSLSASVGDRVSFTCQASQDINNFLNWYQQKPGKAPKLLIYDASNLETGVPSRFSGSGSGTDFTFTISSLQPEDIATYYCQQYGNLPFTFGGGTKVEIKR

SEQ ID NO: 10877 - protein, 108 aa, Artificial Sequence; identical to SEQ ID NO: 10876
  Synthetic Polypeptide

SEQ ID NO: 10878 - protein, 108 aa, Artificial Sequence
  Synthetic Polypeptide
DIQMTQSPSSLSASLGDRVTITCRASQGIRNDLGWYQQKPGKAPKRLIYASSTLQSGVPSRFSGSGSGTEFTLTISSLQPEDFATYYCLQHNNFPWTFGQGTKVEIKR

SEQ ID NO: 10879 - protein, 109 aa, Artificial Sequence
  Synthetic Polypeptide
EIVLTQSPDTLSLSPGEKATLSCRASQSVSSSFLAWYQQKPGQAPSLLIYVASRRAAGIPDRFSGSGSGTDFTLTISRLEPEDFGMFYCQHYGRTPFTFGPGTKVDIKR

SEQ ID NO: 10880 - protein, 108 aa, Artificial Sequence
  Synthetic Polypeptide
DIQLTQSPSFLSASVGDRVTITCRASQGISSYLAWYQQKPGKAPKLLIYAASTLQSGVPSRFSGSGSGTEFTLTISSLQPEDFATYYCQQVNSYPLTFGGGTKVEIKR

SEQ ID NO: 10881 - protein, 112 aa, Artificial Sequence
  Synthetic Polypeptide
QSALTQPRSVSGSPGHSVTISCTGTSSDVGDYNYVSWYQQRPGKVPKLLIYDVSKRPSGVPDRFSGSKSGNTASLTISGLQAEDEAIYFCASYAGNYNVVFGGGTKLTVLGQ

SEQ ID NO: 10882 - protein, 108 aa, Artificial Sequence
  Synthetic Polypeptide
DIQMTQSPSSLSASVGDRVTITCSASQGINNYLNWYQQKPGKAPKLLIHYTSGLHAGVPSRFSGSGSGTDYTLTISSLQPEDVATYYCQQYSILPWTFGGGTKVEIKR

SEQ ID NO: 10883 - protein, 113 aa, Artificial Sequence
  Synthetic Polypeptide
DIQMTQSPSSLSASVGDRVTITCKSSQSVLYSSNQKNYLAWFQQKPGKAPKLLIYWASTRESGVPSRFSGSGSGTDFTLTISSLQPEDFATYFCHQYLSSYTFGQGTKVEIKR

SEQ ID NO: 10884 - protein, 108 aa, Artificial Sequence
  Synthetic Polypeptide
DIQMTQSPSSLSASVGDRVTITCRASQDISNYLNWYQQKPGKAPKLLIYYTSRLHSGVPSRFSGSGSGTDFTLTISSLQPEDFATYYCQQGNTLPYTFGQGTKVEIKR

SEQ ID NO: 10885 - protein, 109 aa, Artificial Sequence
  Synthetic Polypeptide
DIQMTQSPSSLSASVGDRVTITCTASSRVSSSYLHWFQQKPGKAPKLLIYSTSNLASGVPSRFSGSGSGTDFTLTISSLQPEDFATYYCHQYHRSPYTFGQGTKVEIKR

SEQ ID NO: 10886 - protein, 106 aa, Artificial Sequence
  Synthetic Polypeptide
DIQMTQSPSSLSASVGDRVTITCSASSSVTYMYWYQQKPGKAPKLLIYDTSNLASGVPSRFSGSGSGTDYTLTISSLQPEDFATYYCQQWSNYPLTFGQGTKVEIK

SEQ ID NO: 10887 - protein, 107 aa, Artificial Sequence
  Synthetic Polypeptide
EIVLTQSPSSLSASVGDRVTITCRASENIYSYLAWYQQKPGKAPKLLIYNTKTLGEGVPSRFSGSGSGTDFTLTISSLQPEDFATYYCQHHYGTPFTFGPGTKVDIK

SEQ ID NO: 10888 - protein, 107 aa, Artificial Sequence
  Synthetic Polypeptide
QIVLTQSPAIMSASPGEKVTMTCSASSSVSYMHWYQQKSGTSPKRWIYDTSKLASGVPDRFSGSGSGTSYFLTINNMEAEDAATYYCQQWNINPLTFGAGTKLELKR

SEQ ID NO: 10889 - protein, 108 aa, Artificial Sequence
  Synthetic Polypeptide
DIQMTQSSAYLSVSLGGRVTITCKASDHINNWLAWYQHKPGNAPRLLISGATTLETGVPSRFSGSGSGKDYTLSITSLQTEDVATYYCQQSWNTPWTFGGGTKLEIKR

SEQ ID NO: 10890 - protein, 108 aa, Artificial Sequence
  Synthetic Polypeptide
EIVLTQSPGTLSLSPGEGATLSCRAGQSVRSSYLGWYQQKPGQAPRLLIYGASSRATGIPDRFSGSGSGTDFTLTISRLEPEDFAVYYCQQYGYSPPTFGGGTKLEIK

SEQ ID NO: 10891 - protein, 111 aa, Artificial Sequence; identical to SEQ ID NO: 10875
  Synthetic Polypeptide

SEQ ID NO: 10892 - protein, 107 aa, Artificial Sequence
  Synthetic Polypeptide
EIVLTQSPATLSLSPGERATLSCRASQSVSSYLAWYQQKPGQAPRLLIYDASNRATGIPARFSGSGSGTDFTLTISSLEPEDFAVYYCQQRSNWPRTFGQGTKVEIK

SEQ ID NO: 10893 - protein, 109 aa, Artificial Sequence
  Synthetic Polypeptide
EIVLTQSPGTLSLSPGERATLSCRASQSVSSSYLAWYQQKPGQAPRLLIYGASSRATGIPDRFSGSGSGTDFTLTISRLEPEDFAVYYCQQYHHSPLTFGGGTKVEIKR

SEQ ID NO: 10894 - protein, 108 aa, Artificial Sequence
  Synthetic Polypeptide
EIVLTQSPGTLSLSPGERATLSCRASQSVSSDYLAWYQQKPGQAPRLLIYGASRRATGIPDRFSGSGSGTDFTLTISRLEPEDFAVYYCQQYVSYWTFGGGTKVEIKR

SEQ ID NO: 10895 - protein, 109 aa, Artificial Sequence
  Synthetic Polypeptide
DIQMTQSPSSLSASVGDRVTITCRASQDVNTAVAWYQQKPGKAPKLLIYSASFLYSGVPSRFSGSRSGTDFTLTISSLQPEDFATYYCQQHYTTPPTFGQGTKVEIKRT

SEQ ID NO: 10896 - protein, 107 aa, Artificial Sequence
  Synthetic Polypeptide
DIQMTQSPSSVSASVGDRVTITCRASQGITRWLAWYQQKPGKAPKLLIYAASVLQSGVPSRFSGSGSGTDFTLTISSLQPEDFATYYCQQSNSFPRTFGQGTKVEIK

SEQ ID NO: 10897 - protein, 107 aa, Artificial Sequence
  Synthetic Polypeptide
DIQMTQSPSSVSASVGDRVTITCRASQDISRWLAWYQQKPGKAPKLLISAASRLQSGVPSRFSGSGSGTDFTLTISSLQPEDFAIYYCQQAKSFPRTFGQGTKVEIK

SEQ ID NO: 10898 - protein, 112 aa, Artificial Sequence
  Synthetic Polypeptide
DTVMTQTPLSSHVTLGQPASISCRSSQSLVHSDGNTYLSWLQQRPGQPPRLLIYRISRRFSGVPDRFSGSGAGTDFTLEISRVEAEDVGVYYCMQSTHVPRTFGQGTKVEIK

SEQ ID NO: 10899 - protein, 107 aa, Artificial Sequence
  Synthetic Polypeptide
DIQLTQSPSFLSASVGDRVTITCWASQGINNYLAWYQQKPGKAPKLLIYAASTLQTGVPSRFSGSGSGTEFTLTISSLQPEDFATYYCQQLNSYPLTFGGGTKVEIK

SEQ ID NO: 10900 - protein, 108 aa, Artificial Sequence
  Synthetic Polypeptide
EIVLTQSPGTLSLSPGERATLSCRASQSVNKNYLAWYQQKPGQAPRLLIYGASSRATGIPDRFSGSGSGTDFTLTISRLEPEDFAVYYCQQYDRSPLTFGGGTKVEIK

SEQ ID NO: 10901 - protein, 112 aa, Artificial Sequence
  Synthetic Polypeptide
DVVMTQTPLSLPVTLGQPASISCRSSQSLVYRDGNTYLSWFQQRPGQSPRRLIYKVSNWQSGVPDRFSGGGSGTDFTLKISRVEAEDVGVYYCMQGTHWPPTFGQGTKVEIK

SEQ ID NO: 10902 - protein, 106 aa, Artificial Sequence
  Synthetic Polypeptide
IVMTQTPKFLLVSAGDRVTITCKASQSVNNDVSWFQQKPGQSPTLLIYYASNRYTGVPDRFTGSGYGTDFTFTISTVQAEDLAVYFCQQDYSSPYTFGGGTKLEIK

SEQ ID NO: 10903 - protein, 106 aa, Artificial Sequence
  Synthetic Polypeptide
DIQMTQSPSSLSASVGDRVTITCRASQSINNYLNWYQQKPGKAPTLLIYAASSLQSGVPSRFSGSRSGTDFTLTISSLQPEDFAAYFCQQTYSNPTFGQGTKVEVK

SEQ ID NO: 10904 - protein, 108 aa, Artificial Sequence
  Synthetic Polypeptide
SYELTQPPSVSVSPGQTASITCSGDKLGDKYASWYQQKPGQSPVLVIYQDNRRPSGIPERFSGSNSGNTATLTISGTQAMDEADYYCQAWDSDTYVFGTGTKVTVLGQ

SEQ ID NO: 10905 - protein, 107 aa, Artificial Sequence
  Synthetic Polypeptide
DIQMTQSPSSLSASVGDRVTITCRASQSISSYLNWYQQKPGKAPKLLIYAASSLQSGVPSRFSGSGSGTDFTLTISSLQPEDFATYYCQQSYITPLTFGGGTKVEIK

SEQ ID NO: 10906 - protein, 113 aa, Artificial Sequence
  Synthetic Polypeptide
DIVLTQSPASLAVSLGQGATISCRASKSVSTSGYTYMHWYQQKPGQPPKLLIYLASNLESGVPARFSGSGSGTDFTLNIHPVEEEDAATYYCQHSGELPPSFGGGTKLEIKRA

SEQ ID NO: 10907 - protein, 112 aa, Artificial Sequence
  Synthetic Polypeptide
DIQMTQSPSSLSASVGDRVTITCSASQGIRNYLNWYQQKPGKVPKLLIYYTSRLHSGVPSRFSGSGSGTDFTLTISSLQPEDVATYYCQQYGKLPYTFGQGTKLEIKRTVAA

SEQ ID NO: 10908 - protein, 116 aa, Artificial Sequence
  Synthetic Polypeptide
DIVMTQSPDSLAVSLGERATINCRAGESVDIFGVGFLHWYQQKPGQPPKLLIYRASNLESGVPDRFSGSGSGTDFTLTIRPLQAEDVAVYYCQQTNEDPYTFGQGTKLEIKRTVAA

SEQ ID NO: 10909 - protein, 112 aa, Artificial Sequence
  Synthetic Polypeptide
DIVLTQSPATLSLSPGERATLSCRASQNIVFNLAWYQQKPGQAPRLLIYDASNRATGVPARFSGSGSGTDFTLTISSLEPEDFAVYYCQQKKSMPLTFGQGTKVEIKRTVAA

SEQ ID NO: 10910 - protein, 113 aa, Artificial Sequence
  Synthetic Polypeptide
QTVVTQEPSLTVSPGGTVTLTCGSSTGAVTTSNYANWVQQKPGQAPRGLIGGTNKRAPGTPARFSGSLLGGKAALTLSGVQPEDEAEYYCALWYSNLWVFGGGTKLTVLTVAA

SEQ ID NO: 10911 - protein, 114 aa, Artificial Sequence
  Synthetic Polypeptide
EIVLTQSPGTLSLSPGERATLSCRASQSVSSSYLAWYQQKPGQAPRLLIYGASSRATGIPDRFSGSGSGTDFTLTISRLEPEDFAVYYCQQYTNEHYYTFGQGTKVEIKRTVAA

SEQ ID NO: 10912 - protein, 113 aa, Artificial Sequence
  Synthetic Polypeptide
EIVLTQSPATLSLSPGERATLSCSVSSSISSSNLHWYQQKPGQAPRLLIYGTSNLASGIPARFSGSGSGTDFTLTISSLEPEDFAVYYCQQWSSYPHTFGGGTKVEIKRTVAA

SEQ ID NO: 10913 - protein, 112 aa, Artificial Sequence
  Synthetic Polypeptide
DIQMTQSPSSLSASVGDRVTITCKAGQNVGTSVAWYQQKPGKAPKLLIYSASYRYSGVPSRFSGSGSGTDFTLTISSLQPEDFATYYCQQYITYPYTFGQGTKVEIKRTVAA

SEQ ID NO: 10914 - protein, 112 aa, Artificial Sequence
  Synthetic Polypeptide
DIQMTQSPSSLSASVGDRVTITCSASQDIGNFLNWYQQKPGKAPKLLIYYTSSLYSGVPSRFSGSGSGTDFTLTISSLQPEDFATYYCQQYSKLPLTFGQGTKLEIKRTVAA

SEQ ID NO: 10915 - protein, 112 aa, Artificial Sequence
  Synthetic Polypeptide
DVQVTQSPSSLSASVGDRVTITCRSSQSLANSYGNTFLSWYLHKPGKAPQLLIYGISNRFSGVPDRFSGSGSGTDFTLTISSLQPEDFATYYCLQGTHQPYTFGQGTKVEIK

SEQ ID NO: 10916 - protein, 107 aa, Artificial Sequence
  Synthetic Polypeptide
DIQMTQSPSSLSASVGDRVTITCRASQDISNYLNWYQQKPGKAVKLLIYYTSILHSGVPSRFSGSGSGTDYTLTISSLQPEDFATYFCQQGNTLPWTFGGGTKVEIK

SEQ ID NO: 10917 - protein, 108 aa, Artificial Sequence
  Synthetic Polypeptide
DIVMTQSQRFMTTSVGDRVSVTCKASQSVDSNVAWYQQKPRQSPKALIFSASLRFSGVPARFTGSGSGTDFTLTISNLQSEDLAEYFCQQYNNYPLTFGAGTKLELKR

SEQ ID NO: 10918 - protein, 108 aa, Artificial Sequence
  Synthetic Polypeptide
DIQMTQSPSSLSASVGDRVTITCRASQDISNYLNWYQQKPGKAPKLLIYYTSILHSGVPSRFSGSGSGTDFTLTISSLQPEDFATYYCQQGNTLPWTFGQGTKVEIKR

SEQ ID NO: 10919 - protein, 108 aa, Artificial Sequence
  Synthetic Polypeptide
DIQMTQSPSSLSASVGDRVTITCKASDHINNWLAWYQQKPGKAPKLLIYGATTLETGVPSRFSGSGSGTDFTLTISSLQPEDFATYYCQQSWNTPWTFGQGTKVEIKR

SEQ ID NO: 10920 - protein, 108 aa, Artificial Sequence
  Synthetic Polypeptide
SYVLTQPPSVSVAPGQTARITCGGNNIGSKSVHWYQQPPGQAPVVVVYDDSDRPSGIPERFSGSNSGNTATLTISRVEAGDEAVYYCQVWDSSSDHVVFGGGTKLTVL

SEQ ID NO: 10921 - protein, 108 aa, Artificial Sequence
  Synthetic Polypeptide
DIQMTQSPSSLSASVGDRVTITCMASEDIYIRLAWYQQKPGKAPKLLIYAATSLETGVPSRFSGSGSGTDFTLTISSLQPEDFATYYCQQYWSSPWTFGQGTKVEIKR

SEQ ID NO: 10922 - protein, 112 aa, Artificial Sequence
  Synthetic Polypeptide
DIQMTQSPSSVSASVGDRVTITCRASESVDNYGISFMNWYQQKPGKAPKLLISAASNRATGVPSRFSGSGSGTDFTLTISSLQPEDFAIYYCQQSKEVPWTFGQGTKVEIKR

SEQ ID NO: 10923 - protein, 112 aa, Artificial Sequence
  Synthetic Polypeptide
DIQLTQSPSSLSASVGDRVTITCRASKSVSTSGYSYMHWYQQKPGKAPKLLIYLVSNLESGVPSRFSGSGSGTDFTLTISSLQPEDFATYYCQQFSELPWTFGQGTKVEIKR

SEQ ID NO: 10924 - protein, 109 aa, Artificial Sequence
  Synthetic Polypeptide
DIQMTQSPSSVSASVGDRVTITCRASQFISSSYLSWYQQKPGKAPKLLISGSSSRATGVPSRFSGSGSGTDFTLTISSLQPEDFAIYYCQQLYSSPMTFGQGTKVEIKR

SEQ ID NO: 10925 - protein, 108 aa, Artificial Sequence; identical to SEQ ID NO: 10920
  Synthetic Polypeptide

SEQ ID NO: 10926 - protein, 108 aa, Artificial Sequence; identical to SEQ ID NO: 10920
  Synthetic Polypeptide

SEQ ID NO: 10927 - protein, 108 aa, Artificial Sequence; identical to SEQ ID NO: 10920
  Synthetic Polypeptide

SEQ ID NO: 10928 - protein, 108 aa, Artificial Sequence; identical to SEQ ID NO: 10920
  Synthetic Polypeptide

SEQ ID NO: 10929 - protein, 108 aa, Artificial Sequence; identical to SEQ ID NO: 10920
  Synthetic Polypeptide

SEQ ID NO: 10930 - protein, 108 aa, Artificial Sequence; identical to SEQ ID NO: 10920
  Synthetic Polypeptide

SEQ ID NO: 10931 - protein, 108 aa, Artificial Sequence; identical to SEQ ID NO: 10920
  Synthetic Polypeptide

SEQ ID NO: 10932 - protein, 108 aa, Artificial Sequence
  Synthetic Polypeptide
SYVLTQPPSVSVAPGQTARITCGGKNIGSKSVHWYQQPPGQAPVVVVYDDSDRPSGIPERFSGSNSGNTATLTISRVEAGDEAVYYCQVWDSSSDHVVFGGGTKLTVL

SEQ ID NO: 10933 - protein, 108 aa, Artificial Sequence
  Synthetic Polypeptide
SYVLTQPPSVSVAPGQTARITCGGNNLGSKSVHWYQQPPGQAPVVVVYDDSDRPSGIPERFSGSNSGNTATLTISRVEAGDEAVYYCQVWDSSSDHVVFGGGTKLTVL

SEQ ID NO: 10934 - protein, 108 aa, Artificial Sequence
  Synthetic Polypeptide
SYVLTQPPSVSVAPGQTARITCGGNNIGGKSVHWYQQPPGQAPVVVVYDDSDRPSGIPERFSGSNSGNTATLTISRVEAGDEAVYYCQVWDSSSDHVVFGGGTKLTVL

SEQ ID NO: 10935 - protein, 108 aa, Artificial Sequence
  Synthetic Polypeptide
SYVLTQPPSVSVAPGQTARITCGGNNIGSKTVHWYQQPPGQAPVVVVYDDSDRPSGIPERFSGSNSGNTATLTISRVEAGDEAVYYCQVWDSSSDHVVFGGGTKLTVL

SEQ ID NO: 10936 - protein, 108 aa, Artificial Sequence; identical to SEQ ID NO: 10932
  Synthetic Polypeptide

SEQ ID NO: 10937 - protein, 108 aa, Artificial Sequence; identical to SEQ ID NO: 10933
  Synthetic Polypeptide

SEQ ID NO: 10938 - protein, 108 aa, Artificial Sequence; identical to SEQ ID NO: 10934
  Synthetic Polypeptide

SEQ ID NO: 10939 - protein, 107 aa, Artificial Sequence
  Synthetic Polypeptide
EIVLTQSPATLSLSPGERATLSCRASQSVSSYLAWYQQKPGQAPRLLIYDASNRATGIPARFSGSGSGTDFTLTISSLEPEDFAVYYCQQRSNWPLTFGQGTKVEIK

SEQ ID NO: 10940 - protein, 113 aa, Artificial Sequence
  Synthetic Polypeptide
DIVMTQSPDSLAVSLGERATINCKSSQSVLYSSNNKNYLAWYQQKPGQPPKLLIYWASTRESGVPDRFSGSGSGTDFTLTISSLQAEDVAVYYCQQYYSTPLTFGQGTKVEIK

SEQ ID NO: 10941 - protein, 108 aa, Artificial Sequence
  Synthetic Polypeptide
DIQMTQSPSSLSASVGDRVTITCRASQSINKWLNWYQQKPGKAPKLLIYAASSLQSGVPSRFSGSGSGTDFTLTISSLQPEDFATYYCQQDYNFPYTFGQGTKVEIKR

SEQ ID NO: 10942 - protein, 106 aa, Artificial Sequence [sequence omitted]

SEQ ID NO: 10943 - protein, 107 aa, Artificial Sequence
  Synthetic Polypeptide
DIQLTQSHKFLSTSVGDRVSITCKASQDVYNAVAWYQQKPGQSPKLLIYSASSRYTGVPSRFTGSGSGPDFTFTISSVQAEDLAVYFCQQHFRTPFTFGSGTKLEIK

SEQ ID NO: 10944 - protein, 106 aa, Artificial Sequence
  Synthetic Polypeptide
DIQLTQSPSSLSASVGDRVTITCKASQDVGTSVAWYQQKPGKAPKLLIYWTSTRHTGVPSRFSGSGSGTDFTFTISSLQPEDIATYYCQQYSLYRSFGQGTKVEIK

SEQ ID NO: 10945 - protein, 105 aa, Artificial Sequence
  Synthetic Polypeptide
DIQLTQSPSSLSASVGDRVTITCSTSSSVSYMHWYQQKPGKAPKLLIYSTSNLASGVPSRFSGSGSGTDFTFTISSLQPEDIATYYCHQWSSYPTFGQGTKVEIK

SEQ ID NO: 10946 - protein, 109 aa, Artificial Sequence
  Synthetic Polypeptide
DIQMTQSPSSLSASVGDRVTITCRASQDVNTAVAWYQQKPGKAPKLLIYSASFLYSGVPSRFSGSRSGTDFTLTISSLQPEDFATYYCQQAYTTPPTFGQGTKVEIKRT

SEQ ID NO: 10947 - protein, 111 aa, Artificial Sequence
  Synthetic Polypeptide
EIVLTQSPGTLSLSPGERATLSCRASQSVSSDYLAWYQQKPGQAPRLLIYGASSRATGIPDRFSGSGSGTDFTLTISRLPEDFAVYYCQQYVSYWTFGGGTKVEIKRTVAA

SEQ ID NO: 10948 - protein, 109 aa, Artificial Sequence
  Synthetic Polypeptide
SYELIQPPSAAVTLGNTVSLTCVGDELPKRYAYWYQQKPDQSIVRVIYEDSVRPPGISDRFSGSSSGTTATLTIRDAQNEDEADYYCQSTYGDDKLYIFGGGTKLTVLG

SEQ ID NO: 10949 - protein, 109 aa, Artificial Sequence
  Synthetic Polypeptide
SVIELTQSPKFMSTSVGDRVNVTYKASQNVGTNVAWFQQKPGQSPKVLIYSASYRYSGVPDRFTGSGSGTDFTLTISNVQSEDLAEYFCQQYHTYPLTFGGGTKLEIKR

SEQ ID NO: 10950 - protein, 108 aa, Artificial Sequence
  Synthetic Polypeptide
DIQMTQSPSSVSASVGDRVTITCRASQSVSSYLNWYQQKPGKAPKLLIYAASSLQSGVPSRFSGSGSGTDFTLTISSLQPEDFATYYCQQSYSTPWTFGQGTKLEIKR

SEQ ID NO: 10951 - protein, 111 aa, Artificial Sequence
  Synthetic Polypeptide
QSALTQPRSVSGSPGQSVTISCTGTSSDVGSYNYVSWYQQSPGKAPKLMIYDVSNRPSGVSNRFSGSKSGNTASLTISGLQSEDEADYYCTSYGSYDIPVIFGGGTKVEIK

SEQ ID NO: 10952 - protein, 108 aa, Artificial Sequence
  Synthetic Polypeptide
DVVMTQSPSSLSASVGDRVTITCKASQSVSSYLNWYQQKPGKAPKLLIYAASSLETGVPSRFSGSGSGTDFTLTISSLQPEDFATYYCQQSYSTPWTFGQGTKVEIKR

SEQ ID NO: 10953 - protein, 108 aa, Artificial Sequence
  Synthetic Polypeptide
DIQMTQSPSSVSASVGDRVTITCRASQSISSYLNWYQQKPGKAPKLLIYAASSLQSGVPSRFSGSGSGTDFTLTISSLQPEDFATYYCQQSYSTPWTFGQGTKVEIKR

SEQ ID NO: 10954 - protein, 107 aa, Artificial Sequence
  Synthetic Polypeptide
DTVLTQSPALAVSPGERVTISCKASESVSTRMHWYRQKPGQQPKLLIYKTSNLASGVPARFSGSGSGTDFTLTIDPVEADDTATYFCQQSWNGPLTFGSGTKLEIKR

SEQ ID NO: 10955 - protein, 114 aa, Artificial Sequence
  Synthetic Polypeptide
DLVMTQSPFSLAVSEGEMVTIKCKSSQSLLSSRHQKNFLAWYRQKPGQSPKLLIYHASTRQSGVPDRFIGSGSGTDFTLTISDVQAEDLADYYCLQHYTSPYTFGAGTKLELKR

SEQ ID NO: 10956 - protein, 109 aa, Artificial Sequence [sequence omitted]

SEQ ID NO: 10957 - protein, 107 aa, Artificial Sequence
  Synthetic Polypeptide
ELQMTQSPSSLSASVGDRVAITCRASQSISSHLNWYQQKPGKAPKLLIYAASSLQSGVPSRFSGSGSGTDFTLTISSLQPEDFATYYCQQSYSTPYTFGQGTKLEIK

SEQ ID NO: 10958 - protein, 108 aa, Artificial Sequence
  Synthetic Polypeptide
DIVMTQSHKFMSTSVGDRVSIICKASQDVGTAVDWYQQKPGQSPKLLIYWASTRHTGVPDRFTGSGSGTDFTLAITNVQSEDLADYFCQQYNSYPLTFGAGTKLEIKR

SEQ ID NO: 10959 - protein, 108 aa, Artificial Sequence
  Synthetic Polypeptide
DIQMTQSPSSLSASVGDRVTITCKASQDVGTAVDWYQQKPGKAPKLLIYWASTRHTGVPSRFSGSGSGTDFTLTISSLQPEDFATYYCQQYNSYPLTFGQGTKVEIKR

SEQ ID NO: 10960 - protein, 110 aa, Artificial Sequence
  Synthetic Polypeptide
DIQMTQSPSSLSASVGDRVTITCKASQDVGTAVDWYQQKPGKAPKLLISWASTRHTGVPSRFSGSGSGTDFTLTISSLQPEDFATYFCQQYNSYPLTFGQGTKVEIKRTV

SEQ ID NO: 10961 - protein, 108 aa, Artificial Sequence; identical to SEQ ID NO: 10959
  Synthetic Polypeptide

SEQ ID NO: 10962 - protein, 108 aa, Artificial Sequence; identical to SEQ ID NO: 10958
  Synthetic Polypeptide

SEQ ID NO: 10963 - protein, 107 aa, Artificial Sequence
  Synthetic Polypeptide
EIVLTQSPATLSLSPGERATLSCSATSSVSYIHWYQQKPGQAPRLLIYSTSNLASGIPARFSGSGSGTDFTLTIGRLEPEDFAVYYCQQRSSSPFTFGQGTKVEIKR

SEQ ID NO: 10964 - protein, 106 aa, Artificial Sequence
  Synthetic Polypeptide
QIVLTQSPAIMSASPGEEVTLTCSATSSVSYIHWFQQRPGTSPKLWIYSTSNLASGVPVRFSGSGYGTSYSLTISRMEAEDAATYYCQQRSSSPFTFGSGTKLEIK

SEQ ID NO: 10965 - protein, 113 aa, Artificial Sequence
  Synthetic Polypeptide
DIVLTQSPASLAVSPGQRATITCRASKSVSTSGYSYMHWYQQKPGQPPKLLIYLASNLESGVPARFSGSGSGTDFTLTINPVEANDTANYYCQHSRELPFTFGGGTKVEIKRT

SEQ ID NO: 10966 - protein, 108 aa, Artificial Sequence
  Synthetic Polypeptide
DIQMTQSPSSLSVSVGDRVTITCKASQNVRTVVAWYQQKPGLAPKTLIYLASNRHTGVPSRFSGSGSGTDFTFTISSLQPEDIATYFCQQHWSYPLTFGQGTKVEVKR

SEQ ID NO: 10967 - protein, 113 aa, Artificial Sequence
  Synthetic Polypeptide
DIQMTQSPSSLSASVGDRVTITCKSSQSLLYSSNQKNYLAWFQQKPGKAPKLLIYWASTRESGVPSRFSGSGSGTDFTLTISSLQPEDFATYFCHQYLSSYTFGQGTKVEIKR

SEQ ID NO: 10968 - protein, 113 aa, Artificial Sequence; identical to SEQ ID NO: 10883
  Synthetic Polypeptide

SEQ ID NO: 10969 - protein, 113 aa, Artificial Sequence; identical to SEQ ID NO: 10967
  Synthetic Polypeptide

SEQ ID NO: 10970 - protein, 108 aa, Artificial Sequence; identical to SEQ ID NO: 10884
  Synthetic Polypeptide

SEQ ID NO: 10971 - protein, 108 aa, Artificial Sequence
  Synthetic Polypeptide
DIQMTQSPSSLSASVGDRVTITCRASQDISSYLNWYQQKPGKAPKLLIYYTSRLHSGVPSRFSGSGSGTDFTLTISSLQPEDFATYYCQQGNTLPYTFGQGTKVEIKR

SEQ ID NO: 10972 - protein, 108 aa, Artificial Sequence
  Synthetic Polypeptide
DIQMTQSPSSLSASVGDRVTITCRASQDISNYLNWYQQKPGKAPKLLIYYTSRLHSGVPSRFSGSGSGTDFTLTISSLQPEDFATYYCQQGNTLPWTFGQGTKVEIKR

SEQ ID NO: 10973 - protein, 5 aa, Artificial Sequence
  Synthetic Polypeptide
GGGGG

SEQ ID NO: 10974 - protein, 5 aa, Artificial Sequence
  Synthetic Polypeptide
GGGGG

SEQ ID NO: 10975 - protein, 5 aa, Artificial Sequence
  Synthetic Polypeptide
GGGGG

SEQ ID NO: 10976 - protein, 5 aa, Artificial Sequence
  Synthetic Polypeptide
GGGGG

SEQ ID NO: 10977 - protein, 5 aa, Artificial Sequence
  Synthetic Polypeptide
GGGGG

SEQ ID NO: 10978 - protein, 125 aa, Artificial Sequence
  Synthetic Polypeptide
GGGGSQVQLQQSGAELVKPGASVKISCKASGYAFSSYWMNWVKQRPGKGLEWIGQIYPGDGDTTYNGKFKGKATLTADKSSSTVYMQLNSLTSEDSAVYFCVRYYYGSSGYFDYWGQGTTLTVSS

SEQ ID NO: 10979 - protein, 120 aa, Artificial Sequence
  Synthetic Polypeptide
ALQLQQSGAELVRPGASVTLSCKASGYTFTDYEMHWVKQTPVHGLEWIGAIDPETGGTAYNQKFEGKAILTADKSSSTAYMELRSLTSEDSPVYYCARRRYYGSSSFDYWGQGTTLTVSS

SEQ ID NO: 10980 - protein, 117 aa, Artificial Sequence
  Synthetic Polypeptide
QVQLVQSGPEVKKPGESVKISCKASGYTFRHYSMNWVKQAPGQGLKWMGRINTESGVPIYADDFKGRFSFTVDTSASTAYLEISSLTSEDTAVYFCSNDYLYSLDFWGQGTTLTVSS

SEQ ID NO: 10981 - protein, 121 aa, Artificial Sequence
  Synthetic Polypeptide
QVQLVQSGAEVKKPGSSVKVSCKASGGTFSNYWMHWVRQAPGQGLEWMGATYRGHSDTYYNQKFKGRVTITADKSTSTAYMELSSLRSEDTAVYYCARGAIYDGYDVLDNWGQGTLVTVSS

SEQ ID NO: 10982 - protein, 120 aa, Artificial Sequence [sequence omitted]

SEQ ID NO: 10983 - protein, 122 aa, Artificial Sequence
  Synthetic Polypeptide
QVQLQQSGSELMMPGASVKISCKATGYTFSNYWIEWVKQRPGHGLEWIGEILPGTGRTIYNEKFKGKATFTADISSNTVQMQLSSLTSEDSAVYYCARRDYYGNFYYAMDYWGQGTSVTVSS

SEQ ID NO: 10984 - protein, 118 aa, Artificial Sequence
  Synthetic Polypeptide
EVQLQQSGPELVKPGASVKMSCKASGYTFTDYYMKWMKQSHGKSLEWIGDINPNNGGTTYNQKFKGKATLTVDKSSSTAYMQLNSLTSEDSAVYYCARDYGYGYFDYWGQGTTLTVSS

SEQ ID NO: 10985 - protein, 120 aa, Artificial Sequence
  Synthetic Polypeptide
QVQLQESGPGLVKPSQTLSLTCTVSGGSISTSGMGVGWIRQHPGKGLEWIGHIWWDDDKRYNPALKSRVTISVDTSKNQFSLKLSSVTAADTAVYYCARMELWSYYFDYWGQGTLVTVSS

SEQ ID NO: 10986 - protein, 120 aa, Artificial Sequence
  Synthetic Polypeptide
EVKLQESGPGLVAPSQSLSVTCTVSGVSLPDYGVSWIRQPPRKGLEWLGVIWGSETTYYNSALKSRLTIIKDNSKSQVFLKMNSLQTDDTAIYYCAKHYYYGGSYAMDYWGQGTSVTVSS

SEQ ID NO: 10987 - protein, 120 aa, Artificial Sequence
  Synthetic Polypeptide
QVQLQESGPGLVKPSETLSLTCTVSGVSLPDYGVSWIRQPPGKGLEWIGVIWGSETTYYNSSLKSRVTISKDNSKNQVSLKLSSVTAADTAVYYCAKHYYYGGSYAMDYWGQGTLVTVSS

SEQ ID NO: 10988 - protein, 122 aa, Artificial Sequence
  Synthetic Polypeptide
EVQLVESGGGLVQPGRSLRLSCAASGFTFNDYAMHWVRQAPGKGLEWVSTISWNSGSIGYADSVKGRFTISRDNAKKSLYLQMNSLRAEDTALYYCAKDIQYGNYYYGMDVWGQGTTVTVSS

SEQ ID NO: 10989 - protein, 119 aa, Artificial Sequence
  Synthetic Polypeptide
QVQLVQSGAEVKKPGSSVKVSCKASGYAFSYSWINWVRQAPGQGLEWMGRIFPGDGDTDYNGKFKGRVTITADKSTSTAYMELSSLRSEDTAVYYCARNVFDGYWLVYWGQGTLVTVSS

SEQ ID NO: 10990 - protein, 120 aa, Artificial Sequence
  Synthetic Polypeptide
EVQLVESGGGLVQPGGSLRLSCAASGYEFSRSWMNWVRQAPGKGLEWVGRIYPGDGDTNYSGKFKGRFTISADTSKNTAYLQMNSLRAEDTAVYYCARDGSSWDWYFDVWGQGTLVTVSS

SEQ ID NO: 10991 - protein, 117 aa, Artificial Sequence
  Synthetic Polypeptide
QVQLVQSGAEVKKPGSSVKVSCKASGGTFSSYAISWVRQAPGQGLEWMGGIIPILGTANYAQKFQGRVTITADESTSTAYMELSSLRSEDTAVYYCARWGGGAFDIWGQGTMVTVSS

SEQ ID NO: 10992 - protein, 112 aa, Artificial Sequence
  Synthetic Polypeptide
QVQLQQWGAGLLKPSETLSLTCAVYGGSFSAYYWSWIRQPPGKGLEWIGDINHGGGTNYNPSLKSRVTISVDTSKNQFSLKLNSVTAADTAVYYCASLTAYWGQGSLVTVSS

SEQ ID NO: 10993 - protein, 117 aa, Artificial Sequence
  Synthetic Polypeptide
QVQLVQSGAEVKKPGASVKVSCKVSGYTFTDYYITWVRQAPGQALEWMGWIYPGSGNTKYSQKFQGRFVFSVDTSASTAYLQLSSLKAEDTAVYYCANYGNYWFAYWGQGTLVTVSS

SEQ ID NO: 10994 - protein, 119 aa, Artificial Sequence
  Synthetic Polypeptide
EVQLVQSGGGLVHPGGSLRLSCAGSGFAFSSSTMHWIRQAPGKGLEWISLIGSGGGIYYGDSVKGRFTISRDNAKNSLYLQMNSLRAEDMAVYYCVRGYFDWVDYFDYWGQGTLVTVSS

SEQ ID NO: 10995 - protein, 120 aa, Artificial Sequence
  Synthetic Polypeptide
EVQLVESGGGLVQPGGSLRLSCAASGFTFSSYGMHWVRQAPGKGLEWVAYITTRSSTIYYADSVKGRFTISRDNAKNSLYLQMNSLRAEDTAVYYCTREPLTGYYAMDYWGQGTSVTVSS

SEQ ID NO: 10996 - protein, 116 aa, Artificial Sequence
  Synthetic Polypeptide
DVQLQESGPGLVKPSQSLSLTCTVTGFSITSDYSWNWIRQFPGNKLEWMGYISYSGHTSYNPSLESRISITRDTSKNQFFLQLNSVTTEDTATYYCTRGNWDVVYWGQGTLVTVSA

SEQ ID NO: 10997 - protein, 118 aa, Artificial Sequence
  Synthetic Polypeptide
QVQLQQPGAEVVKPGASVKMSCKASGYTFTSYYIHWIKQTPGQGLEWVGVIYPGNDDISYNQKFQGKATLTADKSSTTAYMQLSSLTSEDSAVYYCAREVRLRYFDVWGQGTTVTVSS

SEQ ID NO: 10998 - protein, 122 aa, Artificial Sequence
  Synthetic Polypeptide
QVQLVQSGAEVKKPGASVKVSCKASGYTFTNYGMNWVKQAPGQGLKWMGWINTYTGEPTYADDFKGRVTMTSDTSTSTAYLELHNLRSDDTAVYYCARWSWSDGYYVYFDYWGQGTTVTVSS

SEQ ID NO: 10999 - protein, 122 aa, Artificial Sequence
  Synthetic Polypeptide
QIQLVQSGSELKKPGASVKVSCKASGYTFTNYGMNWVRQAPGQGLKWMGWINTNTGEPKYAEEFKGRFALSLDTSVSTAYLQINSLKAEDTAVYFCARGYGNYARGAWLAYWGQGTLVTVSS

SEQ ID NO: 11000 - protein, 121 aa, Artificial Sequence
  Synthetic Polypeptide
QVQLKESGPELEKPGASVKISCKASGYSFTAYSMNWVKQNNGMSLEWIGSIDPYYGDTKYAQKFKGKATLTVDKASSTAYLQLKSLTSEDSAVYYCARRMITTGDWYFDVWGAGTTVTVSS

SEQ ID NO: 11001 - protein, 121 aa, Artificial Sequence; identical to SEQ ID NO: 11000
  Synthetic Polypeptide

SEQ ID NO: 11002 - protein, 118 aa, Artificial Sequence
  Synthetic Polypeptide
QVQLVQSGAEVKKPGASVKVSCKASGYTFTNYGMNWVRQAPGQGLEWMGWINTYTGEPTYADAFKGRFAFSLDTSTSTAYLQINSLRSDDTAVYYCARDYGDYGMDYWGQGTTVTVSS

SEQ ID NO: 11003 - protein, 113 aa, Artificial Sequence
  Synthetic Polypeptide
QVQLQQPGAELVRPGASVKLSCKASGYTFTSYWMNWVKQRPGQGLEWIGMIDPSDSETHYNHIFKDKATLTVDKSSSTAYLQLSSLTSEDSAVYYCARNLYLWGQGTSVTVSS

SEQ ID NO: 11004 - protein, 117 aa, Artificial Sequence [sequence omitted]

SEQ ID NO: 11005 - protein, 123 aa, Artificial Sequence
  Synthetic Polypeptide
EVQLQQSVAELVKPGASVKMSCKVSGYTLTDHTIHWMKQRPEQGLEWIGYIYPRDGITGYNEKFKGKATLTADTSSSTAYMQLNSLTSEDSAVYFCARWGYSYRNYAYYYDYWGQGTTLTVSS

SEQ ID NO: 11006 - protein, 125 aa, Artificial Sequence
  Synthetic Polypeptide
QVQLQESGPGLAKPSETLSLTCTVSGDSITSYYWSWIRQPPGKGLEWIGYIYYSGSTNYNPSLKSRVTISVDTSKNQFSLKLSSVTAADTAVYYCARDQRRIAAAGTHFYGMDVWGQGTTVTVSS

SEQ ID NO: 11007 - protein, 116 aa, Artificial Sequence
  Synthetic Polypeptide
QVQLLESGGGLVQPGGSLRLSCAASGFTFSSYAMSWVRQAPGKGLEWVSVIRSSGSSTYYADSVKGRFTISRDNSKNTLYLQMNSLRAEDTAVYYCARGGGYFDYWGQGTLVTVSS

SEQ ID NO: 11008 - protein, 118 aa, Artificial Sequence
  Synthetic Polypeptide
QVQLLESGGGLVQPGGSLRLSCAASGFTFSSHGMHWVRQAPGKGLEWVSVISGSGSNTGYADSVKGRFTISRDNSKNTLYLQMNSLRAEDTAVYYCARQWGSYAFDSWGQGTLVTVSS

SEQ ID NO: 11009 - protein, 118 aa, Artificial Sequence
  Synthetic Polypeptide
QVQLEESGPELVKPGASVKLSCKASGYTFTEYIIHWVKQRSGQGLEWIGWFYPGSGSIKYNEKFKDKATLTADKSSSTVYMELSGLTSEDSAVYFCARHDGYSYFDYWGQGTTLTVSS

SEQ ID NO: 11010 - protein, 115 aa, Artificial Sequence
  Synthetic Polypeptide
ESGRGLVQPGGSRKLSCAASGFTFSTSGMHWVRQAPEKGLEWVAYISSGSTTIYHADTVKGRFTISRDNPKNTLFLQMTSLRSEDTAMYYCCARSGQFGNYFDYWGQGTTLTVSS

SEQ ID NO: 11011 - protein, 120 aa, Artificial Sequence
  Synthetic Polypeptide
EVQLQQSGPELVKPGASVKMSCKASGYTFTSYFIHWVKQKPGQGLEWIGFINPYNDGSKYNEKFKGKATLTSDKSSSTAYMELSSLTSEDSAVYYCTRDDGYYGYAMDYWGQGTSVTVSS

SEQ ID NO: 11012 - protein, 120 aa, Artificial Sequence
  Synthetic Polypeptide
EVQLQQSGPELVKPGASVKMSCKASGYTFTSYVMHWVKQKPGQGLEWIGYINPYNDGTKYNEKFKGKATLTSDTSSSTAYMELNSLTSEDSAVYFCARPIYFDNDYFDYWGQGTTLKVSS

SEQ ID NO: 11013 - protein, 119 aa, Artificial Sequence
  Synthetic Polypeptide
EVQLVESGGGLVQPGGSLRLSCAASGFDFSRYWMSWVRQAPGKGLEWIGEINPDSSTINYAPSLKDKFIISRDNAKNSLYLQMNSLRAEDTAVYYCARPDGNYWYFDVWGQGTLVTVSS

SEQ ID NO: 11014 - protein, 120 aa, Artificial Sequence
  Synthetic Polypeptide
QVQLQQPGAELVRPGASVKLSCKASGYSFTTYWMNWVKQRPGQGLEWIGMIHPSDSETRLNQKFKDKATLTVDKSSSTAYMQLSSPTSEDSAVYYCARSTMIATRAMDYWGQGTSVTVSS

SEQ ID NO: 11015 - protein, 120 aa, Artificial Sequence
  Synthetic Polypeptide
QVQLVQSGAEVKKPGASVKVSCKVSGYTLTELSIHWVRQAPGKGLEWMGGFDPEENEIVYAQRFQGRVTMTEDTSTDTAYMELSSLRSEDTAVYYCAIVGSFSGIAYRPWGQGTMVTVSS

SEQ ID NO: 11016 - protein, 120 aa, Artificial Sequence
  Synthetic Polypeptide
QVQLVQSGAEVKKPGASVKVSCKVSGYTLTELSIHWVRQAPGKGLEWMGGFDPEENEIVYAQRFQGRVTMTEDTSTDTAYMELSSLRSEDTAVYYCAIVGSFSPLTLGLWGQGTMVTVSS

SEQ ID NO: 11017 - protein, 124 aa, Artificial Sequence
  Synthetic Polypeptide
QITLKESGPTLVKPTQTLTLTCTFSGFSLSTSGMGVGWIRQPPGKALEWLAHIWWDDVKRYSPSLKSRLTITKDTSKNQVVLTMTNMDPVDTATYYCARIVSFDNDVVSAMDYWGQGTLVTVSS

SEQ ID NO: 11018 - protein, 118 aa, Artificial Sequence
  Synthetic Polypeptide
QVQLVQSGAEVKKPGASVKVSCKASGYTFTNYGMNWVRQAPGQGLEWMGWINTYTGEPTYADDFKGRVTMTTDTSTSTAYMELRSLRSDDTAVYYCARIGDSSPSDYWGQGTLVTVSS

SEQ ID NO: 11019 - protein, 119 aa, Artificial Sequence
  Synthetic Polypeptide
QVQLKQSGPGLVQPSQSLSITCTVSGFSLTNYGVHWVRQSPGKGLEWLGVIWSGGNTDYNTPFTSRLSINKDNSKSQVFFKMNSLQSNDTAIYYCARALTYYDYEFAYWGQGTLVTVSA

SEQ ID NO: 11020 - protein, 114 aa, Artificial Sequence
  Synthetic Polypeptide
EIQLVQSGAEVKKPGESLRISCKGSGFNIEDYYIHWVRQMPGKGLEWMGRIDPENDETKYGPIFQGHVTISADTSINTVYLQWSSLKASDTAMYYCAFRGGVYWGQGTTVTVSS

SEQ ID NO: 11021 - protein, 127 aa, Artificial Sequence
  Synthetic Polypeptide
EVQLLESGGGVVQPGRSLRLSCAASGFTFSSYGMHWVRQAPGKGLEWVAVISYDGSNKYYADSVKGRFTISRDNSKNTLYLQMNSLRAEDTAVYYCAKDMGWGSGWRPYYYYGMDVWGQGTTVTVSS

SEQ ID NO: 11022 - protein, 120 aa, Artificial Sequence
  Synthetic Polypeptide
EVQLLEQSGAELVRPGTSVKISCKASGYAFTNYWLGWVKQRPGHGLEWIGDIFPGSGNIHYNEKFKGKATLTADKSSSTAYMQLSSLTFEDSAVYFCARLRNWDEPMDYWGQGTTVTVSS

SEQ ID NO: 11023 - protein, 124 aa, Artificial Sequence
  Synthetic Polypeptide
VHEVQLVQSGAEVKKPGSSVKVSCKASGGTFSSYAISWVRQAPGQGLEWMGGIIPIFGTANYAQKFQGRVTITADKSTSTAYMELSSLRSEDTAVYYCATFALFGFREQAFDIWGQGTTVTVSS

SEQ ID NO: 11024 - protein, 122 aa, Artificial Sequence [sequence omitted]

SEQ ID NO: 11025 - protein, 118 aa, Artificial Sequence
  Synthetic Polypeptide
QVQLVQSGAEVVKPGASVKISCKASGYTFTGYFMNWVKQSPGQSLEWIGRIHPYDGDTFYNQKFQGKATLTVDKSSNTAHMELLSLTSEDFAVYYCTRYDGSRAMDYWGQGTTVTVSS

SEQ ID NO: 11026 - protein, 113 aa, Artificial Sequence
  Synthetic Polypeptide
EVQLVQSGAEVEKPGASVKISCKASGSSFTGYNMNWVRQNIGKSLEWIGAIDPYYGGTSYNQKFKGRATLTVDKSTSTAYMHLKSLRSEDTAVYYCVSGMEYWGQGTSVTVSS

SEQ ID NO: 11027 - protein, 121 aa, Artificial Sequence
  Synthetic Polypeptide
QVQLVESGPGVVQPGRSLRISCAVSGFSVTNYGVHWVRQPPGKGLEWLGVIWAGGITNYNSAFMSRLTISKDNSKNTVYLQMNSLRAEDTAMYYCASRGGHYGYALDYWGQGTLVTVSSTR

SEQ ID NO: 11028 - protein, 119 aa, Artificial Sequence
  Synthetic Polypeptide
EVTLVESGGDFVKPGGSLKVSCAASGFAFSHYAMSWVRQTPAKRLEWVAYISSGGSGTYYSDSVKGRFTISRDNAKNTLYLQMRSLRSEDSAMYFCTRVKLGTYYFDSWGQGTTLTVSS

SEQ ID NO: 11029 - protein, 118 aa, Artificial Sequence
  Synthetic Polypeptide
EQLKESGGGLFKPTDTLTLTCTVSGFSLSYYGVNWVRQAPGNGLEWIGTIGGSGDTYYASWAKSRSTIIRNTNENTVTLKMTSLTAADTATYFCVRYANIGYEYFNVWGPGTLVTVSS

SEQ ID NO: 11030 - protein, 121 aa, Artificial Sequence
  Synthetic Polypeptide
EVQLVESGGGLVQPGESLRLSCVASGFTFSRYKMNWVRQAPGKGLEWVSYISRSGRDIYYADSVKGRFTISRDNAKNSLYLQMNSLRDEDTAVYYCAGTVTTYYYFGMDVWGHGTTVTVSS

SEQ ID NO: 11031 - protein, 116 aa, Artificial Sequence
  Synthetic Polypeptide
EVQLVESGGGLIQPGGSLRLSCAASGFTFSNYAMNWVRQAPGKGLEWVSTINGRGSSTIYADSVKGRFTISRDNSKNTLYLQMNSLRAEDTATYYCARYISRGLGDSWGQGTLVTV

SEQ ID NO: 11032 - protein, 117 aa, Artificial Sequence
  Synthetic Polypeptide
EVQLVESGGGLVKPGGSLRLSCAASGFTFSDYYMSWIRQAPGKGLEWVSYISSSGSTIYYADSVKGRFTISRDNAKNSLYLQMNSLRAEDTAVYYCARGYGKAYDQWGQGTLVTVSS

SEQ ID NO: 11033 - protein, 120 aa, Artificial Sequence
  Synthetic Polypeptide
EVQLVESGGGLVQPGGSLRLSCAASGFNIKDTYIHWVRQAPGKGLEWVARIYPTNGYTRYADSVKGRFTISADTSKNTAYLQMNSLRAEDTAVYYCSRWGGDGFYAMDVWGQGTLVTVSS

SEQ ID NO: 11034 - protein, 135 aa, Artificial Sequence
  Synthetic Polypeptide
QPQLQESGPTLVEASETLSLTCAVSGDSTAACNSFWGWVRQPPGKGLEWVGSLSHCASYWNRGWTYHNPSLKSRLTLALDTPKNLVFLKLNSVTAADTATYYCARFGGEVLRYTDWPKPAWVDLWGRGTLVTVSS

SEQ ID NO: 11035 - protein, 128 aa, Artificial Sequence
  Synthetic Polypeptide
LEQSGAEVKKPGSSVQVSCKASGGTFSMYGFNWVRQAPGHGLEWMGGIIPIFGTSNYAQKFRGRVTFTADQATSTAYMELTNLRSDDTAVYYCARDFGPDWEDGDSYDGSGRGFFDFWGQGTLVTVSS

SEQ ID NO: 11036 - protein, 118 aa, Artificial Sequence
  Synthetic Polypeptide
EVQLLESGGGLVQPGGSLRLSCAASGFTFSWYSMTWVRQAPGKGLEWVSSIVPWGDFTQYADSVKGRFTISRDNSKNTLYLQMNSLRAEDTAVYYCAKGPGWGSFDLWGRGTLVTVSS

SEQ ID NO: 11037 - protein, 116 aa, Artificial Sequence
  Synthetic Polypeptide
EVQLVESGGGLVQPGGSLRLSCAASGFSLTKYGVHWVRQAPGKGLEWVGVKWAGGSTDYNSALMSRFTISKDNAKNSLYLQMNSLRAEDTAVYYCARDHRDAMDYWGQGTLVTVSS

SEQ ID NO: 11038 - protein, 122 aa, Artificial Sequence
  Synthetic Polypeptide
EVQLVESGGGLVQPGGSLRLSCAASGFTFSRNGMSWVRQAPGKGLEWVATVSSGGSYIYYADSVKGRFTISRDNAKNSLYLQMNSLRAEDTAVYYCARQGTTALATRFFDVWGQGTLVTVSS

SEQ ID NO: 11039 - protein, 117 aa, Artificial Sequence
  Synthetic Polypeptide
EVQLVQSGGGLVQSGGSLRLSCRASGYTFTRYWMLWVRQRPGKGLEWVAEINPRNDRTNYNEKFKTRFTISVDRSKNTLYLQMDSLRAEDTAVYFCALGGGYAMDYWGQGTLVTVSS

SEQ ID NO: 11040 - protein, 118 aa, Artificial Sequence
  Synthetic Polypeptide
QVQLVQSGAELVKPGASVKMSCKASGYIFTNYNIHWVKKSPGQGLEWIGAIYPGNGDAPYSQKFQDRATLTADTSSSTTYMELSSLTSEDSAVYYCVRANWDVAFAYWGQGTLVSVSS

SEQ ID NO: 11041 - protein, 119 aa, Artificial Sequence
  Synthetic Polypeptide
QVQLQQSGASVKVSCKASELVRPGTGYAFTNYLIEWVKQRPGQGLEWIGVINPGSGGTNYNEKFKGKATLTADKSSSTAYMQLSSLTSDDSAVYFCARYRSYDWYFDVWGAGTTVTVSS

SEQ ID NO: 11042 - protein, 119 aa, Artificial Sequence
  Synthetic Polypeptide
QVQLKESGPGLVAPSQSLSITCTISGFSLTSYGVHWVRQPPGKGLEWLVVIWSDGSTTYNSALKSRLSISKDNSKSQVFLKMNSLQTDDTAIYYCASHYGSTLAFASWGHGTLVTVSAA

SEQ ID NO: 11043 - protein, 127 aa, Artificial Sequence
  Synthetic Polypeptide
EVQLEESGGGLVQPGGSMKLSCVASGFTFSNYWMNWVRQSPEKGLEWVAEIRFKSHNYATHFAESVKGRFTISRDDSKSSVYLQMNNLRAEDTGIYYCTRRIGNSDYDWWYFDVWGAGTSVTVSSAS

SEQ ID NO: 11044 - protein, 118 aa, Artificial Sequence
  Synthetic Polypeptide
DVQLQESGPGLVKPSQSLSLTCTVTGYSITIDYTWNWIRQFPGNKLEWMGYITYSGSTDYNPSLKSRSSITRDTSMNQFFLQLNSVTTEDTATYYCARLGRRYALDYWGQGTSVTVSS

SEQ ID NO: 11045 - protein, 118 aa, Artificial Sequence
  Synthetic Polypeptide
DVQLQESGPGLVKPSQSLSLTCTVTGYSITSDYTWNWIRQFPGNKLEWMGYITYSGSTSYNPSLKSRNSITRDTSKNQFFLQLNSVTTEDTATYYCARLGRRYTMDYWGQGTSVTVSS

SEQ ID NO: 11046 - protein, 118 aa, Artificial Sequence; identical to SEQ ID NO: 11045
  Synthetic Polypeptide

SEQ ID NO: 11047 - protein, 120 aa, Artificial Sequence
  Synthetic Polypeptide
EVQLVESGGGLVQPKGSLKLSCAASGFSFNTYAMNWVRQAPGKGLEWIAHIRSKSNNFATYYADSVKDRFSISRDASENILFLQMNNLKTEDTAMYYCVRQGGDFPMDYWGQGTSVTVSS

SEQ ID NO: 11048 - protein, 120 aa, Artificial Sequence
  Synthetic Polypeptide
QVQLVESGGGVVQPGRSLRLSCAASGFTFSSYAMHWVRQAPGKGLEWVAVISYDGSNKYYADSVKGRFTISRDNSKNTLYLQMNSLRAEDTAVYYCARAHNSSSWSFDYWGQGTLVTVSS

SEQ ID NO: 11049 - protein, 124 aa, Artificial Sequence
  Synthetic Polypeptide
EVRLQQSGPDLIKPGASVKMSCKASGYTFTGYVMHWVKQRPGQGLEWIGFINPYNDDIQSNERFRGKATLTSDKSSTTAYMELSSLTSEDSAVYYCARGAGYNFDGAYRFFDFWGQGTTLTVSS

SEQ ID NO: 11050 - protein, 119 aa, Artificial Sequence
  Synthetic Polypeptide
QVQLVESGAEVKKPGASVKVSCKASGYTFTGYYMHWVRQAPGQGLEWMGRINPNSGGTNYAQKFQGRVTMTRDTSISTAYMELSRLRSDDTAVYYCASPRGRGSAFDIWGQGTLVTVSS

SEQ ID NO: 11051 - protein, 118 aa, Artificial Sequence
  Synthetic Polypeptide
EVQLVESGGGVVQPGGSLRLSCAASGFTFSSYAMSWVRQAPGKGLEWVSAISGSGGSTYYADSVKGRFSISRDNSKNTLYLQMNSLRAEDTAVYYCARTRSSGAFDIWGQGTLVTVSS

SEQ ID NO: 11052 - protein, 119 aa, Artificial Sequence
  Synthetic Polypeptide
EVQLQQSGPELVKPGASVKISCKASGYSFTGYFMNWVKQSHGKSLEYIGRFNPYNGETLYNQKFKGKATLTVDKSSSTVHMELLSVTSEDSAVYYCGRSGNDDAMDYWGQGTSVTVSSA

SEQ ID NO: 11053 - protein, 116 aa, Artificial Sequence
  Synthetic Polypeptide
QVQLQQSDAELVKPGASVKISCKASGYTFTDHAIHWVKQKPEQGLEWIGYFSPGNGDIKYNEKFKGKATLTADKSSSTAYMQLNSLTSEDSAVYFCKRSYGNYDYWGQGTTLTVSS

SEQ ID NO: 11054 - protein, 116 aa, Artificial Sequence
  Synthetic Polypeptide
QVQLVQSGAEVKKTGSSVKVSCKASGYTFTDHAIHVWRQAPGQALEWMGHFSPGNTDIKYNDKFKGRVTLTVDRSMSTAYMELSSLRSEDTAMYYCKTSTFFFDYWGQGTMVTVSS

SEQ ID NO: 11055 - protein, 121 aa, Artificial Sequence
  Synthetic Polypeptide
QIQLVQSGHEVKKPGASVKVSCKASGYTFTNYGMNWVRQAPGQGLEWMGWINTKTGEPTYAEEFKGRFVFSLETSASTAYLQISSLKAEDTAMYFCGRGGYGSSYWYFDVWGQGTTVTVSS

SEQ ID NO: 11056 - protein, 121 aa, Artificial Sequence
  Synthetic Polypeptide
QMQLVQSGAEVKEPGESLRISCKGSGYSFTNFWISWVRQMPGKGLEWMGRVDPGYSYSTYSPSFQGHVTISADKSTSTAYLQWNSLKASDTAMYYCARVQYSGYYDWFDPWGQGTLVTVSS

SEQ ID NO: 11057 - protein, 118 aa, Artificial Sequence
  Synthetic Polypeptide
QVQLVQSGAEVKKPGESLKISCKGSGYNFSNKWIGWVRQLPGRGLEWIAIIYPGYSDITYSPSFQGRVTISADTSINTAYLHWHSLKASDTAMYYCVRHTALAGFDYWGLGTLVTVSS

SEQ ID NO: 11058 - protein, 121 aa, Artificial Sequence
  Synthetic Polypeptide
EVQLVQSGGGVMRPGGSLRLSCAASGFTFDDYGMSWVRQAPGKGLEWVSGINWNGGSTGYADSVRGRFTISRDNAKNSLYLQMNSLRAEDTALYYCARERGYGYHDPHDYWGQGTLVTVSS

SEQ ID NO: 11059 - protein, 118 aa, Artificial Sequence
  Synthetic Polypeptide
QIQLVQSGPELKKPGETVKISCKASGYIFTNYGMNWVKQAPGKSFKWMGWINTYTGESTYSADFKGRFAFSLETSASTAYLHINDLKNEDTATYFCARSGGYDPMDYWGQGTSVTVSS

SEQ ID NO: 11060 - protein, 119 aa, Artificial Sequence
  Synthetic Polypeptide
QVQLVESGGGVVQPGRSLRLSCAASGFTFSSYDMHWVRQAPGKGLEWVAVISYDGTNEYYADSVKGRFTISRDTSKNTLYLQMNSLRAEDTAVYYCARERYFDWSFDYWGQGTLVSVSS

SEQ ID NO: 11061 - protein, 118 aa, Artificial Sequence
  Synthetic Polypeptide
EVQLVQSGAEVKKPGASVKVSCKASGYTFTSYAMHWVRQAPGQRLEWMGWINAGNGNTKYSQKFQGRVTITRDTSASTAYMELSSLRSEDTAVYYCARDISYGSFDYWGQGTLVTVSS

SEQ ID NO: 11062 - protein, 116 aa, Artificial Sequence
  Synthetic Polypeptide
EVQLVQSGAEVKKPGASVKVSCKASGYTFTNFWIHWVRQAPGQGLEWIGEIDPSDSYTNYNQKFKGRVTITRDTSTSTAYLELSSLRSEDTAVYYCAREITTVDYWGQGTLVTVSS

SEQ ID NO: 11063 - protein, 121 aa, Artificial Sequence
  Synthetic Polypeptide
EVQLVQSGAEVKKPGASVKVSCKASGYTFTSYWIGWVRQAPGQGLEWIGDIYPGGGYTNYNEKFKGRVTITRDTSTSTAYLELSSLRSEDTAVYYCARLDGSSYRGAMDSWGQGTLVTVSS

SEQ ID NO: 11064 - protein, 118 aa, Artificial Sequence
  Synthetic Polypeptide
EVQLVESGGGLAKPGGSLRLSCAASGFRFTFNNYYMDWVRQAPGQGLEWVSRISSSGDPTWYADSVKGRFTISRENAKNTLFLQMNSLRAEDTAVYYCASLTTGSDSWGQGVLVTVSS

SEQ ID NO: 11065 - protein, 120 aa, Artificial Sequence
  Synthetic Polypeptide
EVQLLESGGGLVQPGGSLRLSCAASGFTFSRYAMNWVRQAPGKGLEWVSGISGSGGRTYYADSVKGRFTISRDNSKNTLYLQMNSLRAEDTAVYYCAKDRDFWSGPFDYWGQGTLVTVSS

SEQ ID NO: 11066 - protein, 124 aa, Artificial Sequence
  Synthetic Polypeptide
QVQLQESGPGLVKPSETLSLTCTVSGYTITSGYDWSWIRQPPGKGLEWIGYINYGGSTNYKPSLGSRVTISVDTSKNQFSLKLSSVTAADTAVYYCARYNEYKSYIYDWYFDFWGQGTLVTVSS

SEQ ID NO: 11067 - protein, 124 aa, Artificial Sequence
  Synthetic Polypeptide
EVQLVESGGGLVKPGGSLRLSCAASGFTFSNAWMSWVRQAPGKGLEWVGFIRSKAYGGTTEYAASVKGRFTISRDDSKSIAYLQMNNLKTEDTAVYYCARDGLYSSSWYDSDYWGQGTLVTVSS

SEQ ID NO: 11068 - protein, 126 aa, Artificial Sequence
  Synthetic Polypeptide
QMQLVQSGGGLVQPGRSLRLSCAASGFTFDDYAMHWVRQAPGKGLEWVSGISWNSGSIGYADSVKGRFTISRDNAKNSLYLQMNSLRAEDTALYYCAKDIHSGSYYGLLYYAMDVWGQGTTVTVSS

SEQ ID NO: 11069 - protein, 125 aa, Artificial Sequence
  Synthetic Polypeptide
LEMAQVQLVQSGAEVKKPGSSVKVSCKASGGTFSSYAISWVRQAPGQGLEWMGRIIPILGIANYAQKFQGRVTITADKSTSTAYMELSSLRSEDTAVYYCARGGYYSHDMWSEDWGQGTLVTVSS

SEQ ID NO: 11070 - protein, 117 aa, Artificial Sequence
  Synthetic Polypeptide
QVQLVQSGSELKKPGESVKISCKASGYTFTDYSINWVKQAPGQGLKWMGWINTETREPAYAYDFRGRFVFSLDTSASTAYLQISSLKAEDTAVYFCALDYSYAMDYWGQGTLVTVSS

SEQ ID NO: 11071 - protein, 117 aa, Artificial Sequence
  Synthetic Polypeptide
QVQLVQSGSELKKPGESVKISCKASGYTFTHYSMNWVRQAPGQGLEWMGRINTETGEPLYADDFKGRFVFSLDTSASTAYLQISSLKAEDTAVYYCSNDYLYSLDYWGQGTLVTVSS

SEQ ID NO: 11072 - protein, 120 aa, Artificial Sequence
  Synthetic Polypeptide
EVQLVQSGAELKKPGASVKVSCKASGYTFTDYYMKWVRQAPGQGLEWIGDIIPSNGATFYNQKFKGRVTITVDKSTSTAYMELSSLRSEDTAVYYCARSHLLRASWFAYWGQGTLVTVSS

SEQ ID NO: 11073 - protein, 120 aa, Artificial Sequence
  Synthetic Polypeptide
QVQLVQSGAELKKPGASVKVSCKASGYTFTDYYMKWVRQAPGQGLEWIGDIIPSNGATFYNQKFKGRVTITVDKSTSTAYMELSSLRSEDTAVYYCARSHLLRASWFAYWGQGTLVTVSS

SEQ ID NO: 11074 - protein, 115 aa, Artificial Sequence
  Synthetic Polypeptide
QVQLQQPGAELVRPGASVKLSCKASGYTFTSYWMNWVKQRPDQGLEWIGRIDPYDSETHYNQKFKDKAILTVDKSSSTAYMQLSSLTSEDSAVYYCARGNWDDYWGQGTTLTVSS

SEQ ID NO: 11075 - protein, 119 aa, Artificial Sequence
  Synthetic Polypeptide
EVQLVESGGGLVQPGRSLKLSCAASGFTFSDYNMAWVRQAPKKGLEWVATILYDGGRTYYRGSVKGRFTISRDNAKSTLYLRMDSLRSEDTATYYCATHSRGTDYFDYWGQGVMVTVSS

SEQ ID NO: 11076 - protein, 121 aa, Artificial Sequence
  Synthetic Polypeptide
EVKLQESGPSLVQSSQTLSLTCTVSGFSLTSYHIHWVRQTPGKGLEWMGVMWSDGDTSYNSALKSRLSISRDTSQSQVFLKMNSLQTEDTATYYCARGYYSSYLYLWFAYWGQGTLVTVSS

SEQ ID NO: 11077 - protein, 125 aa, Artificial Sequence
  Synthetic Polypeptide
QVQLQQSGPELRRPGSSVRLSCKASGYRIKDFLIHWIKNRPEHGLEWIGWIDPEDGETKYAQKFQTKATLTADTSSNTAYMQLSSLTSEDTATYFCARWGDVYYGLMRGHVMDAWGQGTSVTVSS

SEQ ID NO: 11078 - protein, 121 aa, Artificial Sequence
  Synthetic Polypeptide
EVQLVESGGGLVQPGGSLRLSCAASGFTFSSSWMNWVRQAPGKGLEWVGRIYPGDGDTNYNGKFKGRFTISRDDSKNSLYLQMNSLKTEDTAVYYCARSGFITTVLDFDYWGQGTLVTVSS

SEQ ID NO: 11079 - protein, 121 aa, Artificial Sequence
  Synthetic Polypeptide
EVQLVQSGAEVKKPGESLKISCKGSGYSFSSSWIGWVRQMPGKGLEWMGIIYPDDSDTRYSPSFQGQVTISADKSIRTAYLQWSSLKASDTAMYYCARHVTMIWGVIIDFWGQGTLVTVSS

SEQ ID NO: 11080 - protein, 121 aa, Artificial Sequence
  Synthetic Polypeptide
EVQLVESGGGLVKPGGSLKLSCAASGYTFTSYVMHWVRQAPGKGLEWIGYINPYNDGTKYNEKFQGRVTISSDKSISTAYMELSSLRSEDTAMYYCARGTYYYGTRVFDYWGQGTLVTVSS

SEQ ID NO: 11081 - protein, 121 aa, Artificial Sequence
  Synthetic Polypeptide
QVQLQQPGAELVKPGASVKMSCKASGYAFSSYWINWMKQKPGQGLEWIGQIYPGDGDTNYNGKFKGRATLTADTSSSTAYMQLSSLTSEDSAVYFCARSITTVVGCAMDYWGQGTSVTVSS

SEQ ID NO: 11082 - protein, 120 aa, Artificial Sequence
  Synthetic Polypeptide
QVQLVQSGAEVKKPGASVKVSCKASGYTFTSYNMHWVRQAPGQRLEWMGGIYPGNGDTSYNQKFKGRVTITRDTSASTAYMELSSLRSEDTAVYYCARYDYNYAMDYWGQGTLVTVSSAS

SEQ ID NO: 11083 - protein, 122 aa, Artificial Sequence
  Synthetic Polypeptide
EVQLVESGGGLVQPDRSLRLSCAASGFTFHDYAMHWVRQAPGKGLEWVSTISWNSGTIGYADSVKGRFTISRDNAKNSLYLQMNSLRAEDTALYYCAKDIQYGNYYYGMDVWGQGTTVTVSS

SEQ ID NO: 11084 - protein, 117 aa, Artificial Sequence
  Synthetic Polypeptide
QVQLVQSGAEVKKPGASVKVSCKASGYTFTNYDINWVRQAPGQGLEWIGWIYPGDGSTKYNEKFKAKATLTADTSTSTAYMELRSLRSDDTAVYYCASGYEDAMDYWGQGTTVTVSS

SEQ ID NO: 11085 - protein, 114 aa, Artificial Sequence
  Synthetic Polypeptide
QVQLVQSGAEVKKPGASVKVSCKASGYTFKDTYIHWVRQAPGQGLEWMGRIDPANGNTKYDPKFQGRVTMTRDTSISTAYMELSRLRSDDTAVYYCARRGGVDWGQGTLVTVSS

SEQ ID NO: 11086 - protein, 121 aa, Artificial Sequence
  Synthetic Polypeptide
EVQLVQSGAEVKKPGASVKVSCKASGYTFTDYYLDVVVRQAPGQGLEWIGRVNPYNGGTIYNQKFKGRVTLTRDTSTSTAYLELSSLRSEDTAVYYCARDHYRYDPLLDYWGQGTLVTVSS

SEQ ID NO: 11087 - protein, 122 aa, Artificial Sequence
  Synthetic Polypeptide
EVQLVQSGAEVKKPGASVKVSCKASGYSFTDYYMHWVRQAPGQGLEWIGRINPYNGAAFYSQNFKDRVTLTVDTSTSTAYLELSSLRSEDTAVYYCAIERGADLEGYAMDYWGQGTLVTVSS

SEQ ID NO: 11088 - protein, 123 aa, Artificial Sequence
  Synthetic Polypeptide
QVQLQESGPGLVKPSETLSLTCAVSGYSITSAYYWNWIRQPPGKGLEWIGYISYDGRNNYNPSLKNRITINPDTSKNQFSLQLNSVTPEDTAVYYCAREGDYDVGNYYAMDYWGQGTLVTVSS

SEQ ID NO: 11089 - protein, 123 aa, Artificial Sequence
  Synthetic Polypeptide
EVQLVESGGGLVQPGRSLRLSCAASGYSITSAYYWNWVRQAPGKGLEWVSYISYDGRNNYNPSLKNRFTISRDNAKKSLYLQMNSLRAEDTALYYCAKEGDYDVGNYYAMDYWGQGTTVTVSS

SEQ ID NO: 11090 - protein, 118 aa, Artificial Sequence
  Synthetic Polypeptide
GVKLDETGGGLVQPGGAMKLSCVTSGFTFGHYWMNWVRQSPEKGLEWVAQFRNKPYNYETYYSDSVKGRFTISRDDSKSSVYLQMNNLRVEDTGIYYCTGASYGMEYLGQGTSVTVST

SEQ ID NO: 11091 - protein, 126 aa, Artificial Sequence [sequence omitted]

SEQ ID NO: 11092 - protein, 114 aa, Artificial Sequence
  Synthetic Polypeptide
EVQLVETGGNLVQPGASLRLSCAASGFSFSGTAMHWVRQAPGKGLEWVSTISSTGRSTYYRDSVKGRFTISRDNSKNTLYLQMNSLRGEDTAVYYCARVSFDYWGQGTLVTVSS

SEQ ID NO: 11093 - protein, 118 aa, Artificial Sequence
  Synthetic Polypeptide
EVQLVESGGAFVQPGGSLRLSCAASGFTFSSYAMTWVRQAPGKGLEWVSTISGRGRSTFYADSVKGRFTISRDNSKNTLYLQMNSLRAEDTAVYYCARYYHAGAFDLWGQGTLVTVSS

SEQ ID NO: 11094 - protein, 123 aa, Artificial Sequence
  Synthetic Polypeptide
QVQLVQSGGGVVQPGGSLRVSCAASGVTLSDYGMHWVRQAPGKGLEWVAFIRNDGSDKYYADSVKGRFTISRDNSEKTVSLQMSSLRAEDTAVYYCAKNGESGPLDYWYLDLWGRGTLVTVSS

SEQ ID NO: 11095 - protein, 114 aa, Artificial Sequence
  Synthetic Polypeptide
QVKLQQSGPSLVKPGASVKMSCKASGYTFTDFYMKWVKQSHGKSLEWIGDINPNIGDTFYNQKFKGKATLTVDKSSSTAYMQLNSLTSEDSAVYFCSVGYFDVWGAGTTVTVSS

SEQ ID NO: 11096 - protein, 130 aa, Artificial Sequence
  Synthetic Polypeptide
EVQLVQSGAEVKKPGESLKISCKGSGYSFTSYWIGWVRQMPGKGLEWMGIIYPGDSDTRYSPSFQGQVTISADKSISTAYLQWSSLKASDTAMYYCARQVWGWQGGMYPRSNWWYNLDSWGQGTLVTVSS

SEQ ID NO: 11097 - protein, 120 aa, Artificial Sequence
  Synthetic Polypeptide
EVQLEQSGPELVKPGASVKMSCKASGYTFTNYYMKWVKQSHGKSLEWIGDLNPNNGDTFYNQKFKGKATLTVDKSSNTAYMQLNSLTSEDSAVYYCARTGRYEENAMDYWGQGTSVTVSS

SEQ ID NO: 11098 - protein, 117 aa, Artificial Sequence; identical to SEQ ID NO: 11071
  Synthetic Polypeptide

SEQ ID NO: 11099 - protein, 117 aa, Artificial Sequence; identical to SEQ ID NO: 10980
  Synthetic Polypeptide

SEQ ID NO: 11100 - protein, 118 aa, Artificial Sequence
  Synthetic Polypeptide
QVQLQESGPGLVKPSQTLSLTCTVSGYSITSDYTWNWIRQPPGNGLEWIGYITYSGSTSYNPSLKSRVLISVDTSKNQVSLKLSSVTAADTAVYYCARLGRRYTMDYWGQGTTVTVSS

SEQ ID NO: 11101 - protein, 124 aa, Artificial Sequence
  Synthetic Polypeptide
EVQLVESGGGLVQPGRSLRLSCAASGFTFDDYAMHWVRQAPGKGLEWVSGISWNSGSIGYADSVKGRFTISRDNAKNSLYLQMNSLRAEDTALYYCAKDKGGGYYDFWSGSDYWGQGTLVTVSS

SEQ ID NO: 11102 - protein, 127 aa, Artificial Sequence
  Synthetic Polypeptide
EVQLQQSGPGLVKPSQTLSLTCAISGDSVLSNSDTWNWIRQSPSRGLEWLGRTYHRSTWYDDYASSVRGRVSINVDTSKNQYSLQLNAVTPEDTGVYYCARDRLQDGNSWSDAFDVWGQGTMVTVSS

SEQ ID NO: 11103 - protein, 122 aa, Artificial Sequence
  Synthetic Polypeptide
QVQLVQSGAEVKKPGASVKVSCKASGYTFTSYDINWVRQATGQGLEWMGWMNPNSGNTGYAQKFQGRVTMTRNTSISTAYMELSSLRSEDTAVYYCARGDSNYWSYYGMDVWGQGTLVTVSS

SEQ ID NO: 11104 - protein, 127 aa, Artificial Sequence
  Synthetic Polypeptide
EVQLQQSGPGLVKPSQTLSLTCAISGDSVSSNSAAWNWIRQSPSRGLEWLGRTYYRSKWYSDYAVSVKSRITINPDTSKNQFSLQLNSVTPEDTAVYYCARDPYDFWSGYPDAFDIWGQGTMVTVSS

SEQ ID NO: 11105 - protein, 127 aa, Artificial Sequence
  Synthetic Polypeptide
EVQLQQSGPGLVKPSQTLSLTCAISGDSMLSNSDTWNWIRQSPSRGLEWLGRTYHRSTWYDDYASSVRGRVSINVDTSKNQYSLQLNAVTPEDTGVYYCARVRLQDGNSWSDAFDVWGQGTMVTVSS

SEQ ID NO: 11106 - protein, 120 aa, Artificial Sequence
  Synthetic Polypeptide
EVQLVESGGGLVQPGGSLRLSCAASGFSFNTYAMNWVRQAPGKGLEWVSHIRSKSNNFATYYADSVKDRFTISRDNAKNSLYLQMNSLRAEDTAVYYCARQGGDFPMDYWGQGTLVTVSS

SEQ ID NO: 11107 - protein, 118 aa, Artificial Sequence
  Synthetic Polypeptide
QVQLQESGPGLVKPSQTLSLTCTVSGYSITIDYTWNWIRQPPGKGLEWIGYITYSGSTDYNPSLKSRVLISVDTSKNQVSLKLSSVTAADTAVYYCARLGRRYALDYWGQGTTVTVSS

SEQ ID NO: 11108 - protein, 122 aa, Artificial Sequence
  Synthetic Polypeptide
EVQLVESGGGLVKPGGSLRLSCAASGFTFSNFEMNWVRQAPGKGLEWVSGISSNGRYINYADSVKGRFTISRDNAKNSLYLQMNSLRAEDTAVYYCARVVDFDQDYNGFDYWGQGTLVTVSS

SEQ ID NO: 11109 - protein, 120 aa, Artificial Sequence
  Synthetic Polypeptide
EVQLVESGGGLVKPGGSLRLSCAASGFTFSTYGMSWVRQAPGKGLEWVAYINNGSGYIYYADSVKGRFTISRDNAKNSLYLQMNSLRAEDTAVYYCARGQWWSGGDFDYWGQGTLVTVSS

SEQ ID NO: 11110 - protein, 122 aa, Artificial Sequence
  Synthetic Polypeptide
EVQLVESGGGLVKPGGSLKLSCAASGFAFSIYDMSWVRQTPEKRLEWVAYISSGGGTYYPDTVKGRFTISRDNAKNTLYLQMSSLKSEDTAMYYCARHSGYGTHWGVLFAYWGQGTLVTVSA

SEQ ID NO: 11111 - protein, 124 aa, Artificial Sequence
  Synthetic Polypeptide
EVQLLESGGGLVQPGGSLRLSCAASGYSITSDYAWNWVRQAPGKGLEWVSYISNSGSTSYNPSLKSRFTISRDNSKNTLYLQMNSLRAEDTAVYYCAKERNYDYDDYYYAMDYWGQGTLVTVSS

SEQ ID NO: 11112 - protein, 120 aa, Artificial Sequence
  Synthetic Polypeptide
QVQLVQSGAEVKKPGASVKVSCKASGLTIEDYYMHWVRQAPGQGLEWMGWIDPENGDTEYGPKFQGRVTMTRDTSINTAYMELSRLRSDDTAVYYCAVHNAHYGTWFAYWGQGTLVTVSS

SEQ ID NO: 11113 - protein, 116 aa, Artificial Sequence
  Synthetic Polypeptide
EVQLVESGGGLVQPGGSLRLSCAASGFSLTNYGVHWVRQAPGKGLEWVSVIWSGGSTDYNAAFISRFTISADTSKNTAYLQMNSLRAEDTAVYYCARELIHAMDNWGQGTLVTVSS

SEQ ID NO: 11114 - protein, 119 aa, Artificial Sequence
  Synthetic Polypeptide
EVQLVESGAEVKKPGASVKVSCKASGYTFTSYWIHWVRQAPGQGLEWMGENDPSNGRTNYNEKFKNRVTLTVDTSISTAYMELSRLRSDDTAVYYCARGPNYFYSMDYWGQGTMVTVSS

SEQ ID NO: 11115 - protein, 119 aa, Artificial Sequence
  Synthetic Polypeptide
QVQLVQSGAEVKKPGASVKVSCKASGYTFTGSWMNWVRQAPGQGLEWIGRIYPGDGETNYNGKFKDRVTITADKSTSTAYMELSSLRSEDTAVYYCARIYGNNVYFDVWGQGTTVTVSS

SEQ ID NO: 11116 - protein, 121 aa, Artificial Sequence
  Synthetic Polypeptide
QEQLVESGGGLVQPGGSLRLSCAASGFTFSDYYMSWIRQAPGKGLEWVATIYPSSGKTYYADSAKGRLTISSDNAKDSLYLQMNSLRAEDTAVYYCTRDSYADDAALFDIWGQGTTVTVSS

SEQ ID NO: 11117 - protein, 117 aa, Artificial Sequence
  Synthetic Polypeptide
QIQLVQSGPELKKPGETVKISCKASGYTFTDYSINWVKRAPGKGLKWMGWINTETREPAYAYDFRGRFAFSLETSASTAYLQINNLKYEDTATYFCALDYSYAMDYWGQGTSVTVSS

SEQ ID NO: 11118 - protein, 124 aa, Artificial Sequence
  Synthetic Polypeptide
QVQLQESGPGLVKPSQTLSLTCTVSGGSISSGGFYWSWIRQHPGKGLEWIGYIHHSGSTHYNPSLKSRVTISIDTSKNLFSLRLSSVTAADTAVYYCASLVYCGGDCYSGFDYWGQGTLVTVSS

SEQ ID NO: 11119 - protein, 122 aa, Artificial Sequence
  Synthetic Polypeptide
QVQLQESGPGLVKPSETLSLTCTVSGGSISSYYWSWIRQPPGKGLEWIGYIYYSGSTNYNPSLKSRVTISVDTSKNQFSLKLSSVTAADTAVYYCVSLVYCGGDCYSGFDYWGQGTLVTVSS

SEQ ID NO: 11120 - protein, 127 aa, Artificial Sequence
  Synthetic Polypeptide
QVTLKESGPVLVKPTETLTLTCTVSGFSLINARMGVSWIRQPPGKALEWLAHIFSNAEKSYRTSLKSRLTISKDTSKSQVVLTMTNMDPVDTATYYCARIPGYGGNGDYHYYGMDVWGQGTTVTVSS

SEQ ID NO: 11121 - protein, 120 aa, Artificial Sequence
  Synthetic Polypeptide
QIQLVESGGGVVQPGRSLRLSCVASGFTFKNYGMHWVRQAPGKGLEWVAVIWYDGSNEYYGDPVKGRFTISRDNSKNMLYLQMNSLRADDTAVYYCARSGIAVAGAFDYWGQGTLVTVSS

SEQ ID NO: 11122 - protein, 122 aa, Artificial Sequence
  Synthetic Polypeptide
QLQLQESGPGLVKPSETLSLTCTVSGGSISSSTYYWGWIRQPPGKGLEWIGSIYFTGSTDYNPSLKSRVSISVDTSKNQFSLKLSSVTAADTAVYYCAKEDDSSGYYSFDYWGQGNLVTVSS

SEQ ID NO: 11123 - protein, 121 aa, Artificial Sequence
  Synthetic Polypeptide
QVQLVQSGSELKKPGASVKVSCKASGYTFNTYAMNWVRQAPGQGLEWMGWINTNTGNPTYAQGFTGRFVFSLDTSVSTAYLQISSLKAEDTAVYYCARRYFDWLLGAFDIWGQGTMVTVSS

SEQ ID NO: 11124 - protein, 117 aa, Artificial Sequence
  Synthetic Polypeptide
QVQLVQSGAEVKKPGSSVKVSCKASGYAFSSSWMNWVRQAPGQGLEWMGRIYPGDGNTHYAQKFQGRVTLTADKSTSTAYMELSSLRSEDTAVYYCGEGYLDPMDYWGQGTLVTVSS

SEQ ID NO: 11125 - protein, 115 aa, Artificial Sequence
  Synthetic Polypeptide
EVQLVESGGGLVQPGGSLRLSCAASGYTFTTYWMHWVRQAPGKGLEWVGYIRPSTGYTEYNQKFKDRFTISADTSKNTAYLQMNSLRAEDTAVYYCARSRWLLDYWGQGTLVTVS

SEQ ID NO: 11126 - protein, 117 aa, Artificial Sequence
  Synthetic Polypeptide
EVQLVESGGGLVQPGGSLRLSCAASGFTFSDYFMSWVRQAPGKGLEWVATISNGGTYTYYPDSVKGRFTISRDNSKNTLYLQMNSLRAEDTAVYYCARFDGYIFDYWGQGTLVTVSS

SEQ ID NO: 11127 - protein, 123 aa, Artificial Sequence
  Synthetic Polypeptide
EVQLVESGGGLVQPGGSLRLSCAASGYAFSNSWINWVRQAPGKGLEWVGQIYPGDYDTNYNGKFKGRFTISRDKSKNTAYLQMNSLRAEDTAVYYCARGGSIYYGNLGFFDVWGQGTLVTVSS

SEQ ID NO: 11128 - protein, 116 aa, Artificial Sequence
  Synthetic Polypeptide
QVQLVQSGAEVKKPGASVKVSCKASGYSFIEYTINWVRQAPGQGLEWIGNIDPYYGTTYYNQMFTGRATLTVDTSISTAYMELSRLRSDDTAVYYCARGSAWFPYWGQGTLVTVSS

SEQ ID NO: 11129 - protein, 115 aa, Artificial Sequence
  Synthetic Polypeptide
QVQLVQSGAEVKKPGASVKVSCKASGYTFSDYWVHWVRQAPGQGLEWMGAIDGSDTFNDYSQKFKGRVTMTRDTSISTAYMELSRLRSDDTAVYYCARGGLLQYWGQGTLVTVSS

SEQ ID NO: 11130 - protein, 119 aa, Artificial Sequence
  Synthetic Polypeptide
QVQLQQSGPELVKPGASVKISCKASGYAFSSSWMNWVKQRPGKGLEWIGRIYPGDEDTNYSGKFKDKATLTADKSSTTAYMQLSSLTSEDSAVYFCARSLLYGDYLDYWGQGTTLTVSS

SEQ ID NO: 11131 - protein, 121 aa, Artificial Sequence
  Synthetic Polypeptide
QVQLQQSGAELVRPGSSVKISCKASGYAFSSYWVNWMKQRPGQGLEWIGQIYPGDGDTNYNGKFKGRATVTADKSSSTSYMQFSSLTSEDSAVYFCARSITTVVGCAMDYWGQGTSVTVSS

SEQ ID NO: 11132 - protein, 120 aa, Artificial Sequence
  Synthetic Polypeptide
EVQLLESGGGLVQPGGSLRLSCAASGFTFSSYAMSWVRQAPGKGLEWVSVISGSGGRPNYADSVKGRFTISRDNSKNTLYLQMNSLRDEDTAVYYCAKVDYSNYLFFDYWGQGTLVTVSS

SEQ ID NO: 11133 - protein, 117 aa, Artificial Sequence; identical to SEQ ID NO: 11117
  Synthetic Polypeptide

SEQ ID NO: 11134 - protein, 121 aa, Artificial Sequence
  Synthetic Polypeptide
QVQLVQSGAEVKKPGASVKVSCKASGYTFTNYGISWVRQAPGQGLEWMGWLSAYSGNTIYAQKLQGRVTMTTDTSTTTAYMELRSLRSDDTAVYYCARDRIVVRPDYFDYWGQGTLVTVSS

SEQ ID NO: 11135 - protein, 117 aa, Artificial Sequence
  Synthetic Polypeptide
EVQLVESGGGLVQPGGSLRLSCAASGFTFSGRSMNWVRQAPGKGLEWVSYISSDSRTIYYADSVKGRFTISRDNAKNSLYLQMNSLRAEDTAVYYCARGGHGYFDLWGRGTLVTVSS

SEQ ID NO: 11136 - protein, 121 aa, Artificial Sequence
  Synthetic Polypeptide
QVQLVESGGGVVQPGRSLRLSCAASGFTFSSYGMHWVRQAPGKGLEWVAGIWWDGSNEKYADSVKGRFTISRDNSKNTLYLQMNSLRAEDTAVYYCAKEAPYYAKDYMDVWGKGTTVTVSS

SEQ ID NO: 11137 - protein, 120 aa, Artificial Sequence
  Synthetic Polypeptide
EVQLVESGGGLVQPGGSLRLSCAASGFNIKDTYIHWVRQAPGKGLEWVARIYPTNGYTRYADSVKGRFTISADTSKNTAYLQMNSLRAEDTAVYYCSRWGGWGFYAMDYWGQGTLVTVSS

SEQ ID NO: 11138 - protein, 117 aa, Artificial Sequence
  Synthetic Polypeptide
QVQLVESGGGLVKPGGSLRLSCAASGFTFSDYYMTWIRQAPGKGLEWISYISSSGSTIYYADSVKGRFTISRDNAKNSLYLQMNSLRAEDTAVYYCARDRNSHFDYWGQGTLVTVSS

SEQ ID NO: 11139 - protein, 117 aa, Artificial Sequence
  Synthetic Polypeptide
QVQLVESGGGLVKPGGSLRLSCAASGFTFSDHYMSWIRQAPGKGLEWFSYISSSGGIIYYADSVKGRFTISRDNAKNSLYLQMNSLRAEDTAVYYCARDVGSHFDYWGQGTLVTVSS

SEQ ID NO: 11140 - protein, 124 aa, Artificial Sequence
  Synthetic Polypeptide
QVQLVESGGGVVQSGRSLRLSCAASGFTFRNYGMHWVRQAPGKGLEWVAVIWYDGSDKYYADSVRGRFTISRDNSKNTLYLQMNSLRAEDTAVYYCARDGYDILTGNPRDFDYWGQGTLVTVSS

SEQ ID NO: 11141 - protein, 122 aa, Artificial Sequence
  Synthetic Polypeptide
EVQLVESGGGLVQPGGSLRLSCAASGFPFSSYDMHWVRQATGKGLEWVSAIGTAGATYYPGSVKGRFTISRENAKNSLYLQMNSLRAGDTAVYYCARGDYVWGTYRPLFDYWGQGTLVTVSS

SEQ ID NO: 11142 - protein, 118 aa, Artificial Sequence
  Synthetic Polypeptide
QVQLQESGPGLVKPSETLSLTCTVSGASISSFYWSWIRQPPGKGLEWIGYIYYSGTTNYNPSLKSRVTISVDTSKNQFSLKLSSVTAADTAVYYCARIAVAGFFFDYWGQGTLVTVSS

SEQ ID NO: 11143 - protein, 123 aa, Artificial Sequence
  Synthetic Polypeptide
QVQLVQSGAEVKKPGASVKVSCKASGYTFTNYYMHWVRQAPGLGLEWMGIINPSDGSTSYAQKFQGRVTMTRDTSTNTVYMDLSSLRSEDTAVYYCARGGNSAFYSYYDMDVWGQGTTVTVSS

SEQ ID NO: 11144 - protein, 116 aa, Artificial Sequence
  Synthetic Polypeptide
QVQLQQSGPELVKPGASVRISCKASGYTFTTYYIHWVKQRPGQGLEWIGWIYPGNVNTNYNEKFKGKATLTADKSSSTAYMQLTSLTSEDSAVYFCARGVYYFDYWGQGTILTVSS

SEQ ID NO: 11145 - protein, 119 aa, Artificial Sequence
  Synthetic Polypeptide
QVQLQESGPGLVKPSQTLSLTCTVSGGSINNNNYYWTWIRQHPGKGLEWIGYIYYSGSTFYNPSLKSRVTISVDTSKTQFSLKLSSVTAADTAVYYCAREDTMTGLDVWGQGTTVTVSS

SEQ ID NO: 11146 - protein, 122 aa, Artificial Sequence
  Synthetic Polypeptide
EVQLVQSGAEVKKPGASVKVSCKASGDTFKRYYVHWVRQAPGQGLEWMGIINPSGVSTTYAQKFQGRVTMTRDTSTSTVYMELSSLRSEDTAVYYCAEVRGSGFNYFGMDVWGQGTLVTVSS

SEQ ID NO: 11147 - protein, 122 aa, Artificial Sequence
  Synthetic Polypeptide
EVQLLESGGGLVQPGGSLRLSCAASGFTFSSYAMSWVRQAPGKGLEVVVSAISGGGGRTYYADSVKGRFTISRDNSKNTLYLQMNSLRAEDTAVYYCAREEMAFRAYRFDIWGQGTLVTVSS

SEQ ID NO: 11148 - protein, 124 aa, Artificial Sequence
  Synthetic Polypeptide
EVQLVESGGDLVKPGGSLKLSCAVSGFTFSSYGMSWVRQTPDKRLEWVATVSSGGTYTYYPDSVKGRFTISRDNAKNTLYLQMSSLKSEDSAMYYCARHRGNYYATYYYAMDYWGQGTSVTVSS

SEQ ID NO: 11149 - protein, 119 aa, Artificial Sequence
  Synthetic Polypeptide
EVQLVESGGGLVQPGGSLRLSCAASGFTFSDAWMDWVRQAPGKGLEWVGEIRSKVNNHETYYAESVKGRFTISRDDSKNSLYLQMNSLKTEDTAVYYCARNDYFDYWGQGTTVTVSSAS

SEQ ID NO: 11150 - protein, 123 aa, Artificial Sequence
  Synthetic Polypeptide
EVQLQESGAEVKKPGSSVKVSCKASGFNIKDTYMHWVRQAPGQGLEWMGRIDPANGNSKYVPKFQGRVTITADESTSTAYMELSSLRSEDTAVYYCAPFGYYVSDYAMAYWGQGTTVTVSSAS

SEQ ID NO: 11151 - protein, 120 aa, Artificial Sequence
  Synthetic Polypeptide
QVQLVQSGAEVKKPGSSVKVSCKASGGTFSSYAISWVRQAPGQGLEWMGLIIPRYGKARYAQKFQGRVTITADESTSTAYMELSSLRSEDTAVYYCARNWPYYYMDFWGQGTLVTVSSAS

SEQ ID NO: 11152 - protein, 122 aa, Artificial Sequence
  Synthetic Polypeptide
EVQLVESGGGLVKPGGSLRLSCAASGFTFSNAWMSWVRQAPGKGLEWVGRIKSKTEGGTTDYAAPVKGRFTISRDDSKNTLYLQMNSLKTEDTAVYYCTTPYEWSWYDYWGQGTLVTVSSAS

SEQ ID NO: 11153 - protein, 121 aa, Artificial Sequence
  Synthetic Polypeptide
QVQLVQSGAEVKKPGASVKVSCKASGYTFTSYYMHWVRQAPGQGLEWMGIINPSGGSTSYAQKFQGRVTMTHDTSTSTVYMELSSLRSEDTAVYYCARSFFTGFHLDYWGQGTLVTVSSAS

SEQ ID NO: 11154 - protein, 128 aa, Artificial Sequence
  Synthetic Polypeptide
QVQLVQSGAEVKKPGASVKVSCKASGYTFTNYLIEWVRQAPGQGLEWMGLINPGSGGTNYNEKFKGRVTMTTDTSTSTAYMELRSLRSDDTAVYYCARRSPLGSWIYYAYDGVAYWGQGTLVTVSSAS

SEQ ID NO: 11155 - protein, 114 aa, Artificial Sequence
  Synthetic Polypeptide
EVQLVESGGGLVQPGGSLRLSCAASGFTFSRYWMSWVRQAPGKGLEWVAEINPDSSTIQYTPSLKARFTLSVDRSKNTLYLQMNSLRAEDTAVYYCARPAYWGQGTLVTVSSAS

SEQ ID NO: 11156 - protein, 121 aa, Artificial Sequence
  Synthetic Polypeptide
QVQLVQSGAEVKKPGASVKVSCKASGYTFTGYNIHWVRQAPGQRLEWMGAIYPGNGDTSYKQKFRGRVTITRDTSASTAYMELSSLRSEDTAVYYCARGETARATFAYWGQGTLVTVSSAS

SEQ ID NO: 11157 - protein, 121 aa, Artificial Sequence
  Synthetic Polypeptide
EVQLVQSGAEVKKPGASVKVSCKASGYRFTNYWIHWVRQAPGQGLEWIGGINPGNNYATYRRKFQGRVTMTADTSTSTVYMELSSLRSEDTAVYYCTREGYGNYGAWFAYWGQGTLVTVSS

SEQ ID NO: 11158 - protein, 125 aa, Artificial Sequence
  Synthetic Polypeptide
EVQLVESGGGLVKPGGSLKLSCAASGFAFSIYDMSWVRQAPGKGLEWVAYISSGGGTTYYPDTVKGRFTISRDNAKNTLYLQMSSLRAEDTAMYYCARHSGYGSSYGVLFAYWGQGTLVTVSSTR

SEQ ID NO: 11159 - protein, 120 aa, Artificial Sequence
  Synthetic Polypeptide
QVQLQQSGGGLVQPGGSLKLSCAASGIDFSRYWMSWVRRAPGKGLEWIGEINPDSSTINYAPSLKDKFIISRDNAKNTLYLQMSKVRSEDTALYYCASLYYDYGDAMDYWGQGTSVTVSS

SEQ ID NO: 11160 - protein, 122 aa, Artificial Sequence
  Synthetic Polypeptide
EVQLVESGGGLVQPGGSLRLSCAASGFAFSIYDMSWVRQAPGKGLEWVAYISSGGGTYYPDTVKGRFTISRDNSKNTLYLQMNSLRAEDTAVYYCARHSGYGTHWGVLFAYWGQGTLVTVSS

SEQ ID NO: 11161 - protein, 121 aa, Artificial Sequence
  Synthetic Polypeptide
EVQLVESGGGLVQPGGSLRLSCAASGYAFSSYWVNWVRQAPGKGLEWVAQIYPGDGDTNYNGKFKGRFTISRDNSKNTLYLQMNSLRAEDTAVYYCARSITTVVGCAMDYWGQGTLVTVSS

SEQ ID NO: 11162 - protein, 122 aa, Artificial Sequence
  Synthetic Polypeptide
QLQLQESGPGLVKPSETLSLTCTVSGGSISSGSYFWGWIRQPPGKGLEWIGSIYYSGITYYNPSLKSRVTISVDTSKNQFSLKLSSVTAADTAVYYCARHDGAVAGLFDYWGQGTLVTVSSA

SEQ ID NO: 11163 - protein, 118 aa, Artificial Sequence; identical to SEQ ID NO: 11100
  Synthetic Polypeptide

SEQ ID NO: 11164 - protein, 118 aa, Artificial Sequence
  Synthetic Polypeptide
QVQLVESGGGLVKPGGSLRLSCAASGDSITSGYWNWIRQAPGKGLEWFSYISYSGSTYYNPSLKSRFTISRDNAKNSLYLQMNSLRAEDTAVYYCARPNYPFYAMDYWGQGTLVTVSS

SEQ ID NO: 11165 - protein, 118 aa, Artificial Sequence
  Synthetic Polypeptide
EVQLVESGGGVVQPGRSLRLSCAASGFSLSTSGMGVGWVRQAPGKGLEWVAHIWWDDDKYYADSVKGRFTISRDNSKNTLYLQMNSLRAEDTAVYYCARSFGYGLDYWGQGTLVTVSS

SEQ ID NO: 11166 - protein, 124 aa, Artificial Sequence
  Synthetic Polypeptide
QVQLVESGGGLVKPGGSLRLSCAASGDSVSSNSAAWGWIRQAPGKGLEWFSRIYYRSKWYNSYAVSVKSRFTISRDNAKNSLYLQMNSLRAEDTAVYYCARYDWVPKIGVFDSWGQGTLVTVSS

SEQ ID NO: 11167 - protein, 122 aa, Artificial Sequence
  Synthetic Polypeptide
QLQLQESGPGLVKPSETLSLTCTVSGGSISSSSYFWGWIRQPPGKGLEWIGSIYYSGITYYNPSLKSRVTISVDTSKNQFSLKLSSVTAADTAVYYCARHDGAVAGLFDYWGQGTLVTVSSA

SEQ ID NO: 11168 - protein, 122 aa, Artificial Sequence
  Synthetic Polypeptide
QLQLQESGPGLVKPSETLSLTCTVSGGSISSGSYIWGWIRQPPGKGLEWIGSIYYSGITYYNPSLKSRVTISVDTSKNQFSLKLSSVTAADTAVYYCARHDGAVAGLFDYWGQGTLVTVSSA

SEQ ID NO: 11169 - protein, 122 aa, Artificial Sequence
  Synthetic Polypeptide
QLQLQESGPGLVKPSETLSLTCTVSGGSISSGSYFWGWIRQPPGKGLEWIGSIYYSGITYYNPSLKSRVTISVDTSKNQFSLKLSSVTAADTAVYYCARHDGAMAGLFDYWGQGTLVTVSSA

SEQ ID NO: 11170 - protein, 122 aa, Artificial Sequence
  Synthetic Polypeptide
QLQLQESGPGLVKPSETLSLTCTVSGGSISSGSYFWGWIRQPPGKGLEWIGSIYYSGSTYYNPSLKSRVTISVDTSKNQFSLKLSSVTAADTAVYYCARHDGAVAGLFDYWGQGTLVTVSSA

SEQ ID NO: 11171 - protein, 122 aa, Artificial Sequence
  Synthetic Polypeptide
QLQLQESGPGLVKPSETLSLTCTVSGGSISSGSYFWGWIRQPPGKGLEWIGSIYYSGISYYNPSLKSRVTISVDTSKNQFSLKLSSVTAADTAVYYCARHDGAVAGLFDYWGQGTLVTVSSA

SEQ ID NO: 11172 - protein, 122 aa, Artificial Sequence
  Synthetic Polypeptide
QLQLQESGPGLVKPSETLSLTCTVSGGSISSGSYFWGWIRQPPGKGLEWIGSIYYSGITYYNPGLKSRVTISVDTSKNQFSLKLSSVTAADTAVYYCARHDGAVAGLFDYWGQGTLVTVSSA

SEQ ID NO: 11173 - protein, 122 aa, Artificial Sequence
  Synthetic Polypeptide
QLQLQESGPGLVKPSETLSLTCTVSGGSISSGSYFWGWIRQPPGKGLEWIGSIYYSGITYYNPTLKSRVTISVDTSKNQFSLKLSSVTAADTAVYYCARHDGAVAGLFDYWGQGTLVTVSSA

SEQ ID NO: 11174 - protein, 122 aa, Artificial Sequence; identical to SEQ ID NO: 11162
  Synthetic Polypeptide

SEQ ID NO: 11175 - protein, 122 aa, Artificial Sequence; identical to SEQ ID NO: 11162
  Synthetic Polypeptide

SEQ ID NO: 11176 - protein, 122 aa, Artificial Sequence; identical to SEQ ID NO: 11162
  Synthetic Polypeptide

SEQ ID NO: 11177 - protein, 122 aa, Artificial Sequence; identical to SEQ ID NO: 11162
  Synthetic Polypeptide

SEQ ID NO: 11178 - protein, 122 aa, Artificial Sequence; identical to SEQ ID NO: 11167
  Synthetic Polypeptide

SEQ ID NO: 11179 - protein, 122 aa, Artificial Sequence; identical to SEQ ID NO: 11167
  Synthetic Polypeptide

SEQ ID NO: 11180 - protein, 122 aa, Artificial Sequence; identical to SEQ ID NO: 11167
  Synthetic Polypeptide

SEQ ID NO: 11181 - protein, 120 aa, Artificial Sequence
  Synthetic Polypeptide
QVQLVQSGAEVKKPGSSVKVSCKASGGTFSTYAIHWVRQAPGQGLEWMGRIIPIEGRAYYAQKFQGRVTITADESTSTAYMELSSLRSEDTAVYYCARGRYSYRYWFDYWGQGTLVTVSS

SEQ ID NO: 11182 - protein, 122 aa, Artificial Sequence
  Synthetic Polypeptide
EVQLVQSGAEVKKPGESLKISCKGSGYSFTSYWIGWVRQMPGKGLEWMGIIYPGDSDTRYSPSFQGQVTISADKSISTAYLQWSSLKASDTAMYYCARDVGRWAPGGFLDYWGQGTLVTVSS

SEQ ID NO: 11183 - protein, 118 aa, Artificial Sequence
  Synthetic Polypeptide
QVQLVQSGAEVKKPGSSVKVSCKASGGTFSSYGISWVRQAPGQGLEWMGWISAIFGTANYAQKFQGRVTITADESTSTAYMELSSLRSEDTAVYYCARGVASWYLDYWGQGTLVTVSS

SEQ ID NO: 11184 - protein, 120 aa, Artificial Sequence
  Synthetic Polypeptide
QVQLQQPGAELVKPGASVKMSCKASGYTFTSYNMHWVKQTPGRGLEWIGAIYPGNGDTSYNQKFKGKATLTADKSSSTAYMQLSSLTSEDSAVYYCARSTYYGGDWYFNVWGAGTTVTVS

SEQ ID NO: 11185 - protein, 119 aa, Artificial Sequence
  Synthetic Polypeptide
QVQLQQSGPELKKPGETVKISCKASGYPFTNYGMNWVKQAPGQGLKWMGWINTSTGESTFADDFKGRFDFSLETSANTAYLQINNLKSEDMATYFCARWEVYHGYVPYWGQGTTVTVSS

SEQ ID NO: 11186 - protein, 119 aa, Artificial Sequence
  Synthetic Polypeptide
EVQLVESGGGVVQPGRSLRLSCSASGFDFTTYWMSWVRQAPGKGLEWIGEIHPDSSTINYAPSLKDRFTISRDNAKNTLFLQMDSLRPEDTGVYFCASLYFGFPWFAYWGQGTPVTVSS

SEQ ID NO: 11187 - protein, 124 aa, Artificial Sequence
  Synthetic Polypeptide
GVHSQVQLQESGPGLVRPSQTLSLTCTVSGFTISSGYSWHWVRQPPGRGLEWIGYIQYSGITNYNPSLKSRVTMLVDTSKNQFSLRLSSVTAADTAVYYCAREDYDYHWYFDVWGQGTTVTVSS

SEQ ID NO: 11188 - protein, 120 aa, Artificial Sequence
  Synthetic Polypeptide
EVQLVESGGGLVQPGGSLRLSCAASGFNIKDTYIHWVRQAPGKGLEWVARIYPTNGYTRYADSVKGRFTISADTSKNTAYLQMNSLRAEDTAVYYCSRWGGAGAYAMDVWGQGTLVTVSS

SEQ ID NO: 11189 - protein, 121 aa, Artificial Sequence
  Synthetic Polypeptide
QVQLVESGGGVVQPGRSLRLSCAASGFTFSSYAMHWVRQAPGKGLEWVAVISYDGSNKYYADSVKGRFTISRDNSKNTLYLQMNSLRAEDTAVYYCAKEAPYYAKDYMDVWGKGTTVTVSS

SEQ ID NO: 11190 - protein, 122 aa, Artificial Sequence
  Synthetic Polypeptide
EVQLVETGGGLVQPGKSLELTCATSGFTFNTAWMHWVRQSPDKRLEWIARIKDTSNNYATDYVESMKGRFTISRDDSKGSVNLQMNSLKEEDTATYYCTTDFYDGTYYWNYWGQGVMVTVSS

SEQ ID NO: 11191 - protein, 126 aa, Artificial Sequence
  Synthetic Polypeptide
RMAQVQLQQSGAELARPGASVKMSCKASGYTFTTYTIHWVRRRPGHDLEWIGYINPSSGCSDYNQNFKGKTTLTADKSSNTAYMQLNSLTSEDSAVYYCARRADYGNYEYTWFAYWGQGTTVTVSS

SEQ ID NO: 11192 - protein, 118 aa, Artificial Sequence
  Synthetic Polypeptide
EVQLVESGGGLVQPGRSLRLSCAASGFTFDDYGMHWVRQAPGKGLEWVSGISWNSGSIGYADSAKGRFTISRDNSKNTLYLQMNSLRAEDTAVYYCAKRGNSNSFDYWGQGTLVTVSS

SEQ ID NO: 11193 - protein, 122 aa, Artificial Sequence
  Synthetic Polypeptide
QMQLVQSGAEVKKPGSSVKVSCKASGGTFSSYAISWVRQAPGQGLEWMGGIIPIFGTANYAQKFQGRVTITADKSTSTAYMELSSLRSDDTAVYYCARDELWATNYYYMDVWGKGTLVTVSS

SEQ ID NO: 11194 - protein, 118 aa, Artificial Sequence
  Synthetic Polypeptide
EVQLVESGGGLVRPGGSLRLSCAASGFTFDDYGMSWVRQAPGKGLEWVSGISWNSGSIGYADSVKGRFTISRDNAKNSLYLQMNSLRAEDTALYYCAKRGNSNSFDYWGQGTTVTVSS

SEQ ID NO: 11195 - protein, 118 aa, Artificial Sequence
  Synthetic Polypeptide
EVQLVESGGGLVQPGRSLRLSCAASGFTFDDYAMHWVRQAPGKGLEWVSGISWNSGSIGYADSAKGRFTISRDNSKNTLYLQMNSLRAEDTAVYYCAKRGNSNSFDYWGQGTLVTVSS

SEQ ID NO: 11196 - protein, 119 aa, Artificial Sequence
  Synthetic Polypeptide
QVQLKESGPGLVQPSQTLSLTCTVSGLSLTSNGVSWIRQPPGKGLEWLGVIWSNGGTDYNSAIKSRLSFSRDTSKSQVFLKMNSLQTEDTAMYFCARPRYNSGYFFDYWGQGVMVTVSS

SEQ ID NO: 11197 - protein, 124 aa, Artificial Sequence
  Synthetic Polypeptide
QVQLKESGPGLVQPSQTLSLTCTVSGFSLTSYHVHWVRQPPGKGLEWMGVMWSDGDTLYNSALKSRLSISRDTSKSQVLLQMDSLQSEDTATYYCARLQVFGYPGIRDYVMDAWGQGASVTVSS

SEQ ID NO: 11198 - protein, 130 aa, Artificial Sequence [sequence omitted]

SEQ ID NO: 11199 - protein, 120 aa, Artificial Sequence
  Synthetic Polypeptide
EVQLVESGGGLVQPGGSLRLSCAASGFTFSSYWMSWVRQAPGKGLEWVANIKQDGSEKYYVDSVKGRFTISRDNAKNSLYLRMNSLRAEDTAVYYCARAWGYSSYYFDYWGQGTLVTVSP

SEQ ID NO: 11200 - protein, 115 aa, Artificial Sequence
  Synthetic Polypeptide
EVQLQQSGPELVKPGTSVRISCKTSGYTFTEYTIHWVKQSHGKSLEWIGNINPNNGGTTYNQKFEDKATLTVDKSSSTAYMELRSLTSEDSAVYYCAAGWNFDYWGQGTTLTVSS

SEQ ID NO: 11201 - protein, 115 aa, Artificial Sequence
  Synthetic Polypeptide
EVQLVESGGGLVQPGGSLRLSCAASGYTFTEYTIHWVRQAPGKGLEWVANINPNNGGTTYNQKFEDRFTISRDNSKNTLYLQMNSLRAEDTAVYYCARGWNFDYWGQGTLVTVSS

SEQ ID NO: 11202 - protein, 115 aa, Artificial Sequence
  Synthetic Polypeptide
QVQLVQSGAEVKKPGESVKVSCKASGYTFTEYTIHWVRQAPGQGLEWMGNINPNNGGTTYNQKFEDRVTITADKSTSTAYMELSSLRSEDTAVYYCARGWNFDYWGQGTTVTVSS

SEQ ID NO: 11203 - protein, 115 aa, Artificial Sequence; identical to SEQ ID NO: 11200
  Synthetic Polypeptide

SEQ ID NO: 11204 - protein, 115 aa, Artificial Sequence; identical to SEQ ID NO: 11201
  Synthetic Polypeptide

SEQ ID NO: 11205 - protein, 122 aa, Artificial Sequence
  Synthetic Polypeptide
EVQLVESGGGLVKPEGSLRLSCAASGFTFSRYGMSWVRQAPGKGLEWVSTISGGGTYIYYPDSVKGRFTISRDNAKNSLFLQMNSLRAEDTAVYYCARDNYGRNYDYGMDYWGQGTLVTVSS

SEQ ID NO: 11206 - protein, 122 aa, Artificial Sequence
  Synthetic Polypeptide
EVKVVESGGDLVKPGGSLKLSCVVSGFTFSRYGMSWVRQTPGKRLEWVATISGGGTYIYYPDSVKGRFTISRDNAKNTLYLQMSSLKSEDTAMYHCTRDNYGRNYDYGMDYWGQGTSVTVSS

SEQ ID NO: 11207 - protein, 121 aa, Artificial Sequence
  Synthetic Polypeptide
EVQLVESGGGLVKPGGSLRLSCAASGFTFSGYAMSWVRQAPGKGLEWVSTISSGGTYIYYPDSVKGRFTISRDNAKNSLYLQMNSLRAEDTAVYYCARLGGDNYYEYFDVWGKGTTVTVSS

SEQ ID NO: 11208 - protein, 117 aa, Artificial Sequence
  Synthetic Polypeptide
EVQLLESGGGLVQPGGSLRLSCAASGFAFSTYDMSWVRQAPGKGLEWVATISSGGSYTYYLDSVKGRFTISRDSSKNTLYLQMNSLQAEDSAIYYCAPTTVVPFAYWGQGTLVTVSS

SEQ ID NO: 11209 - protein, 116 aa, Artificial Sequence
  Synthetic Polypeptide
EVQLVESGGGLVQPGGSLRLSCAASGYTFTSYWLHWVRQAPGKGLEWVGYIRPSTGYTEYNQKFKDRFTISADTSKNTAYLQMNSLRAEDTAVYYCARSRWLLDYWGQGTLVTVSS

SEQ ID NO: 11210 - protein, 115 aa, Artificial Sequence
  Synthetic Polypeptide
EVQLVESGGGLVQPGGSLRLSCAASGFTFTTYWMHWVRQAPGKGLEWVGYIRPSTGYTEYNQKFKDRFTISADTSKNTAYLQMNSLRAEDTAVYYCARSRWLLDYWGQGTLVTVS

SEQ ID NO: 11211 - protein, 115 aa, Artificial Sequence; identical to SEQ ID NO: 11125
  Synthetic Polypeptide

SEQ ID NO: 11212 - protein, 117 aa, Artificial Sequence
  Synthetic Polypeptide
EVQLVESGGGLVQPGGSLRLSCAASGYTFSDYFMSWVRQAPGKGLEWVATISNGGTYTYYPDSVKGRFTISRDNSKNTLYLQMNSLRAEDTAVYYCARFDGYIFDYWGQGTLVTVSS

SEQ ID NO: 11213 - protein, 117 aa, Artificial Sequence; identical to SEQ ID NO: 11126
  Synthetic Polypeptide

SEQ ID NO: 11214 - protein, 117 aa, Artificial Sequence; identical to SEQ ID NO: 11126
  Synthetic Polypeptide

SEQ ID NO: 11215 - protein, 5 aa, Artificial Sequence
  Synthetic Polypeptide
GGGGG

SEQ ID NO: 11216 - protein, 5 aa, Artificial Sequence
  Synthetic Polypeptide
GGGGG

SEQ ID NO: 11217 - protein, 5 aa, Artificial Sequence
  Synthetic Polypeptide
GGGGG

SEQ ID NO: 11218 - protein, 5 aa, Artificial Sequence
  Synthetic Polypeptide
GGGGG

SEQ ID NO: 11219 - protein, 5 aa, Artificial Sequence
  Synthetic Polypeptide
GGGGG

SEQ ID NO: 11220 - protein, 251 aa, Artificial Sequence
  Synthetic Polypeptide
DVQMIQTPDSLAVSLGQRATISCRASESVDNYGISFMHWYQQKPGQSPKLLIYRASNLESGIPARFSGSGSRTDFTLTINPVETDDVATYYCQQNNKDPPTFGGGTKLEIKGGGGSGGGGSGGGGSGGGGSQVQLQQSGAELVKPGASVKISCKASGYAFSSYWMNWVKQRPGKGLEWIGQIYPGDGDTTYNGKFKGKATLTADKSSSTVYMQLNSLTSEDSAVYFCVRYYYGSSGYFDYWGQGTTLTVSS

SEQ ID NO: 11221 - protein, 242 aa, Artificial Sequence
  Synthetic Polypeptide
DVQMIQTPSSLSASLGDRVTISCRASQDIGNYLNWYQQKPDGTVKLLIYYTSRLHSGVPSRFSGSGSGTEYSLTISNLEQEDIATYFCQQGSALPPTFGGGTKLEINGGGGSGGGGSGGGGSALQLQQSGAELVRPGASVTLSCKASGYTFTDYEMHWVKQTPVHGLEWIGAIDPETGGTAYNQKFEGKAILTADKSSSTAYMELRSLTSEDSPVYYCARRRYYGSSSFDYWGQGTTLTVSS

SEQ ID NO: 11222 - protein, 244 aa, Artificial Sequence
  Synthetic Polypeptide
DIVLTQSPATLSLSPGDRATISCRASESVTILGSHLIYWYQQKPGQPPRLLIQLASNVQTGVPARFSGSGSRTDFTLTISSVEPEDFAVYYCLQSRTIPRTFGQGTKLEIKRGGGGSGGGGSGGGGSQVQLVQSGPEVKKPGESVKISCKASGYTFRHYSMNWVKQAPGQGLKWMGRINTESGVPIYADDFKGRFSFTVDTSASTAYLEISSLTSEDTAVYFCSNDYLYSLDFWGQGTTLTVSS

SEQ ID NO: 11223 - protein, 244 aa, Artificial Sequence
  Synthetic Polypeptide
DIQMTQSPSSLSASVGDRVTITCSASQDISNYLNWYQQKPGKAPKLLIYYTSNLHSGVPSRFSGSGSGTDFTLTISSLQPEDFATYYCQQYRKLPWTFGQGTKLEIKRGGGGSGGGGSGGGGSQVQLVQSGAEVKKPGSSVKVSCKASGGTFSNYWMHWVRQAPGQGLEWMGATYRGHSDTYYNQKFKGRVTITADKSTSTAYMELSSLRSEDTAVYYCARGAIYDGYDVLDNWGQGTLVTVSS

SEQ ID NO: 11224 - protein, 249 aa, Artificial Sequence
  Synthetic Polypeptide
DIVMTQSPDSLAVSLGERATINCESSQSLLNSGNQKNYLTWYQQKPGQPPKPLIYWASTRESGVPDRFSGSGSGTDFTLTISSLQAEDVAVYYCQNDYSYPYTFGQGTKLEIKRGGGGSGGGGSGGGGSEVQLVQSGAEVKKPGESLKISCKGSGYSFTDYYMKWARQMPGKGLEWMGDIIPSNGATFYNQKFKGQVTISADKSISTTYLQWSSLKASDTAMYYCARSHLLRASWFAYWGQGTMVTVSS

SEQ ID NO: 11225 - protein, 244 aa, Artificial Sequence
  Synthetic Polypeptide
DIQMTQSTSSLSASLGDRVTISCSASQGINNYLNWYQQKPDGTVELLIYYTSTLQSGVPSRFSGSGSGTDYSLTISNLEPEDIGTYYCQQYSKLPRTFGGGTKLEIKGGGGSGGGGSGGGGSQVQLQQSGSELMMPGASVKISCKATGYTFSNYWIEWVKQRPGHGLEWIGEILPGTGRTIYNEKFKGKATFTADISSNTVQMQLSSLTSEDSAVYYCARRDYYGNFYYAMDYWGQGTSVTVSS

SEQ ID NO: 11226 - protein, 239 aa, Artificial Sequence
  Synthetic Polypeptide
DIQMTQSPASLSVSVGETVTITCRASENIYSNLAWYQQKQGKSPQLLVYAATNLADGVPSRFSGSGSGTQYSLKINSLQSEDFGSYYCQHFWGTWTFGGGTTLEIKGGGGSGGGGSGGGGSEVQLQQSGPELVKPGASVKMSCKASGYTFTDYYMKWMKQSHGKSLEWIGDINPNNGGTTYNQKFKGKATLTVDKSSSTAYMQLNSLTSEDSAVYYCARDYGYGYFDYWGQGTTLTVSS

SEQ ID NO: 11227 - protein, 243 aa, Artificial Sequence
  Synthetic Polypeptide
DEIVLTQSPATLSLSPGERATLSCSASSSVSYMHWYQQKPGQAPRLLIYDTSKLASGIPARFSGSGSGTDFTLTISSLEPEDVAVYYCFQGSVYPFTFGQGTKLEIKRGGGGSGGGGSGGGGSQVQLQESGPGLVKPSQTLSLTCTVSGGSISTSGMGVGWIRQHPGKGLEWIGHIWWDDDKRYNPALKSRVTISVDTSKNQFSLKLSSVTAADTAVYYCARMELWSYYFDYWGQGTLVTVSS

SEQ ID NO: 11228 - protein, 242 aa, Artificial Sequence
  Synthetic Polypeptide
DIQMTQTTSSLSASLGDRVTISCRASQDISKYLNWYQQKPDGTVKLLIYHTSRLHSGVPSRFSGSGSGTDYSLTISNLEQEDIATYFCQQGNTLPYTFGGGTKLEITGGGGSGGGGSGGGGSEVKLQESGPGLVAPSQSLSVTCTVSGVSLPDYGVSWIRQPPRKGLEWLGVIWGSETTYYNSALKSRLTIIKDNSKSQVFLKMNSLQTDDTAIYYCAKHYYYGGSYAMDYWGQGTSVTVSS

SEQ ID NO: 11229 - protein, 242 aa, Artificial Sequence
  Synthetic Polypeptide
EIVMTQSPATLSLSPGERATLSCRASQDISKYLNWYQQKPGQAPRLLIYHTSRLHSGIPARFSGSGSGTDYTLTISSLQPEDFAVYFCQQGNTLPYTFGQGTKLEIKGGGGSGGGGSGGGGSQVQLQESGPGLVKPSETLSLTCTVSGVSLPDYGVSWIRQPPGKGLEWIGVIWGSETTYYNSSLKSRVTISKDNSKNQVSLKLSSVTAADTAVYYCAKHYYYGGSYAMDYWGQGTLVTVSS

SEQ ID NO: 11230 - protein, 244 aa, Artificial Sequence
  Synthetic Polypeptide
EIVLTQSPATLSLSPGERATLSCRASQSVSSYLAWYQQKPGQAPRLLIYDASNRATGIPARFSGSGSGTDFTLTISSLEPEDFAVYYCQQRSNWPITFGQGTRLEIKGGGGSGGGGSGGGGSEVQLVESGGGLVQPGRSLRLSCAASGFTFNDYAMHWVRQAPGKGLEWVSTISWNSGSIGYADSVKGRFTISRDNAKKSLYLQMNSLRAEDTALYYCAKDIQYGNYYYGMDVWGQGTTVTVSS

SEQ ID NO: 11231 - protein, 247 aa, Artificial Sequence
  Synthetic Polypeptide
DIVMTQTPLSLPVTPGEPASISCRSSKSLLHSNGITYLYWYLQKPGQSPQLLIYQMSNLVSGVPDRFSGSGSGTDFTLKISRVEAEDVGVYYCAQNLELPYTFGGGTKVEIKRGGGGSGGGGSGGGGSQVQLVQSGAEVKKPGSSVKVSCKASGYAFSYSWINWVRQAPGQGLEWMGRIFPGDGDTDYNGKFKGRVTITADKSTSTAYMELSSLRSEDTAVYYCARNVFDGYWLVYWGQGTLVTVSS

SEQ ID NO: 11232 - protein, 248 aa, Artificial Sequence
  Synthetic Polypeptide
DIQMTQSPSSLSASVGDRVTITCRSSQSIVHSVGNTFLEWYQQKPGKAPKLLIYKVSNRFSGVPSRFSGSGSGTDFTLTISSLQPEDFATYYCFQGSQFPYTFGQGTKVEIKRGGGGSGGGGSGGGGSEVQLVESGGGLVQPGGSLRLSCAASGYEFSRSWMNWVRQAPGKGLEWVGRIYPGDGDTNYSGKFKGRFTISADTSKNTAYLQMNSLRAEDTAVYYCARDGSSWDWYFDVWGQGTLVTVSS

SEQ ID NO: 11233 - protein, 242 aa, Artificial Sequence
  Synthetic Polypeptide
EIVLTQSPGTLSLSPGERATLSCRASQSVGGYLAWYQQKPGQAPRLLIYDASNRATGIPARFSGSGSGTDFTLTISSLEPEDFAVYYCQQRNNWPPMYTFGQGTKLEIKRGGGGSGGGGSGGGGSQVQLVQSGAEVKKPGSSVKVSCKASGGTFSSYAISWVRQAPGQGLEWMGGIIPILGTANYAQKFQGRVTITADESTSTAYMELSSLRSEDTAVYYCARWGGGAFDIWGQGTMVTVSS

SEQ ID NO: 11234 - protein, 239 aa, Artificial Sequence
  Synthetic Polypeptide
DIQMTQSPATIENTSLSASVGDRVTITCRASQGISSWLTWYQQKPEKAPKSLIYAASSLQSGVPSRFSGSGSGTDFTLTISSLQPEDFATYYCQQYDSYPITFGQGTRLEIKGGGGSGGGGSGGGGSQVQLQQWGAGLLKPSETLSLTCAVYGGSFSAYYWSWIRQPPGKGLEWIGDINHGGGTNYNPSLKSRVTISVDTSKNQFSLKLNSVTAADTAVYYCASLTAYWGQGSLVTVSS

SEQ ID NO: 11235 - protein, 243 aa, Artificial Sequence
  Synthetic Polypeptide
EIVLTQSPDSLAVSLGERATINCKASQSVDFDGDSYLNWYQQKPGQPPKVLIYAASTLQSGVPSRFSGSGSGTDFTLTINSLEAEDAATYYCQQSNEDPWTFGGGTKVEIKGGGGSGGGGSGGGGSQVQLVQSGAEVKKPGASVKVSCKVSGYTFTDYYITWVRQAPGQALEWMGWIYPGSGNTKYSQKFQGRFVFSVDTSASTAYLQLSSLKAEDTAVYYCANYGNYWFAYWGQGTLVTVSS

SEQ ID NO: 11236 - protein, 241 aa, Artificial Sequence
  Synthetic Polypeptide
DIQMTQSPSSLSASVGDRVTITCRASQGISSWLAWYQQKPEKAPKSLIYAASSLQSGVPSRFSGSGSGTDFTLTISSLQPEDFATYYCQQYNSYPPTFGGGTKVEIKGGGGSGGGGSGGGGSEVQLVQSGGGLVHPGGSLRLSCAGSGFAFSSSTMHWIRQAPGKGLEWISLIGSGGGIYYGDSVKGRFTISRDNAKNSLYLQMNSLRAEDMAVYYCVRGYFDWVDYFDYWGQGTLVTVSS

SEQ ID NO: 11237 - protein, 247 aa, Artificial Sequence
  Synthetic Polypeptide
DVVMTQSPLSLPVTLGQPASISCRSSQSIVHSDGNTYLEWYQQRPGQSPRRLIYKVSNRFSGVPDRFSGSGSGTDFTLKISRVEAEDVGVYYCFQGSHAPWTFGGGTKVEIKGGGGSGGGGSGGGGSEVQLVESGGGLVQPGGSLRLSCAASGFTFSSYGMHWVRQAPGKGLEWVAYITTRSSTIYYADSVKGRFTISRDNAKNSLYLQMNSLRAEDTAVYYCTREPLTGYYAMDYWGQGTSVTVSS

SEQ ID NO: 11238 - protein, 237 aa, Artificial Sequence
  Synthetic Polypeptide
QIVLTQSPALMSASPGEKVTMTCSASSSVRYMYWYQQKPRSSPKPWIHLTSNLASGVPARFSGSGSGTSYSLTISSMEAEDAATYYCQQWSSHPFTFGSGTKLEIKGGGGSGGGGSGGGGSDVQLQESGPGLVKPSQSLSLTCTVTGFSITSDYSWNWIRQFPGNKLEWMGYISYSGHTSYNPSLESRISITRDTSKNQFFLQLNSVTTEDTATYYCTRGNWDVVYWGQGTLVTVSA

SEQ ID NO: 11239 - protein, 246 aa, Artificial Sequence
  Synthetic Polypeptide
EIVLTQSPGSLAVSPGERVTMSCKSSQSVFFSSSQKNYLAWYQQIPGQSPRLLIYWASTRESGVPDRFTGSGSGTDFTLTISSVQPEDLAIYYCHQYLSSRTFGQGTKLEIKRGGGGSGGGGSGGGGSQVQLQQPGAEVVKPGASVKMSCKASGYTFTSYYIHWIKQTPGQGLEWVGVIYPGNDDISYNQKFQGKATLTADKSSTTAYMQLSSLTSEDSAVYYCAREVRLRYFDVWGQGTTVTVSS

SEQ ID NO: 11240 - protein, 250 aa, Artificial Sequence
  Synthetic Polypeptide
DIVMTQSPDSLTVSLGERTTINCKSSQSVLDSSKNKNSLAWYQQKPGQPPKLLLSWASTRESGIPDRFSGSGSGTDFTLTIDSLQPEDSATYYCQQSAHFPITFGQGTRLEIKGGGGSGGGGSGGGGSQVQLVQSGAEVKKPGASVKVSCKASGYTFTNYGMNWVKQAPGQGLKWMGWINTYTGEPTYADDFKGRVTMTSDTSTSTAYLELHNLRSDDTAVYYCARWSWSDGYYVYFDYWGQGTTVTVSS

SEQ ID NO: 11241 - protein, 250 aa, Artificial Sequence
  Synthetic Polypeptide
DVLLTQSPLSLPVTLGQPASISCRSSQTIVHSNGNTYLEWFQQRPGQSPRLLIYQVSNRFSGVPDRFSGSGSGTDFTLKISRVEAEDVGVYYCFQGSHVPRTFGGGTKVEIKRGGGGSGGGGSGGGGSQIQLVQSGSELKKPGASVKVSCKASGYTFTNYGMNWVRQAPGQGLKWMGWINTNTGEPKYAEEFKGRFALSLDTSVSTAYLQINSLKAEDTAVYFCARGYGNYARGAWLAYWGQGTLVTVSS

SEQ ID NO: 11242 - protein, 245 aa, Artificial Sequence
  Synthetic Polypeptide
DHIVLTQSPSSLSASLGDRVTISCRASQDISTYLNWYQQKPDGTVKLLIFYTSRLHAGVPSRFSGSGSGTHHSLTISNLEQEDIATYFCQQGNSLPFTFGSGTKLEIKRGGGGSGGGGSGGGGSQVQLKESGPELEKPGASVKISCKASGYSFTAYSMNWVKQNNGMSLEWIGSIDPYYGDTKYAQKFKGKATLTVDKASSTAYLQLKSLTSEDSAVYYCARRMITTGDWYFDVWGAGTTVTVSS

SEQ ID NO: 11243 - protein, 245 aa, Artificial Sequence; identical to SEQ ID NO: 11242
  Synthetic Polypeptide

SEQ ID NO: 11244 - protein, 245 aa, Artificial Sequence
  Synthetic Polypeptide
DIVMTQSPDSLAVSLGERATINCRASKSVSTSGYSFMHWYQQKPGQPPKLLIYLASNLESGVPDRFSGSGSGTDFTLTISSLQAEDVAVYYCQHSREVPWTFGQGTKVEIKRGGGGSGGGGSGGGGSQVQLVQSGAEVKKPGASVKVSCKASGYTFTNYGMNWVRQAPGQGLEWMGWINTYTGEPTYADAFKGRFAFSLDTSTSTAYLQINSLRSDDTAVYYCARDYGDYGMDYWGQGTTVTVSS

SEQ ID NO: 11245 - protein, 241 aa, Artificial Sequence
  Synthetic Polypeptide
DIVMTQTPLTLSVTIGQPASISCKSSQSLLDSDGKTYLNWLLQRPGQSPERLIYLVSKLDSGVPDRFTGSGSGTDFTLKISRVEAEDLGVYCCWQGTHFPYTFGGGTKVEIKGGGGGSGGGGSGGGGSQVQLQQPGAELVRPGASVKLSCKASGYTFTSYWMNWVKQRPGQGLEWIGMIDPSDSETHYNHIFKDKATLTVDKSSSTAYLQLSSLTSEDSAVYYCARNLYLWGQGTSVTVSS

SEQ ID NO: 11246 - protein, 244 aa, Artificial Sequence
  Synthetic Polypeptide
DIQLTQSPSSLSASVGDRVTITCKASQSVDYEGDSFLNWYQQKPGKAPKLLIYAASNLESGVPSRFSGSGSGTDFTLTISSLQPEDFATYYCQQSNEDPLTFGQGTKVEIKRGGGGSGGGGSGGGGSEVQLVESGGGLVQPGGSLRLSCAASGYTFSSYWIEWVRQAPGKGLEWIGEILPGGGDTNYNEIFKGRATFSADTSKNTAYLQMNSLRAEDTAVYYCTRRVPIRLDYWGQGTLVTVSS

SEQ ID NO: 11247 - protein, 252 aa, Artificial Sequence
  Synthetic Polypeptide
DIVMSQSPSSLAVSVGEKVTMSCKSSQSLLHSSNQKNYLAWYQQKPGQSPKVLIYWASTRESGVPDRFTGSGSGTDFTLTITSVKSEDLAVYYCQQYYSYPWTFGGGTRLEIKRGGGGSGGGGSGGGGSEVQLQQSVAELVKPGASVKMSCKVSGYTLTDHTIHWMKQRPEQGLEWIGYIYPRDGITGYNEKFKGKATLTADTSSSTAYMQLNSLTSEDSAVYFCARWGYSYRNYAYYYDYWGQGTTLTVSS

SEQ ID NO: 11248 - protein, 249 aa, Artificial Sequence
  Synthetic Polypeptide
EIVLTQSPGTLSLSPGERATLSCRASQSVSSSYLAWYQQKPGQAPRLLIYGTSSRATGIPDRFSGSGSGTDFTLTISRLEPEDFAVYYCQQYGSSPFTFGGGTKVEIKRGGGGSGGGGSGGGGSQVQLQESGPGLAKPSETLSLTCTVSGDSITSYYWSWIRQPPGKGLEWIGYIYYSGSTNYNPSLKSRVTISVDTSKNQFSLKLSSVTAADTAVYYCARDQRRIAAAGTHFYGMDVWGQGTTVTVSS

SEQ ID NO: 11249 - protein, 239 aa, Artificial Sequence
  Synthetic Polypeptide
DIQMTQSPSSLSASVGDRVTITCRASQSISLWLNWYQQKPGKAPKLLIYAASTLQSGVPSRFSGSGSGTDFTLTISSLQPEDFATYYCQQYYTSPYTFGQGTKVEIKRGGGGSGGGGSGGGGSQVQLLESGGGLVQPGGSLRLSCAASGFTFSSYAMSWVRQAPGKGLEWVSVIRSSGSSTYYADSVKGRFTISRDNSKNTLYLQMNSLRAEDTAVYYCARGGGYFDYWGQGTLVTVSS

SEQ ID NO: 11250 - protein, 242 aa, Artificial Sequence
  Synthetic Polypeptide
DIQMTQSPSSLSASVGDRVTITCRASQSISSYLNWYQQKPGKAPKLLIYAVSTLQSGVPSRFSGSGSGTDFTLTISSLQPEDFATYYCQQSGTFPPTTFGQGTKVEIKRGGGGSGGGGSGGGGSQVQLLESGGGLVQPGGSLRLSCAASGFTFSSHGMHWVRQAPGKGLEWVSVISGSGSNTGYADSVKGRFTISRDNSKNTLYLQMNSLRAEDTAVYYCARQWGSYAFDSWGQGTLVTVSS

SEQ ID NO: 11251 - protein, 234 aa, Artificial Sequence
  Synthetic Polypeptide
MTQSPKFLLVSAGDRVTLTCKASQSVNNDVYWYQQEPGQSPKLLIYWASTRESGVPDRFTGSGSGTDFTLTISSVQAEDLAVYYCKQSYNLYTFGGGTKLEIKRGGGGSGGGGSGGGGSESGRGLVQPGGSRKLSCAASGFTFSTSGMHWVRQAPEKGLEWVAYISSGSTTIYHADTVKGRFTISRDNPKNTLFLQMTSLRSEDTAMYYCCARSGQFGNYFDYWGQGTTLTVSS

SEQ ID NO: 11252 - protein, 239 aa, Artificial Sequence
  Synthetic Polypeptide
QSPSSLAVSAGEKVTMSCKSSQSLLNSRTRKNYLAWYQQKPGQSPKLLIYWASTRESGVPDRFTGSGSGTDFTLTISSVQAEDLAVYYCKQSNLYTFGGGTKLEIKGGGGSGGGGSGGGGSQVQLEESGPELVKPGASVKLSCKASGYTFTEYIIHWVKQRSGQGLEWIGWFYPGSGSIKYNEKFKDKATLTADKSSSTVYMELSGLTSEDSAVYFCARHDGYSYFDYWGQGTTLTVSS

SEQ ID NO: 11253 - protein, 242 aa, Artificial Sequence
  Synthetic Polypeptide
DIQMTQSPSSLSASLGERVSLTCRATQELSGYLSWLQQKPDGTIKRLIYAASTLDSGVPKRFSGNRSGSDYSLTISSLESEDFADYYCLQYAIYPYTFGGGTKLEIKGGGGSGGGGSGGGGSEVQLQQSGPELVKPGASVKMSCKASGYTFTSYFIHWVKQKPGQGLEWIGFINPYNDGSKYNEKFKGKATLTSDKSSSTAYMELSSLTSEDSAVYYCTRDDGYYGYAMDYWGQGTSVTVSS

SEQ ID NO: 11254 - protein, 247 aa, Artificial Sequence
  Synthetic Polypeptide
DTIVLTQSPASLAVSLGQRATISCRASESVDSYGNSFMHWYQQKPGQPPKLLIYLASNLESGVPARFSGSGSRTDFTLTIDPVEADDAATYYCQQNNYDPWTFGGGTKLEIKGGGGSGGGGSGGGGSEVQLQQSGPELVKPGASVKMSCKASGYTFTSYVMHWVKQKPGQGLEWIGYINPYNDGTKYNEKFKGKATLTSDTSSSTAYMELNSLTSEDSAVYFCARPIYFDNDYFDYWGQGTTLKVSS

SEQ ID NO: 11255 - protein, 241 aa, Artificial Sequence
  Synthetic Polypeptide
DIQMTQSPSSLSASVGDRVTITCKASQDVGIAVAWYQQKPGKVPKLLIYWASTRHTGVPDRFSGSGSGTDFTLTISSLQPEDVATYYCQQYSSYPYTFGQGTKVEIKGGGGSGGGGSGGGGSEVQLVESGGGLVQPGGSLRLSCAASGFDFSRYWMSWVRQAPGKGLEWIGEINPDSSTINYAPSLKDKFIISRDNAKNSLYLQMNSLRAEDTAVYYCARPDGNYWYFDVWGQGTLVTVSS

SEQ ID NO: 11256 - protein, 242 aa, Artificial Sequence
  Synthetic Polypeptide
DIVMTQSQKSMSTSVGDRVSITCKASQDVITGVAWYQQKPGQSPKLLIYSASYRYTGVPDRFTGSGSGTDFTFTISNVQAEDLAVYYCQQHYSTPLTFGAGTKLELKGGGGSGGGGSGGGGSQVQLQQPGAELVRPGASVKLSCKASGYSFTTYWMNWVKQRPGQGLEWIGMIHPSDSETRLNQKFKDKATLTVDKSSSTAYMQLSSPTSEDSAVYYCARSTMIATRAMDYWGQGTSVTVSS

SEQ ID NO: 11257 - protein, 248 aa, Artificial Sequence
  Synthetic Polypeptide
QSVLTQPPSVSGAPGQRVTISCTGSGSNIGAPYDVSWYQQLPGTAPKLLIYHNNKRPSGVPDRFSGSKSGTSASLAITGLQAEDEADYYCATVEAGLSGSVFGGGTKLTVLGAGGGGSGGGGSGGGGSQVQLVQSGAEVKKPGASVKVSCKVSGYTLTELSIHWVRQAPGKGLEWMGGFDPEENEIVYAQRFQGRVTMTEDTSTDTAYMELSSLRSEDTAVYYCAIVGSFSPLTLGLWGQGTMVTVSS

SEQ ID NO: 11258 - protein, 248 aa, Artificial Sequence
  Synthetic Polypeptide
QSVLTQPPSVSGAPGQRVTISCTGSGSNIGAPYDVSWYQQLPGTAPKLLIYHNNKRPSGVPDRFSGSKSGTSASLAITGLQAEDEADYYCQSYDSSSISTIFGGGTKLTVLGAGGGGSGGGGSGGGGSQVQLVQSGAEVKKPGASVKVSCKVSGYTLTELSIHWVRQAPGKGLEWMGGFDPEENEIVYAQRFQGRVTMTEDTSTDTAYMELSSLRSEDTAVYYCAIVGSFSGIAYRPWGQGTMVTVSS

SEQ ID NO: 11259 - protein, 246 aa, Artificial Sequence
  Synthetic Polypeptide
DIQMTQSPSSLSASVGDRVTITCSASSSVSYMYWYQQKPGKAPKLLIYLTSNLASGVPSRFSGSGSGTDFTLTISSLQPEDFATYYCQQWRSNPFTFGQGTKLEIKRGGGGSGGGGSGGGGSQITLKESGPTLVKPTQTLTLTCTFSGFSLSTSGMGVGWIRQPPGKALEWLAHIWWDDVKRYSPSLKSRLTITKDTSKNQVVLTMTNMDPVDTATYYCARIVSFDNDVVSAMDYWGQGTLVTVSS

SEQ ID NO: 11260 - protein, 241 aa, Artificial Sequence
  Synthetic Polypeptide
EIVMTQSPATLSVSPGERATLSCKASQSVSNDVVWYQQKPGQAPRLLIYYASNRYTGIPARFSGSGSGTEFTLTISSLQSEDFAVYYCQQDYTSPWTFGQGTKLEIKRGGGGSGGGGSGGGGSQVQLVQSGAEVKKPGASVKVSCKASGYTFTNYGMNWVRQAPGQGLEWMGWINTYTGEPTYADDFKGRVTMTTDTSTSTAYMELRSLRSDDTAVYYCARIGDSSPSDYWGQGTLVTVSS

SEQ ID NO: 11261 - protein, 241 aa, Artificial Sequence
  Synthetic Polypeptide
DILLTQSPVILSVSPGERVSFSCRASQSIGTNIHWYQQRTNGSPRLLIKYASESISGIPSRFSGSGSGTDFTLSINSVESEDIADYYCQQNNNWPTTFGAGTKLELKGGGGSGGGGSGGGGSQVQLKQSGPGLVQPSQSLSITCTVSGFSLTNYGVHWVRQSPGKGLEWLGVIWSGGNTDYNTPFTSRLSINKDNSKSQVFFKMNSLQSNDTAIYYCARALTYYDYEFAYWGQGTLVTVSA

SEQ ID NO: 11262 - protein, 241 aa, Artificial Sequence
  Synthetic Polypeptide
EIQLVQSGAEVKKPGESLRISCKGSGFNIEDYYIHWVRQMPGKGLEWMGRIDPENDETKYGPIFQGHVTISADTSINTVYLQWSSLKASDTAMYYCAFRGGVYWGQGTTVTVSSGGGGSGGGGSGGGGSDVVMTQSPDSLAVSLGERATINCKSSQSLLDSDGKTYLNWLQQKPGQPPKRLISLVSKLDSGVPDRFSGSGSGTDFTLTISSLQAEDVAVYYCWQGTHFPGTFGGGTKVEIK

SEQ ID NO: 11263 - protein, 249 aa, Artificial Sequence
  Synthetic Polypeptide
ELQMTQSPSSLSASVGDRVTITCRASQSISSYLNWYQQKPGQPPKLLIYWASTRESGVPDRFSGSESGTNYTLTISSLQPEDFATYFCQQSDSLPITFGQGTRLDIQGGGGSGGGGSGGGGSEVQLLESGGGVVQPGRSLRLSCAASGFTFSSYGMHWVRQAPGKGLEWVAVISYDGSNKYYADSVKGRFTISRDNSKNTLYLQMNSLRAEDTAVYYCAKDMGWGSGWRPYYYYGMDVWGQGTTVTVSS

SEQ ID NO: 11264 - protein, 248 aa, Artificial Sequence
  Synthetic Polypeptide
ELVMTQSPSSLTVTAGEKVTMSCKSSQSLLNSGNQKNYLTWYQQKPGQPPKLLIYWASTRESGVPDRFTGSGSGTDFTLTISSVQAEDLAVYYCQNDYSYPLTFGAGTKLEIKGGGGSGGGGSGGGGSEVQLLEQSGAELVRPGTSVKISCKASGYAFTNYWLGWVKQRPGHGLEWIGDIFPGSGNIHYNEKFKGKATLTADKSSSTAYMQLSSLTFEDSAVYFCARLRNWDEPMDYWGQGTTVTVSS

SEQ ID NO: 11265 - protein, 246 aa, Artificial Sequence
  Synthetic Polypeptide
DIQMTQSPSSLSASVGDRVTITCRASQSISSYLNWYQQKPGKAPKLLIYAASSLQSGVPSRFSGSGSGTDFTLTISSLQPEDLATYYCQQSYSTPFTFGPGTKVDIKGGGGSGGGGSGGGGSVHEVQLVQSGAEVKKPGSSVKVSCKASGGTFSSYAISWVRQAPGQGLEWMGGIIPIFGTANYAQKFQGRVTITADKSTSTAYMELSSLRSEDTAVYYCATFALFGFREQAFDIWGQGTTVTVSS

SEQ ID NO: 11266 - protein, 240 aa, Artificial Sequence
  Synthetic Polypeptide
YIHVTQSPSSLSVSIGDRVTINCQTSQGVGSDLHWYQHKPGRAPKLLIHHASSVEDGVPSRFSGTGFHTSFNLTINDLQADDIGTYYCQVLQSFGRGSRLDTKGGGGSGGGGSGGGGSRAHLVQSGTAMKKPGASVRVSCQTSGYTFTAHILFWFRQAPGRGLEWVGWIKPQYGAVNFGGGFRDRVTLTRDVYREIAYMDIRGLKPDDTAVYYCARDRSYGDSSWALDAWGQGTTVVVSA

SEQ ID NO: 11267 - protein, 245 aa, Artificial Sequence
  Synthetic Polypeptide
DIVLTQSPLSLAVSLGQPAIISCKASQSVSFAGTSLMHWYHQKPGQQPRLLIYRASNLEAGVPDRFSGSGSKTDFTLTISPVEAEDAATYYCQQSREYPYTFGGGTKLEIKRGGGGSGGGGSGGGGSQVQLVQSGAEVVKPGASVKISCKASGYTFTGYFMNWVKQSPGQSLEWIGRIHPYDGDTFYNQKFQGKATLTVDKSSNTAHMELLSLTSEDFAVYYCTRYDGSRAMDYWGQGTTVTVSS

SEQ ID NO: 11268 - protein, 241 aa, Artificial Sequence
  Synthetic Polypeptide
DVVMTQTPLSLPVTPGEPASISCRSSQSLVHRNGNTYLHWYLQKPGQSPKLLIHKVSNRFSGVPDRFSGSGSGTDFTLKISRVEAEDLGVYFCSQSTHVPPLTFGAGTKLELKGGGGSGGGGSGGGGSEVQLVQSGAEVEKPGASVKISCKASGSSFTGYNMNWVRQNIGKSLEWIGAIDPYYGGTSYNQKFKGRATLTVDKSTSTAYMHLKSLRSEDTAVYYCVSGMEYWGQGTSVTVSS

SEQ ID NO: 11269 - protein, 239 aa, Artificial Sequence
  Synthetic Polypeptide
EIVMTQTPATLSVSAGERVTITCKASQSVSNDVTWYQQKPGQAPRLLIYSASNRYSGVPARFSGSGYGTEFTFTISSVQSEDFAVYFCQQDYSSFGQGTKLEIKRGGGGSGGGGSGGGGSQVQLVESGPGVVQPGRSLRISCAVSGFSVTNYGVHWVRQPPGKGLEWLGVIWAGGITNYNSAFMSRLTISKDNSKNTVYLQMNSLRAEDTAMYYCASRGGHYGYALDYWGQGTLVTVSS

SEQ ID NO: 11270 - protein, 242 aa, Artificial Sequence
  Synthetic Polypeptide
DIQMTQTASSLPASLGDRVTISCSASQDISNYLNWYQQKPDGTVKLLIFYSSNLHSGVPSRFSGGGSGTDYSLTISNLEPEDIATYFCHQYSKLPWTFGGGTKLEIKRGGGGSGGGGSGGGGSEVTLVESGGDFVKPGGSLKVSCAASGFAFSHYAMSWVRQTPAKRLEWVAYISSGGSGTYYSDSVKGRFTISRDNAKNTLYLQMRSLRSEDSAMYFCTRVKLGTYYFDSWGQGTTLTVSS

SEQ ID NO: 11271 - protein, 244 aa, Artificial Sequence
  Synthetic Polypeptide
QFVLTQSPSASAALGASAKLTCTLSSAHKTYTIDWYQQQKGKAPRYLIQVKSDGTYTKATGVPDRFSGSSSGADRYLIIPSVQADDEADYYCGTDYTGGYVFGGGTQLTVTGGGGSGGGGSGGGGSEQLKESGGGLFKPTDTLTLTCTVSGFSLSYYGVNWVRQAPGNGLEWIGTIGGSGDTYYASWAKSRSTIIRNTNENTVTLKMTSLTAADTATYFCVRYANIGYEYFNVWGPGTLVTVSS

SEQ ID NO: 11272 - protein, 243 aa, Artificial Sequence
  Synthetic Polypeptide
DIQMTQSPSSLSASVGDRVTITCRASQGISSWLAWYQQKPEKAPKSLIYAASSLQSGVPSRFSGSGSGTDFTLTISSLQPEDFATYYCQQYNSYPPTFGGGTKVEIKGGGGSGGGGSGGGGSEVQLVESGGGLVQPGESLRLSCVASGFTFSRYKMNWVRQAPGKGLEWVSYISRSGRDIYYADSVKGRFTISRDNAKNSLYLQMNSLRDEDTAVYYCAGTVTTYYYFGMDVWGHGTTVTVSS

SEQ ID NO: 11273 - protein, 242 aa, Artificial Sequence
  Synthetic Polypeptide
QSVVTQPPSMSAAPGQQVTISCSGGNSNIERNYVSWYLQLPGTAPKLVIFDNDRRPSGIPDRFSGSKSGTSATLGITGLQTGDEADYYCGTWDSSLRGWVFGGGTKLTVLGGGGGSGGGGSGGGGSEVQLVESGGGLIQPGGSLRLSCAASGFTFSNYAMNWVRQAPGKGLEWVSTINGRGSSTIYADSVKGRFTISRDNSKNTLYLQMNSLRAEDTATYYCARYISRGLGDSWGQGTLVTV

SEQ ID NO: 11274 - protein, 243 aa, Artificial Sequence
  Synthetic Polypeptide
QSVLTQPPSASGTPGQRVTISCSGSRSNVGGNYVFWYQQVPGATPKLLIYRSNQRPSGVPDRFAGSKSGSSASLAISGLRSEDEADYYCATWDDSLSGFVFGTGTKVTVLGGGGGSGGGGSGGGGSEVQLVESGGGLVKPGGSLRLSCAASGFTFSDYYMSWIRQAPGKGLEWVSYISSSGSTIYYADSVKGRFTISRDNAKNSLYLQMNSLRAEDTAVYYCARGYGKAYDQWGQGTLVTVSS

SEQ ID NO: 11275 - protein, 242 aa, Artificial Sequence
  Synthetic Polypeptide
DIQMTQSPSSLSASVGDRVTITCRASQDVNTAVAWYQQKPGKAPKLLIYSASFLESGVPSRFSGSRSGTDFTLTISSLQPEDFATYYCQQHYTTPPTFGQTKVEIKRGGGGSGGGGSGGGGSEVQLVESGGGLVQPGGSLRLSCAASGFNIKDTYIHWVRQAPGKGLEWVARIYPTNGYTRYADSVKGRFTISADTSKNTAYLQMNSLRAEDTAVYYCSRWGGDGFYAMDVWGQGTLVTVSS

SEQ ID NO: 11276 - protein, 255 aa, Artificial Sequence
  Synthetic Polypeptide
QSALTQPPSASGSPGQSITISCTGTSNNFVSWYQQHAGKAPKLVIYDVNKRPSGVPDRFSGSKSGNTASLTVSGLQTDDEAVYYCGSLVGNWDVIFGGGTKLTVLGGGGSGGGGSGGGGSQPQLQESGPTLVEASETLSLTCAVSGDSTAACNSFWGWVRQPPGKGLEWVGSLSHCASYWNRGWTYHNPSLKSRLTLALDTPKNLVFLKLNSVTAADTATYYCARFGGEVLRYTDWPKPAWVDLWGRGTLVTVSS

SEQ ID NO: 11277 - protein, 250 aa, Artificial Sequence
  Synthetic Polypeptide
ELVLTQSPGTLSLSAGERATLSCRASQSVSSGSLAWYQQKPGQAPRLLIYGASTRATGIPDRFSGSGSGTDFTLTIGRLEPEDLAVYYCQQYGTSPYTFGQGTKLEIGGGGSGGGGSGGGGSLEQSGAEVKKPGSSVQVSCKASGGTFSMYGFNWVRQAPGHGLEWMGGIIPIFGTSNYAQKFRGRVTFTADQATSTAYMELTNLRSDDTAVYYCARDFGPDWEDGDSYDGSGRGFFDFWGQGTLVTVSS

SEQ ID NO: 11278 - protein, 230 aa, Artificial Sequence
  Synthetic Polypeptide
DIQMTQSPSSLSASVGDRVTITCQASQDINNYLNWYQQKPGKAPKLLIYDASNLQTGVPSRFSGSGSGTDFTFTIEDIATYYCQQYTFGPGTKVDIKGGGGSGGGGSGGGGSEVQLLESGGGLVQPGGSLRLSCAASGFTFSWYSMTWVRQAPGKGLEWVSSIVPWGDFTQYADSVKGRFTISRDNSKNTLYLQMNSLRAEDTAVYYCAKGPGWGSFDLWGRGTLVTVSS

SEQ ID NO: 11279 - protein, 240 aa, Artificial Sequence
  Synthetic Polypeptide
DIQMTQSPSSLSASVGDRVTITCTASLSVSSTYLHWYQQKPGSSPKLWIYSTSNLASGVPSRFSGSGSGTSYTLTISSLQPEDFATYYCHQYHRSPLTFGGGTKVEIKRGGGGSGGGGSGGGGSEVQLVESGGGLVQPGGSLRLSCAASGFSLTKYGVHWVRQAPGKGLEWVGVKWAGGSTDYNSALMSRFTISKDNAKNSLYLQMNSLRAEDTAVYYCARDHRDAMDYWGQGTLVTVSS

SEQ ID NO: 11280 - protein, 244 aa, Artificial Sequence
  Synthetic Polypeptide
DIQMTQSPSSLSASVGDRVTITCKASQDVGTAVAWYQQKPGKAPKLLIYSASYRSTGVPSRFSGSGSGTDFTLTISSLQPEDFATYYCQHHYSAPWTFGGGTKVEIKGGGGSGGGGSGGGGSEVQLVESGGGLVQPGGSLRLSCAASGFTFSRNGMSWVRQAPGKGLEWVATVSSGGSYIYYADSVKGRFTISRDNAKNSLYLQMNSLRAEDTAVYYCARQGTTALATRFFDVWGQGTLVTVSS

SEQ ID NO: 11281 - protein, 240 aa, Artificial Sequence
  Synthetic Polypeptide
DIQMTQSFSSLSASVGDRVTITCRASQDISNYLNWYQQKPGKAPKLLIYYTSRLHSGVPSRFSGSGSGTDYTLTISSLQPEDFATYFCQQGNTLPWTFGGGTKLEIKRGGGGSGGGGSGGGGSEVQLVQSGGGLVQSGGSLRLSCRASGYTFTRYWMLWVRQRPGKGLEWVAEINPRNDRTNYNEKFKTRFTISVDRSKNTLYLQMDSLRAEDTAVYFCALGGGYAMDYWGQGTLVTVSS

SEQ ID NO: 11282 - protein, 240 aa, Artificial Sequence
  Synthetic Polypeptide
DIQMTQSPPSLSASVGGKVTITCKASQDIDRYMAWYQDKPGKGPKLLIHDTSTLQPGIPSRFSGSGSGRDYSFSISNLEPEDIATYYCLQYDNLWTFGGGTKLEIKRGGGGSGGGGSGGGGSQVQLVQSGAELVKPGASVKMSCKASGYIFTNYNIHWVKKSPGQGLEWIGAIYPGNGDAPYSQKFQDRATLTADTSSSTTYMELSSLTSEDSAVYYCVRANWDVAFAYWGQGTLVSVSS

SEQ ID NO: 11283 - protein, 241 aa, Artificial Sequence
  Synthetic Polypeptide
DIQMTQSPASLSASVGETVTITCRVSGNIHNYLAWYQQKQGKSPQLLVYNAKTLADGVPSRFSGSGSGTQYSLKINSLQPEDFGSYYCQHFWSNPYTFGGGTKLEIKGGGGSGGGGSGGGGSQVQLQQSGASVKVSCKASELVRPGTGYAFTNYLIEWVKQRPGQGLEWIGVINPGSGGTNYNEKFKGKATLTADKSSSTAYMQLSSLTSDDSAVYFCARYRSYDWYFDVWGAGTTVTVSS

SEQ ID NO: 11284 - protein, 241 aa, Artificial Sequence
  Synthetic Polypeptide
DIQMTQSPASLSASVGETVTIICRASVNIYSYLAWYQQKQGKSPQLLVYNAKILAEGVPSRFSGSGSGTQFSLKINSLQPEDFGSYYCQHHYGTFTFGSGTKLEIKRGGGGSGGGGSGGGGSQVQLKESGPGLVAPSQSLSITCTISGFSLTSYGVHWVRQPPGKGLEWLVVIWSDGSTTYNSALKSRLSISKDNSKSQVFLKMNSLQTDDTAIYYCASHYGSTLAFASWGHGTLVTVSAA

SEQ ID NO: 11285 - protein, 249 aa, Artificial Sequence
  Synthetic Polypeptide
DIVMTQSHKFMSTSVGDRVSVTCKASQNVGNNVAWYQQKPGQSPKVLIYSASYRYSGVPDRFTGSGSGTDFTLTISNVQSEDLAEYFCQQYNTYPFTFGSGTKLEIKGGGGSGGGGSGGGGSEVQLEESGGGLVQPGGSMKLSCVASGFTFSNYWMNWVRQSPEKGLEWVAEIRFKSHNYATHFAESVKGRFTISRDDSKSSVYLQMNNLRAEDTGIYYCTRRIGNSDYDWWYFDVWGAGTSVTVSSAS

SEQ ID NO: 11286 - protein, 241 aa, Artificial Sequence
  Synthetic Polypeptide
DIQMTQSSSSFSVSLGDRVTITCKASEDIYIRLAWYQQKPGNAPRLLISAATSLETGIPSRFSGSGSGEDYTLTITSLQTEDVATYYCQQYWTTPWTFGGGTKLEIKRGGGGSGGGGSGGGGSDVQLQESGPGLVKPSQSLSLTCTVTGYSITIDYTWNWIRQFPGNKLEWMGYITYSGSTDYNPSLKSRSSITRDTSMNQFFLQLNSVTTEDTATYYCARLGRRYALDYWGQGTSVTVSS

SEQ ID NO: 11287 - protein, 240 aa, Artificial Sequence
  Synthetic Polypeptide
DVQLQESGPGLVKPSQSLSLTCTVTGYSITSDYTWNWIRQFPGNKLEWMGYITYSGSTSYNPSLKSRNSITRDTSKNQFFLQLNSVTTEDTATYYCARLGRRYTMDYWGQGTSVTVSSGGGGSGGGGSGGGGSDIQMTQSSSSFSVSLGDRVTITCMASEDIYIRLAWYQQKPGNAPRLLISAATSLETGVPSRFSGSGSGKDYTLSITSLQTEDVGTYYCQQYWSSPWTFGGGTKLEIN

SEQ ID NO: 11288 - protein, 240 aa, Artificial Sequence
  Synthetic Polypeptide
DIQMTQSSSSFSVSLGDRVTITCMASEDIYIRLAWYQQKPGNAPRLLISAATSLETGVPSRFSGSGSGKDYTLSITSLQTEDVGTYYCQQYWSSPWTFGGGTKLEINGGGGSGGGGSGGGGSDVQLQESGPGLVKPSQSLSLTCTVTGYSITSDYTWNWIRQFPGNKLEWMGYITYSGSTSYNPSLKSRNSITRDTSKNQFFLQLNSVTTEDTATYYCARLGRRYTMDYWGQGTSVTVSS

SEQ ID NO: 11289 - protein, 242 aa, Artificial Sequence
  Synthetic Polypeptide
DQIVLTQSPAIMSASPGEKVTISCSASSSVSYMYWYQQKPGSSPKPWIYRTSNLASGVPARFSGSGSGTSYSLTISNMEAEDAAAYYCQQYHSYPTTFGGGTKLEVKGGGGSGGGGSGGGGSEVQLVESGGGLVQPKGSLKLSCAASGFSFNTYAMNWVRQAPGKGLEWIAHIRSKSNNFATYYADSVKDRFSISRDASENILFLQMNNLKTEDTAMYYCVRQGGDFPMDYWGQGTSVTVSS

SEQ ID NO: 11290 - protein, 243 aa, Artificial Sequence
  Synthetic Polypeptide
DIQMTQSPSSLSASVGDRVTITCRASQSISSYLNWYQQKPGKAPKLLIYDASNLETGVPSRFSGSGSGTDFTFTISSLQPEDIATYYCQQYDNLPLTFGGGTKVDIKRGGGGSGGGGSGGGGSQVQLVESGGGVVQPGRSLRLSCAASGFTFSSYAMHWVRQAPGKGLEWVAVISYDGSNKYYADSVKGRFTISRDNSKNTLYLQMNSLRAEDTAVYYCARAHNSSSWSFDYWGQGTLVTVSS

SEQ ID NO: 11291 - protein, 252 aa, Artificial Sequence
  Synthetic Polypeptide
DVVMTQSPLSLPVSLGDQASISCRSSQRLVHSNGNTYLHWYLQKPGQSPKLLIYRVSNRFPGVPDRFSGSGSGTDFTLKISRVEAEDLGIYFCSQSTHVPYTFGGGTKLEIKRGGGGSGGGGSGGGGSEVRLQQSGPDLIKPGASVKMSCKASGYTFTGYVMHWVKQRPGQGLEWIGFINPYNDDIQSNERFRGKATLTSDKSSTTAYMELSSLTSEDSAVYYCARGAGYNFDGAYRFFDFWGQGTTLTVSS

SEQ ID NO: 11292 - protein, 243 aa, Artificial Sequence
  Synthetic Polypeptide
SYELTQPPSVSVSPGQTATISCSGDQLGGKYGHWYQKKPGQSPVLVLYQDRKRPAGIPERFSGSSSGNTITLTISGTQAVDEADYYCQAWDTNLGGVFGGGTKVTVLGQGGGGSGGGGSGGGGSQVQLVESGAEVKKPGASVKVSCKASGYTFTGYYMHWVRQAPGQGLEWMGRINPNSGGTNYAQKFQGRVTMTRDTSISTAYMELSRLRSDDTAVYYCASPRGRGSAFDIWGQGTLVTVSS

SEQ ID NO: 11293 - protein, 246 aa, Artificial Sequence
  Synthetic Polypeptide
NFMLTQPHSVSESPGKTVTISCTRSSGSIASKYVQWYQQRPGSSPTTVIYEDNQRPSGVPDRFSGSIDTSSNSASLTISGLRTEDEADYYCHSYDSNNHSVFGGGTKVTVLGQGGGGSGGGGSGGGGSEVQLVESGGGVVQPGGSLRLSCAASGFTFSSYAMSWVRQAPGKGLEWVSAISGSGGSTYYADSVKGRFSISRDNSKNTLYLQMNSLRAEDTAVYYCARTRSSGAFDIWGQGTLVTVSS

SEQ ID NO: 11294 - protein, 242 aa, Artificial Sequence
  Synthetic Polypeptide
DIQMNQSPSSLSASLGDTITITCHASQNINVWLSWYQQKPGNIPKLLIYKASNLHTGVPSRFSGSGSGTGFTITISSLQPEDIATYYCQQGQSYPWTFGGGTKLEIKRGGGGSGGGGSGGGGSEVQLQQSGPELVKPGASVKISCKASGYSFTGYFMNWVKQSHGKSLEYIGRFNPYNGETLYNQKFKGKATLTVDKSSSTVHMELLSVTSEDSAVYYCGRSGNDDAMDYWGQGTSVTVSSA

SEQ ID NO: 11295 - protein, 239 aa, Artificial Sequence
  Synthetic Polypeptide
DILLTQSPAILSVSPGERVSFSCRASQNIGTSIHWYQQRTNGSPRLLIKYASESVSGIPSRFSGSGSGTDFTLSINSVESEDIADYYCQHTNSWPTTFGGGTKLEIKRGGGGSGGGGSGGGGSQVQLQQSDAELVKPGASVKISCKASGYTFTDHAIHWVKQKPEQGLEWIGYFSPGNGDIKYNEKFKGKATLTADKSSSTAYMQLNSLTSEDSAVYFCKRSYGNYDYWGQGTTLTVSS

SEQ ID NO: 11296 - protein, 244 aa, Artificial Sequence
  Synthetic Polypeptide
DIVMTQSPDSLAVSLGERATINCKSSQSLLNSGDQKNYLTWYQQKPGQPPKLLIYWASTRESGVPDRFSGSGSGTDFTLTISSLQAEDVAVYYCQNDYSYPLTFGQGTKVEIKGGGGSGGGGSGGGGSQVQLVQSGAEVKKTGSSVKVSCKASGYTFTDHAIHVWRQAPGQALEWMGHFSPGNTDIKYNDKFKGRVTLTVDRSMSTAYMELSSLRSEDTAMYYCKTSTFFFDYWGQGTMVTVSS

SEQ ID NO: 11297 - protein, 243 aa, Artificial Sequence
  Synthetic Polypeptide
DIQMTQSPSSLSASVGDRVTITCKASQDVSIAVAWYQQKPGKAPKVLIYSASYRYTGVPDRFSGSGSGTDFTFTISSLQPEDIAVYYCQQHYITPLTFGGGTKVEIKGGGGSGGGGSGGGGSQIQLVQSGHEVKKPGASVKVSCKASGYTFTNYGMNWVRQAPGQGLEWMGWINTKTGEPTYAEEFKGRFVFSLETSASTAYLQISSLKAEDTAMYFCGRGGYGSSYWYFDVWGQGTTVTVSS

SEQ ID NO: 11298 - protein, 246 aa, Artificial Sequence
  Synthetic Polypeptide
QAVVTQPPSASGTPGQRVTISCSGSSSNIGSNTVNWYQQVPGTAPKLLIYSNNQRPSGVPDRFSGSKSGTSASLAISGLQSEDEADYYCAAWDDSLNGWVFGGGTKLTVLGGGGSGGGGSGGGGSQMQLVQSGAEVKEPGESLRISCKGSGYSFTNFWISWVRQMPGKGLEWMGRVDPGYSYSTYSPSFQGHVTISADKSTSTAYLQWNSLKASDTAMYYCARVQYSGYYDWFDPWGQGTLVTVSS

SEQ ID NO: 11299 - protein, 240 aa, Artificial Sequence
  Synthetic Polypeptide
DIQMTQSPSTLSASVGDRVTITCRASQNINKWLAWYQQRPGKAPQLLIYKASSLESGVPSRFSGSGSGTEYTLTISSLQPDDFATYYCQQYNSYATFGQGTKVEIKRGGGGSGGGGSGGGGSQVQLVQSGAEVKKPGESLKISCKGSGYNFSNKWIGWVRQLPGRGLEWIAIIYPGYSDITYSPSFQGRVTISADTSINTAYLHWHSLKASDTAMYYCVRHTALAGFDYWGLGTLVTVSS

SEQ ID NO: 11300 - protein, 245 aa, Artificial Sequence
  Synthetic Polypeptide
QSVVTQPPSVSVAPGKTARITCGRNNIGSKSVHWYQQKPGQAPVLVVYDDSDRPSGIPERFSGSNSGNTATLTISRVEAGDEADYYCQVWDSSSDHVVFGGGTKLTVLGGGGGSGGGGSGGGGSEVQLVQSGGGVVRPGGSLRLSCAASGFTFDDYGMSWVRQAPGKGLEWVSGINWNGGSTGYADSVRGRFTISRDNAKNSLYLQMNSLRAEDTALYYCARERGYGYHDPHDYWGQGTLVTVSS

SEQ ID NO: 11301 - protein, 244 aa, Artificial Sequence
  Synthetic Polypeptide
DIVLTQSPASLAVSLGQRATISCRASESVDNYGNTFMHWYQQKPGQPPKLLIYRASNLESGIPARFSGSGSRTDFTLTINPVEADDVATYYCQQSNEDPPTFGAGTKLELKGGGGSGGGGSGGGGSQIQLVQSGPELKKPGETVKISCKASGYIFTNYGMNWVKQAPGKSFKWMGWINTYTGESTYSADFKGRFAFSLETSASTAYLHINDLKNEDTATYFCARSGGYDPMDYWGQGTSVTVSS

SEQ ID NO: 11302 - protein, 242 aa, Artificial Sequence
  Synthetic Polypeptide
EIVLTQSPGTLSLSPGERATLSCRASQSVSNTYLAWYHQRPGQAPRLLIYGASSRATGIPDRFSGSGSGTDFALTISSLEPEDFAVYYCQQYSNSWTFGQGTKVEIKRGGGGSGGGGSGGGGSQVQLVESGGGVVQPGRSLRLSCAASGFTFSSYDMHWVRQAPGKGLEWVAVISYDGTNEYYADSVKGRFTISRDTSKNTLYLQMNSLRAEDTAVYYCARERYFDWSFDYWGQGTLVSVSS

SEQ ID NO: 11303 - protein, 241 aa, Artificial Sequence
  Synthetic Polypeptide
ELTQDPAVSVALGQTVRITCQGDSLRSNYANWYQQKPGQAPVLVIYGQNNRPSGIPDRFSGSSSGNTASLTITGAQAADEADYYCDSRVSTGNHVVFGGGTKLTVLGQGGGGSGGGGSGGGGSEVQLVQSGAEVKKPGASVKVSCKASGYTFTSYAMHWVRQAPGQRLEWMGWINAGNGNTKYSQKFQGRVTITRDTSASTAYMELSSLRSEDTAVYYCARDISYGSFDYWGQGTLVTVSS

SEQ ID NO: 11304 - protein, 237 aa, Artificial Sequence
  Synthetic Polypeptide
DIQMTQSPSSLSASVGDRVTITCSATSSISYMHWYQQKPGKAPKGWIYDTSKLAHGVPSRFSGSGSGTDFTLTISSLQPEDFATYYCHQRRSYPFTFGQGTKVEIKGGGGSGGGGSGGGGSEVQLVQSGAEVKKPGASVKVSCKASGYTFTNFWIHWVRQAPGQGLEWIGEIDPSDSYTNYNQKFKGRVTITRDTSTSTAYLELSSLRSEDTAVYYCAREITTVDYWGQGTLVTVSS

SEQ ID NO: 11305 - protein, 244 aa, Artificial Sequence
  Synthetic Polypeptide
DIQMTQSPSSLSASVGDRVTITCKASQGFNKYVAWYQQKPGKAPKLLIYYTSTLQPGVPSRFSGSGSGRDYTLTISSLQPEDFATYYCLQYGNLLYAFGQGTKVEIKRGGGGSGGGGSGGGGSEVQLVQSGAEVKKPGASVKVSCKASGYTFTSYWIGWVRQAPGQGLEWIGDIYPGGGYTNYNEKFKGRVTITRDTSTSTAYLELSSLRSEDTAVYYCARLDGSSYRGAMDSWGQGTLVTVSS

SEQ ID NO: 11306 - protein, 240 aa, Artificial Sequence
  Synthetic Polypeptide
DIQMTQSPSSLSASVGDRVTITCRASQDIRYYLNWYQQKPGKAPKLLIYVASSLQSGVPSRFSGSGSGTEFTLTVSSLQPEDFATYYCLQVYSTPRTFGQGTKVEIKGGGGSGGGGSGGGGSEVQLVESGGGLAKPGGSLRLSCAASGFRFTFNNYYMDWVRQAPGQGLEWVSRISSSGDPTWYADSVKGRFTISRENAKNTLFLQMNSLRAEDTAVYYCASLTTGSDSWGQGVLVTVSS

SEQ ID NO: 11307 - protein, 241 aa, Artificial Sequence
  Synthetic Polypeptide
EIVMTQSPATLSVSPGERATLSCRASQSVSRNLAWYQQKPGQAPRLLIYGASTRATGIPARFSGSGSGTEFTLTIGSLQSEDFAVYYCQQYKTWPRTFGQGTNVEIKGGGGSGGGGSGGGGSQVQLQQWGAGLLKPSETLSLTCAVFGGSFSGYYWSWIRQPPGKGLEWIGEINHRGNTNDNPSLKSRVTISVDTSKNQFALKLSSVTAADTAVYYCARERGYTYGNFDHWGQGTLVTVSS

SEQ ID NO: 11308 - protein, 247 aa, Artificial Sequence
  Synthetic Polypeptide
DIQMTQSPSSLSASVGDRVTITCKASKNIRSYLAWYQQKPGKAPKLLIYSGSTLHSGVPSRFSGSGSGTDFTLTISSLQPEDFATYYCQQHHEYPLTFGQGTKVEIKRGGGGSGGGGSGGGGSQVQLQESGPGLVKPSETLSLTCTVSGYTITSGYDWSWIRQPPGKGLEWIGYINYGGSTNYKPSLGSRVTISVDTSKNQFSLKLSSVTAADTAVYYCARYNEYKSYIYDWYFDFWGQGTLVTVSS

SEQ ID NO: 11309 - protein, 249 aa, Artificial Sequence
  Synthetic Polypeptide
QSVVTQPPSVSAAPGQKVTISCSGSSSNIGNNYVSWYQQLPGTAPKLLIYDNNKRPSGIPDRFSGSKSGTSATLGITGLQTGDEADYYCGTWDGSLYTMLFGGGTKLTVLGGGGSGGGGSGGGGSEVQLVESGGGLVKPGGSLRLSCAASGFTFSNAWMSWVRQAPGKGLEWVGFIRSKAYGGTTEYAASVKGRFTISRDDSKSIAYLQMNNLKTEDTAVYYCARDGLYSSSWYDSDYWGQGTLVTVSS

SEQ ID NO: 11310 - protein, 254 aa, Artificial Sequence
  Synthetic Polypeptide
QSVLTQPPSVSGAPGQRVTISCTGSSSNIGAGYDVHWYQQLPGTAPKLLIFGNSNRPSGVPDRFSGFKSGTSASLAITGLQAEDEADYFCQSYDSSLSGSGVFGTGTKVTVLGGGGGSGGGGSGGGGSQMQLVQSGGGLVQPGRSLRLSCAASGFTFDDYAMHWVRQAPGKGLEWVSGISWNSGSIGYADSVKGRFTISRDNAKNSLYLQMNSLRAEDTALYYCAKDIHSGSYYGLLYYAMDVWGQGTTVTVSS

SEQ ID NO: 11311 - protein, 254 aa, Artificial Sequence
  Synthetic Polypeptide
LPVLTQPPSASGTPGQRVTISCSGRSSNIGSNSVNWYRQLPGAAPKLLIYSNNQRPPGVPVRFSGSKSGTSASLAISGLQSEDEATYYCATWDDNLNVHYVFGTGTKVTVLGSRGGGGSGGGGSGGGGSLEMAQVQLVQSGAEVKKPGSSVKVSCKASGGTFSSYAISWVRQAPGQGLEWMGRIIPILGIANYAQKFQGRVTITADKSTSTAYMELSSLRSEDTAVYYCARGGYYSHDMWSEDWGQGTLVTVSS

SEQ ID NO: 11312 - protein, 243 aa, Artificial Sequence
  Synthetic Polypeptide
DIVLTQSPASLAVSLGERATINCRASESVSVIGAHLIHWYQQKPGQPPKLLIYLASNLETGVPARFSGSGSGTDFTLTISSLQAEDAAIYYCLQSRIFPRTFGQGTKLEIKGGGGSGGGGSGGGGSQVQLVQSGSELKKPGESVKISCKASGYTFTDYSINWVKQAPGQGLKWMGWINTETREPAYAYDFRGRFVFSLDTSASTAYLQISSLKAEDTAVYFCALDYSYAMDYWGQGTLVTVSS

SEQ ID NO: 11313 - protein, 244 aa, Artificial Sequence
  Synthetic Polypeptide
DIVLTQSPATLSLSPGDRATLSCRASESVTILGSHLIYWYQQKPGQAPRLLIQLASNVQTGIPARFSGSGSRTDFTLTISSLEPEDFAVYYCLQSRTIPRTFGQGTKLEIKRGGGGSGGGGSGGGGSQVQLVQSGSELKKPGESVKISCKASGYTFTHYSMNWVRQAPGQGLEWMGRINTETGEPLYADDFKGRFVFSLDTSASTAYLQISSLKAEDTAVYYCSNDYLYSLDYWGQGTLVTVSS

SEQ ID NO: 11314 - protein, 248 aa, Artificial Sequence
  Synthetic Polypeptide
DFVMTQSPDSLAVSLGERVTMSCKSSQSLLNSGNQKNYLTWYQQKPGQPPKLLIYWASTRESGVPDRFSGSGSGTDFTLTISSLQAEDVAVYYCQNDYSYPYTFGQGTKLEIKGGGGSGGGGSGGGGSEVQLVQSGAELKKPGASVKVSCKASGYTFTDYYMKWVRQAPGQGLEWIGDIIPSNGATFYNQKFKGRVTITVDKSTSTAYMELSSLRSEDTAVYYCARSHLLRASWFAYWGQGTLVTVSS

SEQ ID NO: 11315 - protein, 248 aa, Artificial Sequence
  Synthetic Polypeptide
DFVMTQSPDSLAVSLGERVTMSCKSSQSLLNSGNQKNYLTWYQQKPGQPPKLLIYWASTRESGVPDRFSGSGSGTDFTLTISSLQAEDVAVYYCQNDYSYPYTFGQGTKLEIKGGGGSGGGGSGGGGSQVQLVQSGAELKKPGASVKVSCKASGYTFTDYYMKWVRQAPGQGLEWIGDIIPSNGATFYNQKFKGRVTITVDKSTSTAYMELSSLRSEDTAVYYCARSHLLRASWFAYWGQGTLVTVSS

SEQ ID NO: 11316 - protein, 238 aa, Artificial Sequence
  Synthetic Polypeptide
DVQITQSPSYLAASPGETITINCRASKSISKDLAWYQEKPGKTNKLLIYSGSTLQSGIPSRFSGSGSGTDFTLTISSLEPEDFAMYYCQQHNKYPYTFGGGTKLEIKRGGGGSGGGGSGGGGSQVQLQQPGAELVRPGASVKLSCKASGYTFTSYWMNWVKQRPDQGLEWIGRIDPYDSETHYNQKFKDKAILTVDKSSSTAYMQLSSLTSEDSAVYYCARGNWDDYWGQGTTLTVSS

SEQ ID NO: 11317 - protein, 240 aa, Artificial Sequence
  Synthetic Polypeptide
EIVLTQSPTSMTASPGEQVTITCRASSSINYMHWYQQKPGASPRPWIYETSKLASGVPDRFSGSASGTSYSLTINNMEAEDAATYYCQQWNYPSWTFGGGTKLELKGGGGSGGGGSGGGGSEVQLVESGGGLVQPGRSLKLSCAASGFTFSDYNMAWVRQAPKKGLEWVATILYDGGRTYYRGSVKGRFTISRDNAKSTLYLRMDSLRSEDTATYYCATHSRGTDYFDYWGQGVMVTVSS

SEQ ID NO: 11318 - protein, 249 aa, Artificial Sequence
  Synthetic Polypeptide
DIVMTQSPSSLAVSEGETVTINCKSSQSFLSSGDGKNYVAWYQYKPGQSPKLLIYWASTRQSGVPDRFIGSGSGTDFTLTISTVQAEDLAIYYCQQYYDTPLTFGSGTKLEIKGGGGSGGGGSGGGGSEVKLQESGPSLVQSSQTLSLTCTVSGFSLTSYHIHWVRQTPGKGLEWMGVMWSDGDTSYNSALKSRLSISRDTSQSQVFLKMNSLQTEDTATYYCARGYYSSYLYLWFAYWGQGTLVTVSS

SEQ ID NO: 11319 - protein, 253 aa, Artificial Sequence
  Synthetic Polypeptide
DVLMTQTPVSLPVSLGGQVSISCRSSQSLVHSDGDTYLHWYLQKPGQSPQLLIYRVSNRFSGVPDRFSGSGSGTDFTLKISRVEPEDLGLYYCLQTTHFPPWTFGGGTKLEMKGGGGSGGGGSGGGGSQVQLQQSGPELRRPGSSVRLSCKASGYRIKDFLIHWIKNRPEHGLEWIGWIDPEDGETKYAQKFQTKATLTADTSSNTAYMQLSSLTSEDTATYFCARWGDVYYGLMRGHVMDAWGQGTSVTVSS

SEQ ID NO: 11320 - protein, 249 aa, Artificial Sequence
  Synthetic Polypeptide
DIVMTQAAPSIPVTPGESVSISCRSSKSLLNSNGNTYLYWFLQRPGQSPQLLIYRMSNLASGVPDRFSGSGSGTAFTLRISRVEAEDVGVYYCMQHLEYPFTFGAGTKLELKRGGGGSGGGGSGGGGSEVQLQQSGPELIKPGASVKMSCKASGYTFTSYVMHWVKQKPGQGLEWIGYINPYNDGTKYNEKFKGKATLTSDKSSSTAYMELSSLTSEDSAVYYCARGTYYYGSRVFDYWGQGTTLTVSS

SEQ ID NO: 11321 - protein, 249 aa, Artificial Sequence; identical to SEQ ID NO: 11320
  Synthetic Polypeptide

SEQ ID NO: 11322 - protein, 267 aa, Artificial Sequence
  Synthetic Polypeptide
INIYNAEPANPSEKNSPEFDIVMTQSPATLSLSPGERATLSCRSSKSLQNVNGNTYLYWFQQKPGQSPQLLIYRMSNLNSGVPDRFSGSGSGTEFTLTISSLEPEDFAVYYCMQHLEYPITFGAGTKLEIKGGGGSGGGGSGGGGSEVQLVESGGGLVKPGGSLKLSCAASGYTFTSYVMHWVRQAPGKGLEWIGYINPYNDGTKYNEKFQGRVTISSDKSISTAYMELSSLRSEDTAMYYCARGTYYYGTRVFDYWGQGTLVTVSS

SEQ ID NO: 11323 - protein, 244 aa, Artificial Sequence
  Synthetic Polypeptide
DIQMTQSPSSLSASVGDRVTITCKASDHINNWLAWYQQKPGQAPKLLIYGATTLETGVPSRFSGSGSGTDYTLTISSLQPEDFATYYCQQSWNTPWTFGQGTKLEIKRGGGGSGGGGSGGGGSQVQLQQPGAELVKPGASVKMSCKASGYAFSSYWINWMKQKPGQGLEWIGQIYPGDGDTNYNGKFKGRATLTADTSSSTAYMQLSSLTSEDSAVYFCARSITTVVGCAMDYWGQGTSVTVSS

SEQ ID NO: 11324 - protein, 246 aa, Artificial Sequence
  Synthetic Polypeptide
QIVLSQSPAILSASPGEKVTMTCRASSSVSYMHWYQQKPGSSPKPWIYATSNLASGVPARFSGSGSGTSYSFTISRVEAEDAATYYCQQWTFNPPTFGGGTRLEIKRTVAAGGGGSGGGGSGGGGSQAYLQQSGAELVRPGASVKMSCKASGYTFTSYNMHWVKQTPRQGLEWIGGIYPGNGDTSYNQKFKGKATLTVGKSSSTAYMQLSSLTSEDSAVYFCARYDYNYAMDYWGQGTSVTVSSAS

SEQ ID NO: 11325 - protein, 245 aa, Artificial Sequence
  Synthetic Polypeptide
DEIVLTQSPATLSLSPGERATLSCRASQSVSSYLAWYQQKPGQAPRLLIYDASNRATGIPARFSGSGSGTDFTLTISSLEPEDFAVYYCQQRSNWPITFGQGTRLEIKGGGGSGGGGSGGGGSEVQLVESGGGLVQPDRSLRLSCAASGFTFHDYAMHWVRQAPGKGLEWVSTISWNSGTIGYADSVKGRFTISRDNAKNSLYLQMNSLRAEDTALYYCAKDIQYGNYYYGMDVWGQGTTVTVSS

SEQ ID NO: 11326 - protein, 239 aa, Artificial Sequence
  Synthetic Polypeptide
DIQMTQSPSSLSASVGDRVTINCKASQDINSYLSWFQQKPGKAPKTLIYRANRLVDGVPSRFSGSGSGQDYTLTISSLQPEDFATYYCLQYDEFPLTFGGGTKVEIKGGGGSGGGGSGGGGSQVQLVQSGAEVKKPGASVKVSCKASGYTFTNYDINWVRQAPGQGLEWIGWIYPGDGSTKYNEKFKAKATLTADTSTSTAYMELRSLRSDDTAVYYCASGYEDAMDYWGQGTTVTVSS

SEQ ID NO: 11327 - protein, 241 aa, Artificial Sequence
  Synthetic Polypeptide
DIVMTQTPLSLSVTPGQPASISCKSSQSLLDGDGKTYLNWLLQKPGQSPQRLIYLVSKLDSGVPDRFSGSGSGTDFTLKISRVEAEDVGVYYCWQGTHFPRTFGQGTKLEIKGGGGSGGGGSGGGGSQVQLVQSGAEVKKPGASVKVSCKASGYTFKDTYIHWVRQAPGQGLEWMGRIDPANGNTKYDPKFQGRVTMTRDTSISTAYMELSRLRSDDTAVYYCARRGGVDWGQGTLVTVSS

SEQ ID NO: 11328 - protein, 242 aa, Artificial Sequence
  Synthetic Polypeptide
DIQMTQSPSSLSASVGDRVTITCKASQDVSTAVAWFQQKPGKAPKLLIYSPSYRYTGVPSRFSGSGSGTDFTLTISSLQPEDFTYYCQQLYSTPYTFGQGTKVEIKGGGGSGGGGSGGGGSEVQLVQSGAEVKKPGASVKVSCKASGYTFTDYYLDVVVRQAPGQGLEWIGRVNPYNGGTIYNQKFKGRVTLTRDTSTSTAYLELSSLRSEDTAVYYCARDHYRYDPLLDYWGQGTLVTVSS

SEQ ID NO: 11329 - protein, 248 aa, Artificial Sequence
  Synthetic Polypeptide
DIQMTQSPSSLSASVGDRVTITCRASQSVSTSSYNYMHWYQQKPGKPPKLLIKYASNLESGVPSRFSGSGSGTDFTLTISSLQPEDFATYYCQHSWEIPLTFGQGTKVEIKGGGGSGGGGSGGGGSEVQLVQSGAEVKKPGASVKVSCKASGYSFTDYYMHWVRQAPGQGLEWIGRINPYNGAAFYSQNFKDRVTLTVDTSTSTAYLELSSLRSEDTAVYYCAIERGADLEGYAMDYWGQGTLVTVSS

SEQ ID NO: 11330 - protein, 246 aa, Artificial Sequence
  Synthetic Polypeptide
EIVLTQSPATLSASPGERVTLTCRASSNVISSYVHWYQQKPGSSPRLFLYSTSNLASGVPSRFSGSGSGTDFTFTISSLEAEDAATYYCQQYSGYPLTFGQGTRLEIKGGGGSGGGGSGGGGSQVQLQESGPGLVKPSETLSLTCAVSGYSITSAYYWNWIRQPPGKGLEWIGYISYDGRNNYNPSLKNRITINPDTSKNQFSLQLNSVTPEDTAVYYCAREGDYDVGNYYAMDYWGQGTLVTVSS

SEQ ID NO: 11331 - protein, 246 aa, Artificial Sequence
  Synthetic Polypeptide
EIVLTQSPATLSLSPGERATLSCRASSNVISSYVHWYQQKPGQAPRLLIYSTSNLASGIPARFSGSGSGTDFTLTISSLEPEDFAVYYCQQYSGYPLTFGQGTRLEIKGGGGSGGGGSGGGGSEVQLVESGGGLVQPGRSLRLSCAASGYSITSAYYWNWVRQAPGKGLEWVSYISYDGRNNYNPSLKNRFTISRDNAKKSLYLQMNSLRAEDTALYYCAKEGDYDVGNYYAMDYWGQGTTVTVSS

SEQ ID NO: 11332 - protein, 255 aa, Artificial Sequence
  Synthetic Polypeptide
DVVMTQTPLSLPVSLGDQASISCRSSQSLVHSNGNTYLRWYLQKPGQSPKVLIYKVSNRVSGVPDRFSGSGSGTDFTLKINRVEAEDLGVYFCSQSTHVPWTFGGGTKLEIKSSADDAKKDAAKKDDAKKDDAKKDGGVKLDETGGGLVQPGGAMKLSCVTSGFTFGHYWMNWVRQSPEKGLEWVAQFRNKPYNYETYYSDSVKGRFTISRDDSKSSVYLQMNNLRVEDTGIYYCTGASYGMEYLGQGTSVTVST

SEQ ID NO: 11333 - protein, 251 aa, Artificial Sequence
  Synthetic Polypeptide
QVQLVESGGNLVQPGGSLRLSCAASGFTFGSFSMSWVRQAPGGGLEWVAGLSARSSLTHYADSVKGRFTISRDNAKNSVYLQMNSLRVEDTAVYYCARRSYDSSGYWGHFYSYMDVWGQGTLVTVSGGGGSGGGGSGGGGSSVLTQPSSVSAAPGQKVTISCSGSTSNIGNNYVSWYQQHPGKAPKLMIYDVSKRPSGVPDRFSGSKSGNSASLDISGLQSEDEADYYCAAWDDSLSEFLFGTGTKLTVLG

SEQ ID NO: 11334 - protein, 242 aa, Artificial Sequence
  Synthetic Polypeptide
QSVVTQPPSVSGAPGQRVTISCTGSSSNIGAGYDVHWYQQLPGTAPKLLIYGNSNRPSGVPDRFSGSKSGTSASLAITGLQAEDEADYYCQSYDSSLSGSYVFGTGTKLTVLGGGGGSGGGGSGGGGSEVQLVETGGNLVQPGASLRLSCAASGFSFSGTAMHWVRQAPGKGLEWVSTISSTGRSTYYRDSVKGRFTISRDNSKNTLYLQMNSLRGEDTAVYYCARVSFDYWGQGTLVTVSS

SEQ ID NO: 11335 - protein, 244 aa, Artificial Sequence
  Synthetic Polypeptide
QSVVTQPASVSGSPGQSITISCTGTSSDVGGYNYVSWYQQHPGKAPKLMIYDVSKRPSGVSNRFSGSKSGNTASLTISGLQAEDEADYYCSSYTSSSTLVFGGGTKLTVLGGGGGSGGGGSGGGGSEVQLVESGGAFVQPGGSLRLSCAASGFTFSSYAMTWVRQAPGKGLEWVSTISGRGRSTFYADSVKGRFTISRDNSKNTLYLQMNSLRAEDTAVYYCARYYHAGAFDLWGQGTLVTVSS

SEQ ID NO: 11336 - protein, 246 aa, Artificial Sequence
  Synthetic Polypeptide
DVVMTQSPSSLSASVGDRVTITCQSSLDISHYLNWYQQKPGKAPKLLIYDASNLETGVPSRFSGSGSGTHFTFTISSLQPEDFATYYCQQYDNLPLTFGGGTKLEIKRGGGGSGGGGSGGGGSQVQLVQSGGGVVQPGGSLRVSCAASGVTLSDYGMHWVRQAPGKGLEWVAFIRNDGSDKYYADSVKGRFTISRDNSEKTVSLQMSSLRAEDTAVYYCAKNGESGPLDYWYLDLWGRGTLVTVSS

SEQ ID NO: 11337 - protein, 253 aa, Artificial Sequence
  Synthetic Polypeptide
DVMLTQTPLSLPVSLGDQASISCRSSQSILHSTGDTYLEWYLQKPGQSPKLLINKVSNRLSGVPDRFSGSGSGTDFTLKISRVEAEDLGVYYCFQGSHVPWTFGGGTKLEIKRADAAPTVSIFPGGGGSGGGGSGGGGSQVKLQQSGPSLVKPGASVKMSCKASGYTFTDFYMKWVKQSHGKSLEWIGDINPNIGDTFYNQKFKGKATLTVDKSSSTAYMQLNSLTSEDSAVYFCSVGYFDVWGAGTTVTVSS

SEQ ID NO: 11338 - protein, 253 aa, Artificial Sequence
  Synthetic Polypeptide
LPVLTQPPSVSVAPGKTARITCGGNNIGSKSVHWYQQKPGQAPVLVVYDDSDRPSGIPERFSGSNSGNTATLTISRVEAGDEADYYCQVWDSSSDYVVFGGGTKLTVLGGGGSGGGGSGGGGSEVQLVQSGAEVKKPGESLKISCKGSGYSFTSYWIGWVRQMPGKGLEWMGIIYPGDSDTRYSPSFQGQVTISADKSISTAYLQWSSLKASDTAMYYCARQVWGWQGGMYPRSNWWYNLDSWGQGTLVTVSS

SEQ ID NO: 11339 - protein, 246 aa, Artificial Sequence
  Synthetic Polypeptide
ELVMTQSPASLAVSLGQRATISCRASESVDSYGKSFMHWYQLKPGQPPKLLIYRASNLESGVPARFSGSGSRTDFTLTIDPVEADDAATYYCQQNNEDPWTFGGGTKLEIKGGGGSGGGGSGGGGSEVQLEQSGPELVKPGASVKMSCKASGYTFTNYYMKWVKQSHGKSLEWIGDLNPNNGDTFYNQKFKGKATLTVDKSSNTAYMQLNSLTSEDSAVYYCARTGRYEENAMDYWGQGTSVTVSS

SEQ ID NO: 11340 - protein, 244 aa, Artificial Sequence; identical to SEQ ID NO: 11313
  Synthetic Polypeptide

SEQ ID NO: 11341 - protein, 244 aa, Artificial Sequence; identical to SEQ ID NO: 11222
  Synthetic Polypeptide

SEQ ID NO: 11342 - protein, 240 aa, Artificial Sequence
  Synthetic Polypeptide
DVVMTQSPSSLSASVGDRVTITCMASEDIYIRLAWYQQKPGNAPKLLIYAATSLETGVPSRFSGSGSGTDFTLTISSLQPEDFATYYCQQYWSSPWTFGGGTKVEIKGGGGSGGGGSGGGGSQVQLQESGPGLVKPSQTLSLTCTVSGYSITSDYTWNWIRQPPGNGLEWIGYITYSGSTSYNPSLKSRVLISVDTSKNQVSLKLSSVTAADTAVYYCARLGRRYTMDYWGQGTTVTVSS

SEQ ID NO: 11343 - protein, 245 aa, Artificial Sequence
  Synthetic Polypeptide
EVQLVESGGGLVQPGRSLRLSCAASGFTFDDYAMHWVRQAPGKGLEWVSGISWNSGSIGYADSVKGRFTISRDNAKNSLYLQMNSLRAEDTALYYCAKDKGGGYYDFWSGSDYWGQGTLVTVSSGGGGSGGGGSGGGGSSSELTQDPAVSVALGQTVRITCQGDSLRSYYASWYQQKPGQAPVLVIYGKNNRPSGIPDRFSGSSSGNTASLTITGAQAEDEADYYCNSRDSSGWVFGGGTKLTVL

SEQ ID NO: 11344 - protein, 254 aa, Artificial Sequence
  Synthetic Polypeptide
EVQLQQSGPGLVKPSQTLSLTCAISGDSVLSNSDTWNWIRQSPSRGLEWLGRTYHRSTWYDDYASSVRGRVSINVDTSKNQYSLQLNAVTPEDTGVYYCARDRLQDGNSWSDAFDVWGQGTMVTVSSGGGGSGGGGSGGGGSQSALTQPASVSGSPGQSITISCTGTSSDVGGYNYVSWYQQHPGKAPKLMIYDVSNRPSGVSNRFSGSKSGNTASLTISGLQAEDEADYYCSSYTSSSTLVYVFGTGTKVTVL

SEQ ID NO: 11345 - protein, 252 aa, Artificial Sequence
  Synthetic Polypeptide
QVQLVQSGAEVKKPGASVKVSCKASGYTFTSYDINWVRQATGQGLEWMGWMNPNSGNTGYAQKFQGRVTMTRNTSISTAYMELSSLRSEDTAVYYCARGDSNYWSYYGMDVWGQGTLVTVSSGGGGSGGGGSGGGGSGGGGSQSVLTQPRSVSGSPGQSVTISCTGTSSDVGGYNYVSWYQQHPGEAPKLIIYDADKRPSGISNRFSSGKSGNTASLTISGLQVEDEADYYCCSYAGGSTWVFGGGTKVTVL

SEQ ID NO: 11346 - protein, 254 aa, Artificial Sequence
  Synthetic Polypeptide
EVQLQQSGPGLVKPSQTLSLTCAISGDSVSSNSAAWNWIRQSPSRGLEWLGRTYYRSKWYSDYAVSVKSRITINPDTSKNQFSLQLNSVTPEDTAVYYCARDPYDFWSGYPDAFDIWGQGTMVTVSSGGGGSGGGGSGGGGSQSALTQPASVSGSPGQSITISCTGTSSDVGGYNYVSWYQQHPGKAPKVIISEVNNRPSGVSHRFSGSKSGNTASLTISGLQAEDEADYFCSSYTSGRTLYVFGTGSKVTVLG

SEQ ID NO: 11347 - protein, 253 aa, Artificial Sequence
  Synthetic Polypeptide
EVQLQQSGPGLVKPSQTLSLTCAISGDSMLSNSDTWNWIRQSPSRGLEWLGRTYHRSTWYDDYASSVRGRVSINVDTSKNQYSLQLNAVTPEDTGVYYCARVRLQDGNSWSDAFDVWGQGTMVTVSSGGGGSGGGGSGGGGSQSALTQPASASGSPGQSVTISCTGTSSDVGGYNYVSWYQQHPGKAPKLMIYDVSNRPSGVSNRFSGSKSGNTASLTISGLQAEDEADYYCSSYTSSSTLYVFGTGTQLTVL

SEQ ID NO: 11348 - protein, 244 aa, Artificial Sequence
  Synthetic Polypeptide
EIVLTQSPATLSLSPGERATLSCSASSSVSYMYWYQQKPGQAPRLLIYRTSNLASGIPARFSGSGSGTDFTLTISSLEPEDFAVYYCQQYHSYPTTFGQGTKVEIKRTVGGGGSGGGGSGGGGSEVQLVESGGGLVQPGGSLRLSCAASGFSFNTYAMNWVRQAPGKGLEWVSHIRSKSNNFATYYADSVKDRFTISRDNAKNSLYLQMNSLRAEDTAVYYCARQGGDFPMDYWGQGTLVTVSS

SEQ ID NO: 11349 - protein, 240 aa, Artificial Sequence
  Synthetic Polypeptide
DVVMTQSPSSLSASVGDRVTITCKASEDIYIRLAWYQQKPGKAPKLLIYAATSLETGVPSRFSGSGSGTDFTLTISSLQPEDFATYYCQQYWTTPWTFGGGTKVEIKGGGGSGGGGSGGGGSQVQLQESGPGLVKPSQTLSLTCTVSGYSITIDYTWNWIRQPPGKGLEWIGYITYSGSTDYNPSLKSRVLISVDTSKNQVSLKLSSVTAADTAVYYCARLGRRYALDYWGQGTTVTVSS

SEQ ID NO: 11350 - protein, 245 aa, Artificial Sequence
  Synthetic Polypeptide
DIQLTQSPSFLSASVGDRVTITCRASQGISTDLNWYQQKPGKAPKLLIYAASNLESGVPSRFSGSGSGTEFTLTISSLQPEDFATYYCQQSYNWPYTFGGGTKVEIKRGGGGSGGGGSGGGGSEVQLVESGGGLVKPGGSLRLSCAASGFTFSNFEMNWVRQAPGKGLEWVSGISSNGRYINYADSVKGRFTISRDNAKNSLYLQMNSLRAEDTAVYYCARVVDFDQDYNGFDYWGQGTLVTVSS

SEQ ID NO: 11351 - protein, 243 aa, Artificial Sequence
  Synthetic Polypeptide
DIQLTQSPSFLSASVGDRVTITCSLSLGISTWRDWFPPRLGRGLEPLTYAASTLQSGVPSRFSGSGSGTEFTLTISSLQPEDFATYYCQQLNSYPLTFGGGTKVEIKRGGGGSGGGGSGGGGSEVQLVESGGGLVKPGGSLRLSCAASGFTFSTYGMSWVRQAPGKGLEWVAYINNGSGYIYYADSVKGRFTISRDNAKNSLYLQMNSLRAEDTAVYYCARGQWWSGGDFDYWGQGTLVTVSS

SEQ ID NO: 11352 - protein, 245 aa, Artificial Sequence
  Synthetic Polypeptide
DIQMTQTTSSLSASLGDRVTISCRASQDISNYLNWYQQKPDGTVKLLIYYTSILHSGVPSRFSGSGSGTDYSLTISNLEQEDFATYFCQQGNTLPWTFGGGTKLEIKAGGGGSGGGGSGGGGSEVQLVESGGGLVKPGGSLKLSCAASGFAFSIYDMSWVRQTPEKRLEWVAYISSGGGTYYPDTVKGRFTISRDNAKNTLYLQMSSLKSEDTAMYYCARHSGYGTHWGVLFAYWGQGTLVTVSA

SEQ ID NO: 11353 - protein, 255 aa, Artificial Sequence
  Synthetic Polypeptide
DIVMTQSPDSLAVSLGERATINCKSSQSLLYRSNQKNYLAWYQQKPGQPPKLLIYWASTRESGVPDRFSGSGSGTDFTLTISSLQAEDVAVYYCQQYYNYPRTFGQGTKVEIKRTVGGGGSGGGGSGGGGSEVQLLESGGGLVQPGGSLRLSCAASGYSITSDYAWNWVRQAPGKGLEWVSYISNSGSTSYNPSLKSRFTISRDNSKNTLYLQMNSLRAEDTAVYYCAKERNYDYDDYYYAMDYWGQGTLVTVSS

SEQ ID NO: 11354 - protein, 248 aa, Artificial Sequence
  Synthetic Polypeptide
DVVMTQSPLSLPVTLGQPASISCRSSQSLLHSSGNTYLEWYQQRPGQSPRPLIYKISTRFSGVPDRFSGSGSGTDFTLKISRVEAEDVGVYYCFQGSHVPYTFGGGTKVEIKRGGGGSGGGGSGGGGSQVQLVQSGAEVKKPGASVKVSCKASGLTIEDYYMHWVRQAPGQGLEWMGWIDPENGDTEYGPKFQGRVTMTRDTSINTAYMELSRLRSDDTAVYYCAVHNAHYGTWFAYWGQGTLVTVSS

SEQ ID NO: 11355 - protein, 240 aa, Artificial Sequence
  Synthetic Polypeptide
DIQMTQSPSSLSASVGDRVTITCRASENIYSNLAWYQQKPGKAPKLLIYAATNLADGVPSRFSGSGSGTDFTLTISSLQPEDFATYYCQHFWGTPTFGQGTKVEIKRTVGGGGSGGGGSGGGGSEVQLVESGGGLVQPGGSLRLSCAASGFSLTNYGVHWVRQAPGKGLEWVSVIWSGGSTDYNAAFISRFTISADTSKNTAYLQMNSLRAEDTAVYYCARELIHAMDNWGQGTLVTVSS

SEQ ID NO: 11356 - protein, 247 aa, Artificial Sequence
  Synthetic Polypeptide
DFVMTQSPLSLPVTPGEPASISCRSSQSIVHSNGNTYLEWYLQKPGQSPQLLIYKVSNRFSGVPDRFSGSGSGTDFTLKISRVEAEDVGVYYCFQGSHVPLTFGQGTKLEIKRGGGGSGGGGSGGGGSEVQLVESGAEVKKPGASVKVSCKASGYTFTSYWIHWVRQAPGQGLEWMGENDPSNGRTNYNEKFKNRVTLTVDTSISTAYMELSRLRSDDTAVYYCARGPNYFYSMDYWGQGTMVTVSS

SEQ ID NO: 11357 - protein, 240 aa, Artificial Sequence
  Synthetic Polypeptide
DIQLTQSPSFLSASVGDRVTITCSARSSISFMYWYQQKPGKAPKLLIYDTSNLASGVPSRFSGSGSGTEFTLTISSLEAEDAATYYCQQWSSYPLTFGQGTKLEIKGGGGSGGGGSGGGGSQVQLVQSGAEVKKPGASVKVSCKASGYTFTGSWMNWVRQAPGQGLEWIGRIYPGDGETNYNGKFKDRVTITADKSTSTAYMELSSLRSEDTAVYYCARIYGNNVYFDVWGQGTTVTVSS

SEQ ID NO: 11358 - protein, 248 aa, Artificial Sequence
  Synthetic Polypeptide
QLVLTQSPSASASLGSSVKLTCTLSSGHKTDTIDWYQQQPGKAPRYLMKLEGSGSYNKGSGVPDRFSGSSSGADWYLTISSLQSEDEADYYCGTDYPGNYLFGGGTQLTVLGGGGGSGGGGSGGGGSQEQLVESGGGLVQPGGSLRLSCAASGFTFSDYYMSWIRQAPGKGLEWVATIYPSSGKTYYADSAKGRLTISSDNAKDSLYLQMNSLRAEDTAVYYCTRDSYADDAALFDIWGQGTTVTVSS

SEQ ID NO: 11359 - protein, 243 aa, Artificial Sequence
  Synthetic Polypeptide
DIVLTQSPPSLAMSLGKRATISCRASESVTILGSHLIHWYQQKPGQPPTLLIQLASNVQTGVPARFSGSGSRTDFTLTIDPVEEDDVAVYYCLQSRTIPRTFGGGTKLEIKGGGGSGGGGSGGGGSQIQLVQSGPELKKPGETVKISCKASGYTFTDYSINWVKRAPGKGLKWMGWINTETREPAYAYDFRGRFAFSLETSASTAYLQINNLKYEDTATYFCALDYSYAMDYWGQGTSVTVSS

SEQ ID NO: 11360 - protein, 247 aa, Artificial Sequence
  Synthetic Polypeptide
QVQLQESGPGLVKPSQTLSLTCTVSGGSISSGGFYWSWIRQHPGKGLEWIGYIHHSGSTHYNPSLKSRVTISIDTSKNLFSLRLSSVTAADTAVYYCASLVYCGGDCYSGFDYWGQGTLVTVSSGGGGSGGGGSGGGGSDIQLTQSPSSLSASVGDRVSFTCQASQDINNFLNWYQQKPGKAPKLLIYDASNLETGVPSRFSGSGSGTDFTFTISSLQPEDIATYYCQQYGNLPFTFGGGTKVEIKR

SEQ ID NO: 11361 - protein, 245 aa, Artificial Sequence
  Synthetic Polypeptide
QVQLQESGPGLVKPSETLSLTCTVSGGSISSYYWSWIRQPPGKGLEWIGYIYYSGSTNYNPSLKSRVTISVDTSKNQFSLKLSSVTAADTAVYYCVSLVYCGGDCYSGFDYWGQGTLVTVSSGGGGSGGGGSGGGGSDIQLTQSPSSLSASVGDRVSFTCQASQDINNFLNWYQQKPGKAPKLLIYDASNLETGVPSRFSGSGSGTDFTFTISSLQPEDIATYYCQQYGNLPFTFGGGTKVEIKR

SEQ ID NO: 11362 - protein, 250 aa, Artificial Sequence
  Synthetic Polypeptide
QVTLKESGPVLVKPTETLTLTCTVSGFSLINARMGVSWIRQPPGKALEWLAHIFSNAEKSYRTSLKSRLTISKDTSKSQVVLTMTNMDPVDTATYYCARIPGYGGNGDYHYYGMDVWGQGTTVTVSSGGGGSGGGGSGGGGSDIQMTQSPSSLSASLGDRVTITCRASQGIRNDLGWYQQKPGKAPKRLIYASSTLQSGVPSRFSGSGSGTEFTLTISSLQPEDFATYYCLQHNNFPWTFGQGTKVEIKR

SEQ ID NO: 11363 - protein, 244 aa, Artificial Sequence
  Synthetic Polypeptide
QIQLVESGGGVVQPGRSLRLSCVASGFTFKNYGMHWVRQAPGKGLEWVAVIWYDGSNEYYGDPVKGRFTISRDNSKNMLYLQMNSLRADDTAVYYCARSGIAVAGAFDYWGQGTLVTVSSGGGGSGGGGSGGGGSEIVLTQSPDTLSLSPGEKATLSCRASQSVSSSFLAWYQQKPGQAPSLLIYVASRRAAGIPDRFSGSGSGTDFTLTISRLEPEDFGMFYCQHYGRTPFTFGPGTKVDIKR

SEQ ID NO: 11364 - protein, 245 aa, Artificial Sequence
  Synthetic Polypeptide
DIQLTQSPSFLSASVGDRVTITCRASQGISSYLAWYQQKPGKAPKLLIYAASTLQSGVPSRFSGSGSGTEFTLTISSLQPEDFATYYCQQVNSYPLTFGGGTKVEIKRGGGGSGGGGSGGGGSQLQLQESGPGLVKPSETLSLTCTVSGGSISSSTYYWGWIRQPPGKGLEWIGSIYFTGSTDYNPSLKSRVSISVDTSKNQFSLKLSSVTAADTAVYYCAKEDDSSGYYSFDYWGQGNLVTVSS

SEQ ID NO: 11365 - protein, 248 aa, Artificial Sequence
  Synthetic Polypeptide
QSALTQPRSVSGSPGHSVTISCTGTSSDVGDYNYVSWYQQRPGKVPKLLIYDVSKRPSGVPDRFSGSKSGNTASLTISGLQAEDEAIYFCASYAGNYNVVFGGGTKLTVLGQGGGGSGGGGSGGGGSQVQLVQSGSELKKPGASVKVSCKASGYTFNTYAMNWVRQAPGQGLEWMGWINTNTGNPTYAQGFTGRFVFSLDTSVSTAYLQISSLKAEDTAVYYCARRYFDWLLGAFDIWGQGTMVTVSS

SEQ ID NO: 11366 - protein, 240 aa, Artificial Sequence
  Synthetic Polypeptide
DIQMTQSPSSLSASVGDRVTITCSASQGINNYLNWYQQKPGKAPKLLIHYTSGLHAGVPSRFSGSGSGTDYTLTISSLQPEDVATYYCQQYSILPWTFGGGTKVEIKRGGGGSGGGGSGGGGSQVQLVQSGAEVKKPGSSVKVSCKASGYAFSSSWMNWVRQAPGQGLEWMGRIYPGDGNTHYAQKFQGRVTLTADKSTSTAYMELSSLRSEDTAVYYCGEGYLDPMDYWGQGTLVTVSS

SEQ ID NO: 11367 - protein, 243 aa, Artificial Sequence
  Synthetic Polypeptide
EVQLVESGGGLVQPGGSLRLSCAASGYTFTTYWMHWVRQAPGKGLEWVGYIRPSTGYTEYNQKFKDRFTISADTSKNTAYLQMNSLRAEDTAVYYCARSRWLLDYWGQGTLVTVSGGGGSGGGGSGGGGSDIQMTQSPSSLSASVGDRVTITCKSSQSVLYSSNQKNYLAWFQQKPGKAPKLLIYWASTRESGVPSRFSGSGSGTDFTLTISSLQPEDFATYFCHQYLSSYTFGQGTKVEIKR

SEQ ID NO: 11368 - protein, 240 aa, Artificial Sequence
  Synthetic Polypeptide
DIQMTQSPSSLSASVGDRVTITCRASQDISNYLNWYQQKPGKAPKLLIYYTSRLHSGVPSRFSGSGSGTDFTLTISSLQPEDFATYYCQQGNTLPYTFGQGTKVEIKRGGGGSGGGGSGGGGSEVQLVESGGGLVQPGGSLRLSCAASGFTFSDYFMSWVRQAPGKGLEWVATISNGGTYTYYPDSVKGRFTISRDNSKNTLYLQMNSLRAEDTAVYYCARFDGYIFDYWGQGTLVTVSS

SEQ ID NO: 11369 - protein, 247 aa, Artificial Sequence
  Synthetic Polypeptide
DIQMTQSPSSLSASVGDRVTITCTASSRVSSSYLHWFQQKPGKAPKLLIYSTSNLASGVPSRFSGSGSGTDFTLTISSLQPEDFATYYCHQYHRSPYTFGQGTKVEIKRGGGGSGGGGSGGGGSEVQLVESGGGLVQPGGSLRLSCAASGYAFSNSWINWVRQAPGKGLEWVGQIYPGDYDTNYNGKFKGRFTISRDKSKNTAYLQMNSLRAEDTAVYYCARGGSIYYGNLGFFDVWGQGTLVTVSS

SEQ ID NO: 11370 - protein, 237 aa, Artificial Sequence
  Synthetic Polypeptide
DIQMTQSPSSLSASVGDRVTITCSASSSVTYMYWYQQKPGKAPKLLIYDTSNLASGVPSRFSGSGSGTDYTLTISSLQPEDFATYYCQQWSNYPLTFGQGTKVEIKGGGGSGGGGSGGGGSQVQLVQSGAEVKKPGASVKVSCKASGYSFIEYTINWVRQAPGQGLEWIGNIDPYYGTTYYNQMFTGRATLTVDTSISTAYMELSRLRSDDTAVYYCARGSAWFPYWGQGTLVTVSS

SEQ ID NO: 11371 - protein, 237 aa, Artificial Sequence
  Synthetic Polypeptide
EIVLTQSPSSLSASVGDRVTITCRASENIYSYLAWYQQKPGKAPKLLIYNTKTLGEGVPSRFSGSGSGTDFTLTISSLQPEDFATYYCQHHYGTPFTFGPGTKVDIKGGGGSGGGGSGGGGSQVQLVQSGAEVKKPGASVKVSCKASGYTFSDYWVHWVRQAPGQGLEWMGAIDGSDTFNDYSQKFKGRVTMTRDTSISTAYMELSRLRSDDTAVYYCARGGLLQYWGQGTLVTVSS

SEQ ID NO: 11372 - protein, 241 aa, Artificial Sequence
  Synthetic Polypeptide
QVQLQQSGPELVKPGASVKISCKASGYAFSSSWMNWVKQRPGKGLEWIGRIYPGDEDTNYSGKFKDKATLTADKSSTTAYMQLSSLTSEDSAVYFCARSLLYGDYLDYWGQGTTLTVSSGGGGSGGGGSGGGGSQIVLTQSPAIMSASPGEKVTMTCSASSSVSYMHWYQQKSGTSPKRWIYDTSKLASGVPDRFSGSGSGTSYFLTINNMEAEDAATYYCQQWNINPLTFGAGTKLELKR

SEQ ID NO: 11373 - protein, 244 aa, Artificial Sequence
  Synthetic Polypeptide
DIQMTQSSAYLSVSLGGRVTITCKASDHINNWLAWYQHKPGNAPRLLISGATTLETGVPSRFSGSGSGKDYTLSITSLQTEDVATYYCQQSWNTPWTFGGGTKLEIKRGGGGSGGGGSGGGGSQVQLQQSGAELVRPGSSVKISCKASGYAFSSYWVNWMKQRPGQGLEWIGQIYPGDGDTNYNGKFKGRATVTADKSSSTSYMQFSSLTSEDSAVYFCARSITTVVGCAMDYWGQGTSVTVSS

SEQ ID NO: 11374 - protein, 243 aa, Artificial Sequence
  Synthetic Polypeptide
EVQLLESGGGLVQPGGSLRLSCAASGFTFSSYAMSWVRQAPGKGLEWVSVISGSGGRPNYADSVKGRFTISRDNSKNTLYLQMNSLRDEDTAVYYCAKVDYSNYLFFDYWGQGTLVTVSSGGGGSGGGGSGGGGSEIVLTQSPGTLSLSPGEGATLSCRAGQSVRSSYLGWYQQKPGQAPRLLIYGASSRATGIPDRFSGSGSGTDFTLTISRLEPEDFAVYYCQQYGYSPPTFGGGTKLEIK

SEQ ID NO: 11375 - protein, 246 aa, Artificial Sequence
  Synthetic Polypeptide
DIVLTQSPPSLAMSLGKRATISCRASESVTILGSHLIHWYQQKPGQPPTLLIQLASNVQTGVPARFSGSGSRTDFTLTIDPVEEDDVAVYYCLQSRTIPRTFGGGTKLEIKGSTSGSGKPGSGEGSTKGQIQLVQSGPELKKPGETVKISCKASGYTFTDYSINWVKRAPGKGLKWMGWINTETREPAYAYDFRGRFAFSLETSASTAYLQINNLKYEDTATYFCALDYSYAMDYWGQGTSVTVSS

SEQ ID NO: 11376 - protein, 246 aa, Artificial Sequence
  Synthetic Polypeptide
DIQMTQSPSSLSASVGDRVTITCRASSSVSYMHWYQQKPGKAPKLLIYATSNLASGVPSRFSGSGSGTDFTLTISSLQPEDFATYYCQQWTFNPPTFGQGTKLEIKRTVAAGGGGSGGGGSGGGGSQVQLVQSGAEVKKPGASVKVSCKASGYTFTSYNMHWVRQAPGQRLEWMGGIYPGNGDTSYNQKFKGRVTITRDTSASTAYMELSSLRSEDTAVYYCARYDYNYAMDYWGQGTLVTVSSAS

SEQ ID NO: 11377 - protein, 241 aa, Artificial Sequence
  Synthetic Polypeptide
EIVLTQSPGTLSLSPGERATLSCRASQSVSSSYLAWYQQKPGQAPRLLIYGASSRATGIPDRFSGSGSGTDFTLTISRLEPEDFAVYYCQQYHHSPLTFGGGTKVEIKRGGGGSGGGGSGGGGSEVQLVESGGGLVQPGGSLRLSCAASGFTFSGRSMNWVRQAPGKGLEWVSYISSDSRTIYYADSVKGRFTISRDNAKNSLYLQMNSLRAEDTAVYYCARGGHGYFDLWGRGTLVTVSS

SEQ ID NO: 11378 - protein, 244 aa, Artificial Sequence
  Synthetic Polypeptide
EIVLTQSPGTLSLSPGERATLSCRASQSVSSDYLAWYQQKPGQAPRLLIYGASRRATGIPDRFSGSGSGTDFTLTISRLEPEDFAVYYCQQYVSYWTFGGGTKVEIKRGGGGSGGGGSGGGGSQVQLVESGGGVVQPGRSLRLSCAASGFTFSSYGMHWVRQAPGKGLEWVAGIWWDGSNEKYADSVKGRFTISRDNSKNTLYLQMNSLRAEDTAVYYCAKEAPYYAKDYMDVWGKGTTVTVSS

SEQ ID NO: 11379 - protein, 244 aa, Artificial Sequence
  Synthetic Polypeptide
DIQMTQSPSSLSASVGDRVTITCRASQDVNTAVAWYQQKPGKAPKLLIYSASFLYSGVPSRFSGSRSGTDFTLTISSLQPEDFATYYCQQHYTTPPTFGQGTKVEIKRTGGGGSGGGGSGGGGSEVQLVESGGGLVQPGGSLRLSCAASGFNIKDTYIHWVRQAPGKGLEWVARIYPTNGYTRYADSVKGRFTISADTSKNTAYLQMNSLRAEDTAVYYCSRWGGWGFYAMDYWGQGTLVTVSS

SEQ ID NO: 11380 - protein, 239 aa, Artificial Sequence
  Synthetic Polypeptide
QVQLVESGGGLVKPGGSLRLSCAASGFTFSDYYMTWIRQAPGKGLEWISYISSSGSTIYYADSVKGRFTISRDNAKNSLYLQMNSLRAEDTAVYYCARDRNSHFDYWGQGTLVTVSSGGGGSGGGGSGGGGSDIQMTQSPSSVSASVGDRVTITCRASQGITRWLAWYQQKPGKAPKLLIYAASVLQSGVPSRFSGSGSGTDFTLTISSLQPEDFATYYCQQSNSFPRTFGQGTKVEIK

SEQ ID NO: 11381 - protein, 239 aa, Artificial Sequence
  Synthetic Polypeptide
QVQLVESGGGLVKPGGSLRLSCAASGFTFSDHYMSWIRQAPGKGLEWFSYISSSGGIIYYADSVKGRFTISRDNAKNSLYLQMNSLRAEDTAVYYCARDVGSHFDYWGQGTLVTVSSGGGGSGGGGSGGGGSDIQMTQSPSSVSASVGDRVTITCRASQDISRWLAWYQQKPGKAPKLLISAASRLQSGVPSRFSGSGSGTDFTLTISSLQPEDFAIYYCQQAKSFPRTFGQGTKVEIK

SEQ ID NO: 11382 - protein, 251 aa, Artificial Sequence
  Synthetic Polypeptide
QVQLVESGGGVVQSGRSLRLSCAASGFTFRNYGMHWVRQAPGKGLEWVAVIWYDGSDKYYADSVRGRFTISRDNSKNTLYLQMNSLRAEDTAVYYCARDGYDILTGNPRDFDYWGQGTLVTVSSGGGGSGGGGSGGGGSDTVMTQTPLSSHVTLGQPASISCRSSQSLVHSDGNTYLSWLQQRPGQPPRLLIYRISRRFSGVPDRFSGSGAGTDFTLEISRVEAEDVGVYYCMQSTHVPRTFGQGTKVEIK

SEQ ID NO: 11383 - protein, 244 aa, Artificial Sequence
  Synthetic Polypeptide
EVQLVESGGGLVQPGGSLRLSCAASGFPFSSYDMHWVRQATGKGLEWVSAIGTAGATYYPGSVKGRFTISRENAKNSLYLQMNSLRAGDTAVYYCARGDYVWGTYRPLFDYWGQGTLVTVSSGGGGSGGGGSGGGGSDIQLTQSPSFLSASVGDRVTITCWASQGINNYLAWYQQKPGKAPKLLIYAASTLQTGVPSRFSGSGSGTEFTLTISSLQPEDFATYYCQQLNSYPLTFGGGTKVEIK

SEQ ID NO: 11384 - protein, 241 aa, Artificial Sequence
  Synthetic Polypeptide
QVQLQESGPGLVKPSETLSLTCTVSGASISSFYWSWIRQPPGKGLEWIGYIYYSGTTNYNPSLKSRVTISVDTSKNQFSLKLSSVTAADTAVYYCARIAVAGFFFDYWGQGTLVTVSSGGGGSGGGGSGGGGSEIVLTQSPGTLSLSPGERATLSCRASQSVNKNYLAWYQQKPGQAPRLLIYGASSRATGIPDRFSGSGSGTDFTLTISRLEPEDFAVYYCQQYDRSPLTFGGGTKVEIK

SEQ ID NO: 11385 - protein, 250 aa, Artificial Sequence
  Synthetic Polypeptide
QVQLVQSGAEVKKPGASVKVSCKASGYTFTNYYMHWVRQAPGLGLEWMGIINPSDGSTSYAQKFQGRVTMTRDTSTNTVYMDLSSLRSEDTAVYYCARGGNSAFYSYYDMDVWGQGTTVTVSSGGGGSGGGGSGGGGSDVVMTQTPLSLPVTLGQPASISCRSSQSLVYRDGNTYLSWFQQRPGQSPRRLIYKVSNWQSGVPDRFSGGGSGTDFTLKISRVEAEDVGVYYCMQGTHWPPTFGQGTKVEIK

SEQ ID NO: 11386 - protein, 237 aa, Artificial Sequence
  Synthetic Polypeptide
QVQLQQSGPELVKPGASVRISCKASGYTFTTYYIHWVKQRPGQGLEWIGWIYPGNVNTNYNEKFKGKATLTADKSSSTAYMQLTSLTSEDSAVYFCARGVYYFDYWGQGTILTVSSGGGGSGGGGSGGGGSIVMTQTPKFLLVSAGDRVTITCKASQSVNNDVSWFQQKPGQSPTLLIYYASNRYTGVPDRFTGSGYGTDFTFTISTVQAEDLAVYFCQQDYSSPYTFGGGTKLEIK

SEQ ID NO: 11387 - protein, 240 aa, Artificial Sequence
  Synthetic Polypeptide
QVQLQESGPGLVKPSQTLSLTCTVSGGSINNNNYYWTWIRQHPGKGLEWIGYIYYSGSTFYNPSLKSRVTISVDTSKTQFSLKLSSVTAADTAVYYCAREDTMTGLDVWGQGTTVTVSSGGGGSGGGGSGGGGSDIQMTQSPSSLSASVGDRVTITCRASQSINNYLNWYQQKPGKAPTLLIYAASSLQSGVPSRFSGSRSGTDFTLTISSLQPEDFAAYFCQQTYSNPTFGQGTKVEVK

SEQ ID NO: 11388 - protein, 245 aa, Artificial Sequence
  Synthetic Polypeptide
SYELTQPPSVSVSPGQTASITCSGDKLGDKYASWYQQKPGQSPVLVIYQDNRRPSGIPERFSGSNSGNTATLTISGTQAMDEADYYCQAWDSDTYVFGTGTKVTVLGQGGGGSGGGGSGGGGSEVQLVQSGAEVKKPGASVKVSCKASGDTFKRYYVHWVRQAPGQGLEWMGIINPSGVSTTYAQKFQGRVTMTRDTSTSTVYMELSSLRSEDTAVYYCAEVRGSGFNYFGMDVWGQGTLVTVSS

SEQ ID NO: 11389 - protein, 244 aa, Artificial Sequence
  Synthetic Polypeptide
EVQLLESGGGLVQPGGSLRLSCAASGFTFSSYAMSWVRQAPGKGLEVVVSAISGGGGRTYYADSVKGRFTISRDNSKNTLYLQMNSLRAEDTAVYYCAREEMAFRAYRFDIWGQGTLVTVSSGGGGSGGGGSGGGGSDIQMTQSPSSLSASVGDRVTITCRASQSISSYLNWYQQKPGKAPKLLIYAASSLQSGVPSRFSGSGSGTDFTLTISSLQPEDFATYYCQQSYITPLTFGGGTKVEIK

SEQ ID NO: 11390 - protein, 252 aa, Artificial Sequence
  Synthetic Polypeptide
DIVLTQSPASLAVSLGQGATISCRASKSVSTSGYTYMHWYQQKPGQPPKLLIYLASNLESGVPARFSGSGSGTDFTLNIHPVEEEDAATYYCQHSGELPPSFGGGTKLEIKRAGGGGSGGGGSGGGGSEVQLVESGGDLVKPGGSLKLSCAVSGFTFSSYGMSWVRQTPDKRLEWVATVSSGGTYTYYPDSVKGRFTISRDNAKNTLYLQMSSLKSEDSAMYYCARHRGNYYATYYYAMDYWGQGTSVTVSS

SEQ ID NO: 11391 - protein, 246 aa, Artificial Sequence
  Synthetic Polypeptide
DIQMTQSPSSLSASVGDRVTITCSASQGIRNYLNWYQQKPGKVPKLLIYYTSRLHSGVPSRFSGSGSGTDFTLTISSLQPEDVATYYCQQYGKLPYTFGQGTKLEIKRTVAAGGGGSGGGGSGGGGSEVQLVESGGGLVQPGGSLRLSCAASGFTFSDAWMDWVRQAPGKGLEWVGEIRSKVNNHETYYAESVKGRFTISRDDSKNSLYLQMNSLKTEDTAVYYCARNDYFDYWGQGTTVTVSSAS

SEQ ID NO: 11392 - protein, 254 aa, Artificial Sequence
  Synthetic Polypeptide
EVQLQESGAEVKKPGSSVKVSCKASGFNIKDTYMHWVRQAPGQGLEWMGRIDPANGNSKYVPKFQGRVTITADESTSTAYMELSSLRSEDTAVYYCAPFGYYVSDYAMAYWGQGTTVTVSSASGGGGSGGGGSGGGGSDIVMTQSPDSLAVSLGERATINCRAGESVDIFGVGFLHWYQQKPGQPPKLLIYRASNLESGVPDRFSGSGSGTDFTLTIRPLQAEDVAVYYCQQTNEDPYTFGQGTKLEIKRTVAA

SEQ ID NO: 11393 - protein, 247 aa, Artificial Sequence
  Synthetic Polypeptide
QVQLVQSGAEVKKPGSSVKVSCKASGGTFSSYAISWVRQAPGQGLEWMGLIIPRYGKARYAQKFQGRVTITADESTSTAYMELSSLRSEDTAVYYCARNWPYYYMDFWGQGTLVTVSSASGGGGSGGGGSGGGGSDIVLTQSPATLSLSPGERATLSCRASQNIVFNLAWYQQKPGQAPRLLIYDASNRATGVPARFSGSGSGTDFTLTISSLEPEDFAVYYCQQKKSMPLTFGQGTKVEIKRTVAA

SEQ ID NO: 11394 - protein, 250 aa, Artificial Sequence
  Synthetic Polypeptide
EVQLVESGGGLVKPGGSLRLSCAASGFTFSNAWMSWVRQAPGKGLEWVGRIKSKTEGGTTDYAAPVKGRFTISRDDSKNTLYLQMNSLKTEDTAVYYCTTPYEWSWYDYWGQGTLVTVSSASGGGGSGGGGSGGGGSQTVVTQEPSLTVSPGGTVTLTCGSSTGAVTTSNYANWVQQKPGQAPRGLIGGTNKRAPGTPARFSGSLLGGKAALTLSGVQPEDEAEYYCALWYSNLWVFGGGTKLTVLTVAA

SEQ ID NO: 11395 - protein, 250 aa, Artificial Sequence
  Synthetic Polypeptide
QVQLVQSGAEVKKPGASVKVSCKASGYTFTSYYMHWVRQAPGQGLEWMGIINPSGGSTSYAQKFQGRVTMTHDTSTSTVYMELSSLRSEDTAVYYCARSFFTGFHLDYWGQGTLVTVSSASGGGGSGGGGSGGGGSEIVLTQSPGTLSLSPGERATLSCRASQSVSSSYLAWYQQKPGQAPRLLIYGASSRATGIPDRFSGSGSGTDFTLTISRLEPEDFAVYYCQQYTNEHYYTFGQGTKVEIKRTVAA

SEQ ID NO: 11396 - protein, 256 aa, Artificial Sequence
  Synthetic Polypeptide
EIVLTQSPATLSLSPGERATLSCSVSSSISSSNLHWYQQKPGQAPRLLIYGTSNLASGIPARFSGSGSGTDFTLTISSLEPEDFAVYYCQQWSSYPHTFGGGTKVEIKRTVAAGGGGSGGGGSGGGGSQVQLVQSGAEVKKPGASVKVSCKASGYTFTNYLIEWVRQAPGQGLEWMGLINPGSGGTNYNEKFKGRVTMTTDTSTSTAYMELRSLRSDDTAVYYCARRSPLGSWIYYAYDGVAYWGQGTLVTVSSAS

SEQ ID NO: 11397 - protein, 241 aa, Artificial Sequence
  Synthetic Polypeptide
DIQMTQSPSSLSASVGDRVTITCKAGQNVGTSVAWYQQKPGKAPKLLIYSASYRYSGVPSRFSGSGSGTDFTLTISSLQPEDFATYYCQQYITYPYTFGQGTKVEIKRTVAAGGGGSGGGGSGGGGSEVQLVESGGGLVQPGGSLRLSCAASGFTFSRYWMSWVRQAPGKGLEWVAEINPDSSTIQYTPSLKARFTLSVDRSKNTLYLQMNSLRAEDTAVYYCARPAYWGQGTLVTVSSAS

SEQ ID NO: 11398 - protein, 248 aa, Artificial Sequence
  Synthetic Polypeptide
DIQMTQSPSSLSASVGDRVTITCSASQDIGNFLNWYQQKPGKAPKLLIYYTSSLYSGVPSRFSGSGSGTDFTLTISSLQPEDFATYYCQQYSKLPLTFGQGTKLEIKRTVAAGGGGSGGGGSGGGGSQVQLVQSGAEVKKPGASVKVSCKASGYTFTGYNIHWVRQAPGQRLEWMGAIYPGNGDTSYKQKFRGRVTITRDTSASTAYMELSSLRSEDTAVYYCARGETARATFAYWGQGTLVTVSSAS

SEQ ID NO: 11399 - protein, 112 aa, Artificial Sequence; identical to SEQ ID NO: 10915
  Synthetic Polypeptide

SEQ ID NO: 11400 - protein, 107 aa, Artificial Sequence; identical to SEQ ID NO: 10916
  Synthetic Polypeptide

SEQ ID NO: 11401 - protein, 108 aa, Artificial Sequence; identical to SEQ ID NO: 10917
  Synthetic Polypeptide

SEQ ID NO: 11402 - protein, 108 aa, Artificial Sequence; identical to SEQ ID NO: 10918
  Synthetic Polypeptide

SEQ ID NO: 11403 - protein, 108 aa, Artificial Sequence; identical to SEQ ID NO: 10919
  Synthetic Polypeptide

SEQ ID NO: 11404 - protein, 108 aa, Artificial Sequence; identical to SEQ ID NO: 10920
  Synthetic Polypeptide

SEQ ID NO: 11405 - protein, 108 aa, Artificial Sequence; identical to SEQ ID NO: 10921
  Synthetic Polypeptide

SEQ ID NO: 11406 - protein, 112 aa, Artificial Sequence; identical to SEQ ID NO: 10922
  Synthetic Polypeptide

SEQ ID NO: 11407 - protein, 112 aa, Artificial Sequence; identical to SEQ ID NO: 10923
  Synthetic Polypeptide

SEQ ID NO: 11408 - protein, 109 aa, Artificial Sequence; identical to SEQ ID NO: 10924
  Synthetic Polypeptide

SEQ ID NO: 11409 - protein, 245 aa, Artificial Sequence
  Synthetic Polypeptide
SYVLTQPPSVSVAPGQTARITCGGNNIGSKSVHWYQQPPGQAPVVVVYDDSDRPSGIPERFSGSNSGNTATLTISRVEAGDEAVYYCQVWDSSSDHVVFGGGTKLTVLGGGGSGGGGSGGGGSQLQLQESGPGLVKPSETLSLTCTVSGGSISSSSYFWGWIRQPPGKGLEWIGSIYYSGITYYNPSLKSRVTISVDTSKNQFSLKLSSVTAADTAVYYCARHDGAVAGLFDYWGQGTLVTVSSA

SEQ ID NO: 11410 - protein, 245 aa, Artificial Sequence
  Synthetic Polypeptide
SYVLTQPPSVSVAPGQTARITCGGNNIGSKSVHWYQQPPGQAPVVVVYDDSDRPSGIPERFSGSNSGNTATLTISRVEAGDEAVYYCQVWDSSSDHVVFGGGTKLTVLGGGGSGGGGSGGGGSQLQLQESGPGLVKPSETLSLTCTVSGGSISSGSYIWGWIRQPPGKGLEWIGSIYYSGITYYNPSLKSRVTISVDTSKNQFSLKLSSVTAADTAVYYCARHDGAVAGLFDYWGQGTLVTVSSA

SEQ ID NO: 11411 - protein, 245 aa, Artificial Sequence
  Synthetic Polypeptide
SYVLTQPPSVSVAPGQTARITCGGNNIGSKSVHWYQQPPGQAPVVVVYDDSDRPSGIPERFSGSNSGNTATLTISRVEAGDEAVYYCQVWDSSSDHVVFGGGTKLTVLGGGGSGGGGSGGGGSQLQLQESGPGLVKPSETLSLTCTVSGGSISSGSYFWGWIRQPPGKGLEWIGSIYYSGITYYNPSLKSRVTISVDTSKNQFSLKLSSVTAADTAVYYCARHDGAMAGLFDYWGQGTLVTVSSA

SEQ ID NO: 11412 - protein, 245 aa, Artificial Sequence
  Synthetic Polypeptide
SYVLTQPPSVSVAPGQTARITCGGNNIGSKSVHWYQQPPGQAPVVVVYDDSDRPSGIPERFSGSNSGNTATLTISRVEAGDEAVYYCQVWDSSSDHVVFGGGTKLTVLGGGGSGGGGSGGGGSQLQLQESGPGLVKPSETLSLTCTVSGGSISSGSYFWGWIRQPPGKGLEWIGSIYYSGSTYYNPSLKSRVTISVDTSKNQFSLKLSSVTAADTAVYYCARHDGAVAGLFDYWGQGTLVTVSSA

SEQ ID NO: 11413 - protein, 245 aa, Artificial Sequence
  Synthetic Polypeptide
SYVLTQPPSVSVAPGQTARITCGGNNIGSKSVHWYQQPPGQAPVVVVYDDSDRPSGIPERFSGSNSGNTATLTISRVEAGDEAVYYCQVWDSSSDHVVFGGGTKLTVLGGGGSGGGGSGGGGSQLQLQESGPGLVKPSETLSLTCTVSGGSISSGSYFWGWIRQPPGKGLEWIGSIYYSGISYYNPSLKSRVTISVDTSKNQFSLKLSSVTAADTAVYYCARHDGAVAGLFDYWGQGTLVTVSSA

SEQ ID NO: 11414 - protein, 245 aa, Artificial Sequence
  Synthetic Polypeptide
SYVLTQPPSVSVAPGQTARITCGGNNIGSKSVHWYQQPPGQAPVVVVYDDSDRPSGIPERFSGSNSGNTATLTISRVEAGDEAVYYCQVWDSSSDHVVFGGGTKLTVLGGGGSGGGGSGGGGSQLQLQESGPGLVKPSETLSLTCTVSGGSISSGSYFWGWIRQPPGKGLEWIGSIYYSGITYYNPGLKSRVTISVDTSKNQFSLKLSSVTAADTAVYYCARHDGAVAGLFDYWGQGTLVTVSSA

SEQ ID NO: 11415 - protein, 245 aa, Artificial Sequence
  Synthetic Polypeptide
SYVLTQPPSVSVAPGQTARITCGGNNIGSKSVHWYQQPPGQAPVVVVYDDSDRPSGIPERFSGSNSGNTATLTISRVEAGDEAVYYCQVWDSSSDHVVFGGGTKLTVLGGGGSGGGGSGGGGSQLQLQESGPGLVKPSETLSLTCTVSGGSISSGSYFWGWIRQPPGKGLEWIGSIYYSGITYYNPTLKSRVTISVDTSKNQFSLKLSSVTAADTAVYYCARHDGAVAGLFDYWGQGTLVTVSSA

SEQ ID NO: 11416 - protein, 245 aa, Artificial Sequence
  Synthetic Polypeptide
SYVLTQPPSVSVAPGQTARITCGGKNIGSKSVHWYQQPPGQAPVVVVYDDSDRPSGIPERFSGSNSGNTATLTISRVEAGDEAVYYCQVWDSSSDHVVFGGGTKLTVLGGGGSGGGGSGGGGSQLQLQESGPGLVKPSETLSLTCTVSGGSISSGSYFWGWIRQPPGKGLEWIGSIYYSGITYYNPSLKSRVTISVDTSKNQFSLKLSSVTAADTAVYYCARHDGAVAGLFDYWGQGTLVTVSSA

SEQ ID NO: 11417 - protein, 245 aa, Artificial Sequence
  Synthetic Polypeptide
SYVLTQPPSVSVAPGQTARITCGGNNLGSKSVHWYQQPPGQAPVVVVYDDSDRPSGIPERFSGSNSGNTATLTISRVEAGDEAVYYCQVWDSSSDHVVFGGGTKLTVLGGGGSGGGGSGGGGSQLQLQESGPGLVKPSETLSLTCTVSGGSISSGSYFWGWIRQPPGKGLEWIGSIYYSGITYYNPSLKSRVTISVDTSKNQFSLKLSSVTAADTAVYYCARHDGAVAGLFDYWGQGTLVTVSSA

SEQ ID NO: 11418 - protein, 245 aa, Artificial Sequence
  Synthetic Polypeptide
SYVLTQPPSVSVAPGQTARITCGGNNIGGKSVHWYQQPPGQAPVVVVYDDSDRPSGIPERFSGSNSGNTATLTISRVEAGDEAVYYCQVWDSSSDHVVFGGGTKLTVLGGGGSGGGGSGGGGSQLQLQESGPGLVKPSETLSLTCTVSGGSISSGSYFWGWIRQPPGKGLEWIGSIYYSGITYYNPSLKSRVTISVDTSKNQFSLKLSSVTAADTAVYYCARHDGAVAGLFDYWGQGTLVTVSSA

SEQ ID NO: 11419 - protein, 245 aa, Artificial Sequence
  Synthetic Polypeptide
SYVLTQPPSVSVAPGQTARITCGGNNIGSKTVHWYQQPPGQAPVVVVYDDSDRPSGIPERFSGSNSGNTATLTISRVEAGDEAVYYCQVWDSSSDHVVFGGGTKLTVLGGGGSGGGGSGGGGSQLQLQESGPGLVKPSETLSLTCTVSGGSISSGSYFWGWIRQPPGKGLEWIGSIYYSGITYYNPSLKSRVTISVDTSKNQFSLKLSSVTAADTAVYYCARHDGAVAGLFDYWGQGTLVTVSSA

SEQ ID NO: 11420 - protein, 245 aa, Artificial Sequence
  Synthetic Polypeptide
SYVLTQPPSVSVAPGQTARITCGGKNIGSKSVHWYQQPPGQAPVVVVYDDSDRPSGIPERFSGSNSGNTATLTISRVEAGDEAVYYCQVWDSSSDHVVFGGGTKLTVLGGGGSGGGGSGGGGSQLQLQESGPGLVKPSETLSLTCTVSGGSISSSSYFWGWIRQPPGKGLEWIGSIYYSGITYYNPSLKSRVTISVDTSKNQFSLKLSSVTAADTAVYYCARHDGAVAGLFDYWGQGTLVTVSSA

SEQ ID NO: 11421 - protein, 245 aa, Artificial Sequence
  Synthetic Polypeptide
SYVLTQPPSVSVAPGQTARITCGGNNLGSKSVHWYQQPPGQAPVVVVYDDSDRPSGIPERFSGSNSGNTATLTISRVEAGDEAVYYCQVWDSSSDHVVFGGGTKLTVLGGGGSGGGGSGGGGSQLQLQESGPGLVKPSETLSLTCTVSGGSISSSSYFWGWIRQPPGKGLEWIGSIYYSGITYYNPSLKSRVTISVDTSKNQFSLKLSSVTAADTAVYYCARHDGAVAGLFDYWGQGTLVTVSSA

SEQ ID NO: 11422 - protein, 245 aa, Artificial Sequence
  Synthetic Polypeptide
SYVLTQPPSVSVAPGQTARITCGGNNIGGKSVHWYQQPPGQAPVVVVYDDSDRPSGIPERFSGSNSGNTATLTISRVEAGDEAVYYCQVWDSSSDHVVFGGGTKLTVLGGGGSGGGGSGGGGSQLQLQESGPGLVKPSETLSLTCTVSGGSISSSSYFWGWIRQPPGKGLEWIGSIYYSGITYYNPSLKSRVTISVDTSKNQFSLKLSSVTAADTAVYYCARHDGAVAGLFDYWGQGTLVTVSSA

SEQ ID NO: 11423 - protein, 242 aa, Artificial Sequence
  Synthetic Polypeptide
EIVLTQSPATLSLSPGERATLSCRASQSVSSYLAWYQQKPGQAPRLLIYDASNRATGIPARFSGSGSGTDFTLTISSLEPEDFAVYYCQQRSNWPLTFGQGTKVEIKGGGGSGGGGSGGGGSQVQLVQSGAEVKKPGSSVKVSCKASGGTFSTYAIHWVRQAPGQGLEWMGRIIPIEGRAYYAQKFQGRVTITADESTSTAYMELSSLRSEDTAVYYCARGRYSYRYWFDYWGQGTLVTVSS

SEQ ID NO: 11424 - protein, 250 aa, Artificial Sequence
  Synthetic Polypeptide
DIVMTQSPDSLAVSLGERATINCKSSQSVLYSSNNKNYLAWYQQKPGQPPKLLIYWASTRESGVPDRFSGSGSGTDFTLTISSLQAEDVAVYYCQQYYSTPLTFGQGTKVEIKGGGGSGGGGSGGGGSEVQLVQSGAEVKKPGESLKISCKGSGYSFTSYWIGWVRQMPGKGLEWMGIIYPGDSDTRYSPSFQGQVTISADKSISTAYLQWSSLKASDTAMYYCARDVGRWAPGGFLDYWGQGTLVTVSS

SEQ ID NO: 11425 - protein, 241 aa, Artificial Sequence
  Synthetic Polypeptide
DIQMTQSPSSLSASVGDRVTITCRASQSINKWLNWYQQKPGKAPKLLIYAASSLQSGVPSRFSGSGSGTDFTLTISSLQPEDFATYYCQQDYNFPYTFGQGTKVEIKRGGGGSGGGGSGGGGSQVQLVQSGAEVKKPGSSVKVSCKASGGTFSSYGISWVRQAPGQGLEWMGWISAIFGTANYAQKFQGRVTITADESTSTAYMELSSLRSEDTAVYYCARGVASWYLDYWGQGTLVTVSS

SEQ ID NO: 11426 - protein, 241 aa, Artificial Sequence
  Synthetic Polypeptide
QIVLSQSPAILSASPGEKVTMTCRASSSVSYIHWFQQKPGSSPKPWIYATSNLASGVPVRFSGSGSGTSYSLTISRVEAEDAATYYCQQWTSNPPTFGGGTKLEIKGGGGSGGGGSGGGGSQVQLQQPGAELVKPGASVKMSCKASGYTFTSYNMHWVKQTPGRGLEWIGAIYPGNGDTSYNQKFKGKATLTADKSSSTAYMQLSSLTSEDSAVYYCARSTYYGGDWYFNVWGAGTTVTVS

SEQ ID NO: 11427 - protein, 241 aa, Artificial Sequence
  Synthetic Polypeptide
DIQLTQSHKFLSTSVGDRVSITCKASQDVYNAVAWYQQKPGQSPKLLIYSASSRYTGVPSRFTGSGSGPDFTFTISSVQAEDLAVYFCQQHFRTPFTFGSGTKLEIKGGGGSGGGGSGGGGSQVQLQQSGPELKKPGETVKISCKASGYPFTNYGMNWVKQAPGQGLKWMGWINTSTGESTFADDFKGRFDFSLETSANTAYLQINNLKSEDMATYFCARWEVYHGYVPYWGQGTTVTVSS

SEQ ID NO: 11428 - protein, 240 aa, Artificial Sequence
  Synthetic Polypeptide
DIQLTQSPSSLSASVGDRVTITCKASQDVGTSVAWYQQKPGKAPKLLIYWTSTRHTGVPSRFSGSGSGTDFTFTISSLQPEDIATYYCQQYSLYRSFGQGTKVEIKGGGGSGGGGSGGGGSEVQLVESGGGVVQPGRSLRLSCSASGFDFTTYWMSWVRQAPGKGLEWIGEIHPDSSTINYAPSLKDRFTISRDNAKNTLFLQMDSLRPEDTGVYFCASLYFGFPWFAYWGQGTPVTVSS

SEQ ID NO: 11429 - protein, 244 aa, Artificial Sequence
  Synthetic Polypeptide
DIQLTQSPSSLSASVGDRVTITCSTSSSVSYMHWYQQKPGKAPKLLIYSTSNLASGVPSRFSGSGSGTDFTFTISSLQPEDIATYYCHQWSSYPTFGQGTKVEIKGGGGSGGGGSGGGGSGVHSQVQLQESGPGLVRPSQTLSLTCTVSGFTISSGYSWHWVRQPPGRGLEWIGYIQYSGITNYNPSLKSRVTMLVDTSKNQFSLRLSSVTAADTAVYYCAREDYDYHWYFDVWGQGTTVTVSS

SEQ ID NO: 11430 - protein, 244 aa, Artificial Sequence
  Synthetic Polypeptide
DIQMTQSPSSLSASVGDRVTITCRASQDVNTAVAWYQQKPGKAPKLLIYSASFLYSGVPSRFSGSRSGTDFTLTISSLQPEDFATYYCQQAYTTPPTFGQGTKVEIKRTGGGGSGGGGSGGGGSEVQLVESGGGLVQPGGSLRLSCAASGFNIKDTYIHWVRQAPGKGLEWVARIYPTNGYTRYADSVKGRFTISADTSKNTAYLQMNSLRAEDTAVYYCSRWGGAGAYAMDVWGQGTLVTVSS

SEQ ID NO: 11431 - protein, 247 aa, Artificial Sequence
  Synthetic Polypeptide
EIVLTQSPGTLSLSPGERATLSCRASQSVSSDYLAWYQQKPGQAPRLLIYGASSRATGIPDRFSGSGSGTDFTLTISRLPEDFAVYYCQQYVSYWTFGGGTKVEIKRTVAAGGGGSGGGGSGGGGSQVQLVESGGGVVQPGRSLRLSCAASGFTFSSYAMHWVRQAPGKGLEWVAVISYDGSNKYYADSVKGRFTISRDNSKNTLYLQMNSLRAEDTAVYYCAKEAPYYAKDYMDVWGKGTTVTVSS

SEQ ID NO: 11432 - protein, 246 aa, Artificial Sequence
  Synthetic Polypeptide
SYELIQPPSAAVTLGNTVSLTCVGDELPKRYAYWYQQKPDQSIVRVIYEDSVRPPGISDRFSGSSSGTTATLTIRDAQNEDEADYYCQSTYGDDKLYIFGGGTKLTVLGGGGGSGGGGSGGGGSEVQLVETGGGLVQPGKSLELTCATSGFTFNTAWMHWVRQSPDKRLEWIARIKDTSNNYATDYVESMKGRFTISRDDSKGSVNLQMNSLKEEDTATYYCTTDFYDGTYYWNYWGQGVMVTVSS

SEQ ID NO: 11433 - protein, 250 aa, Artificial Sequence
  Synthetic Polypeptide
SVIELTQSPKFMSTSVGDRVNVTYKASQNVGTNVAWFQQKPGQSPKVLIYSASYRYSGVPDRFTGSGSGTDFTLTISNVQSEDLAEYFCQQYHTYPLTFGGGTKLEIKRGGGGSGGGGSGGGGSRMAQVQLQQSGAELARPGASVKMSCKASGYTFTTYTIHWVRRRPGHDLEWIGYINPSSGCSDYNQNFKGKTTLTADKSSNTAYMQLNSLTSEDSAVYYCARRADYGNYEYTWFAYWGQGTTVTVSS

SEQ ID NO: 11434 - protein, 241 aa, Artificial Sequence
  Synthetic Polypeptide
DIQMTQSPSSVSASVGDRVTITCRASQSVSSYLNWYQQKPGKAPKLLIYAASSLQSGVPSRFSGSGSGTDFTLTISSLQPEDFATYYCQQSYSTPWTFGQGTKLEIKRGGGGSGGGGSGGGGSEVQLVESGGGLVQPGRSLRLSCAASGFTFDDYGMHWVRQAPGKGLEWVSGISWNSGSIGYADSAKGRFTISRDNSKNTLYLQMNSLRAEDTAVYYCAKRGNSNSFDYWGQGTLVTVSS

SEQ ID NO: 11435 - protein, 248 aa, Artificial Sequence
  Synthetic Polypeptide
QSALTQPRSVSGSPGQSVTISCTGTSSDVGSYNYVSWYQQSPGKAPKLMIYDVSNRPSGVSNRFSGSKSGNTASLTISGLQSEDEADYYCTSYGSYDIPVIFGGGTKVEIKGGGGSGGGGSGGGGSQMQLVQSGAEVKKPGSSVKVSCKASGGTFSSYAISWVRQAPGQGLEWMGGIIPIFGTANYAQKFQGRVTITADKSTSTAYMELSSLRSDDTAVYYCARDELWATNYYYMDVWGKGTLVTVSS

SEQ ID NO: 11436 - protein, 241 aa, Artificial Sequence
  Synthetic Polypeptide
DVVMTQSPSSLSASVGDRVTITCKASQSVSSYLNWYQQKPGKAPKLLIYAASSLETGVPSRFSGSGSGTDFTLTISSLQPEDFATYYCQQSYSTPWTFGQGTKVEIKRGGGGSGGGGSGGGGSEVQLVESGGGLVRPGGSLRLSCAASGFTFDDYGMSWVRQAPGKGLEWVSGISWNSGSIGYADSVKGRFTISRDNAKNSLYLQMNSLRAEDTALYYCAKRGNSNSFDYWGQGTTVTVSS

SEQ ID NO: 11437 - protein, 241 aa, Artificial Sequence
  Synthetic Polypeptide
DIQMTQSPSSVSASVGDRVTITCRASQSISSYLNWYQQKPGKAPKLLIYAASSLQSGVPSRFSGSGSGTDFTLTISSLQPEDFATYYCQQSYSTPWTFGQGTKVEIKRGGGGSGGGGSGGGGSEVQLVESGGGLVQPGRSLRLSCAASGFTFDDYAMHWVRQAPGKGLEWVSGISWNSGSIGYADSAKGRFTISRDNSKNTLYLQMNSLRAEDTAVYYCAKRGNSNSFDYWGQGTLVTVSS

SEQ ID NO: 11438 - protein, 241 aa, Artificial Sequence
  Synthetic Polypeptide
DTVLTQSPALAVSPGERVTISCKASESVSTRMHWYRQKPGQQPKLLIYKTSNLASGVPARFSGSGSGTDFTLTIDPVEADDTATYFCQQSWNGPLTFGSGTKLEIKRGGGGSGGGGSGGGGSQVQLKESGPGLVQPSQTLSLTCTVSGLSLTSNGVSWIRQPPGKGLEWLGVIWSNGGTDYNSAIKSRLSFSRDTSKSQVFLKMNSLQTEDTAMYFCARPRYNSGYFFDYWGQGVMVTVSS

SEQ ID NO: 11439 - protein, 253 aa, Artificial Sequence
  Synthetic Polypeptide
DLVMTQSPFSLAVSEGEMVTIKCKSSQSLLSSRHQKNFLAWYRQKPGQSPKLLIYHASTRQSGVPDRFIGSGSGTDFTLTISDVQAEDLADYYCLQHYTSPYTFGAGTKLELKRGGGGSGGGGSGGGGSQVQLKESGPGLVQPSQTLSLTCTVSGFSLTSYHVHWVRQPPGKGLEWMGVMWSDGDTLYNSALKSRLSISRDTSKSQVLLQMDSLQSEDTATYYCARLQVFGYPGIRDYVMDAWGQGASVTVSS

SEQ ID NO: 11440 - protein, 254 aa, Artificial Sequence
  Synthetic Polypeptide
DIQLTQSPSFLSASVGDRVTITCRASQDISSYLAWYQQKPGNAPKLLIYAASLLQSGVPSRFSAFGSGTEFTLTISSLQPEDFATYYCQHLKSYPLFTFGPGTKVDIKRGGGGSGGGGSGGGGSEVQLVESGGRVVRPGGSLRLSCAASGFTFDDYGMSWVRQPPGKGLEFVSGLNWNGDITAFTDSVKGRFTISRDNVKSSLYLQMNSLRADDTAFYYCARVRTWGDYTTGEEIINSWYFDLWGRGTLVTVSS

SEQ ID NO: 11441 - protein, 242 aa, Artificial Sequence
  Synthetic Polypeptide
ELQMTQSPSSLSASVGDRVAITCRASQSISSHLNWYQQKPGKAPKLLIYAASSLQSGVPSRFSGSGSGTDFTLTISSLQPEDFATYYCQQSYSTPYTFGQGTKLEIKGGGGSGGGGSGGGGSEVQLVESGGGLVQPGGSLRLSCAASGFTFSSYWMSWVRQAPGKGLEWVANIKQDGSEKYYVDSVKGRFTISRDNAKNSLYLRMNSLRAEDTAVYYCARAWGYSSYYFDYWGQGTLVTVSP

SEQ ID NO: 11442 - protein, 238 aa, Artificial Sequence
  Synthetic Polypeptide
DIVMTQSHKFMSTSVGDRVSIICKASQDVGTAVDWYQQKPGQSPKLLIYWASTRHTGVPDRFTGSGSGTDFTLAITNVQSEDLADYFCQQYNSYPLTFGAGTKLEIKRGGGGSGGGGSGGGGSEVQLQQSGPELVKPGTSVRISCKTSGYTFTEYTIHWVKQSHGKSLEWIGNINPNNGGTTYNQKFEDKATLTVDKSSSTAYMELRSLTSEDSAVYYCAAGWNFDYWGQGTTLTVSS

SEQ ID NO: 11443 - protein, 238 aa, Artificial Sequence
  Synthetic Polypeptide
DIQMTQSPSSLSASVGDRVTITCKASQDVGTAVDWYQQKPGKAPKLLIYWASTRHTGVPSRFSGSGSGTDFTLTISSLQPEDFATYYCQQYNSYPLTFGQGTKVEIKRGGGGSGGGGSGGGGSEVQLVESGGGLVQPGGSLRLSCAASGYTFTEYTIHWVRQAPGKGLEWVANINPNNGGTTYNQKFEDRFTISRDNSKNTLYLQMNSLRAEDTAVYYCARGWNFDYWGQGTLVTVSS

SEQ ID NO: 11444 - protein, 240 aa, Artificial Sequence
  Synthetic Polypeptide
DIQMTQSPSSLSASVGDRVTITCKASQDVGTAVDWYQQKPGKAPKLLISWASTRHTGVPSRFSGSGSGTDFTLTISSLQPEDFATYFCQQYNSYPLTFGQGTKVEIKRTVGGGGSGGGGSGGGGSQVQLVQSGAEVKKPGESVKVSCKASGYTFTEYTIHWVRQAPGQGLEWMGNINPNNGGTTYNQKFEDRVTITADKSTSTAYMELSSLRSEDTAVYYCARGWNFDYWGQGTTVTVSS

SEQ ID NO: 11445 - protein, 238 aa, Artificial Sequence
  Synthetic Polypeptide
DIQMTQSPSSLSASVGDRVTITCKASQDVGTAVDWYQQKPGKAPKLLIYWASTRHTGVPSRFSGSGSGTDFTLTISSLQPEDFATYYCQQYNSYPLTFGQGTKVEIKRGGGGSGGGGSGGGGSEVQLQQSGPELVKPGTSVRISCKTSGYTFTEYTIHWVKQSHGKSLEWIGNINPNNGGTTYNQKFEDKATLTVDKSSSTAYMELRSLTSEDSAVYYCAAGWNFDYWGQGTTLTVSS

SEQ ID NO: 11446 - protein, 238 aa, Artificial Sequence
  Synthetic Polypeptide
DIVMTQSHKFMSTSVGDRVSIICKASQDVGTAVDWYQQKPGQSPKLLIYWASTRHTGVPDRFTGSGSGTDFTLAITNVQSEDLADYFCQQYNSYPLTFGAGTKLEIKRGGGGSGGGGSGGGGSEVQLVESGGGLVQPGGSLRLSCAASGYTFTEYTIHWVRQAPGKGLEWVANINPNNGGTTYNQKFEDRFTISRDNSKNTLYLQMNSLRAEDTAVYYCARGWNFDYWGQGTLVTVSS

SEQ ID NO: 11447 - protein, 244 aa, Artificial Sequence
  Synthetic Polypeptide
EIVLTQSPATLSLSPGERATLSCSATSSVSYIHWYQQKPGQAPRLLIYSTSNLASGIPARFSGSGSGTDFTLTIGRLEPEDFAVYYCQQRSSSPFTFGQGTKVEIKRGGGGSGGGGSGGGGSEVQLVESGGGLVKPEGSLRLSCAASGFTFSRYGMSWVRQAPGKGLEWVSTISGGGTYIYYPDSVKGRFTISRDNAKNSLFLQMNSLRAEDTAVYYCARDNYGRNYDYGMDYWGQGTLVTVSS

SEQ ID NO: 11448 - protein, 243 aa, Artificial Sequence
  Synthetic Polypeptide
QIVLTQSPAIMSASPGEEVTLTCSATSSVSYIHWFQQRPGTSPKLWIYSTSNLASGVPVRFSGSGYGTSYSLTISRMEAEDAATYYCQQRSSSPFTFGSGTKLEIKGGGGSGGGGSGGGGSEVKVVESGGDLVKPGGSLKLSCVVSGFTFSRYGMSWVRQTPGKRLEWVATISGGGTYIYYPDSVKGRFTISRDNAKNTLYLQMSSLKSEDTAMYHCTRDNYGRNYDYGMDYWGQGTSVTVSS

SEQ ID NO: 11449 - protein, 249 aa, Artificial Sequence
  Synthetic Polypeptide
DIVLTQSPASLAVSPGQRATITCRASKSVSTSGYSYMHWYQQKPGQPPKLLIYLASNLESGVPARFSGSGSGTDFTLTINPVEANDTANYYCQHSRELPFTFGGGTKVEIKRTGGGGSGGGGSGGGGSEVQLVESGGGLVKPGGSLRLSCAASGFTFSGYAMSWVRQAPGKGLEWVSTISSGGTYIYYPDSVKGRFTISRDNAKNSLYLQMNSLRAEDTAVYYCARLGGDNYYEYFDVWGKGTTVTVSS

SEQ ID NO: 11450 - protein, 240 aa, Artificial Sequence
  Synthetic Polypeptide
DIQMTQSPSSLSVSVGDRVTITCKASQNVRTVVAWYQQKPGLAPKTLIYLASNRHTGVPSRFSGSGSGTDFTFTISSLQPEDIATYFCQQHWSYPLTFGQGTKVEVKRGGGGSGGGGSGGGGSEVQLLESGGGLVQPGGSLRLSCAASGFAFSTYDMSWVRQAPGKGLEWVATISSGGSYTYYLDSVKGRFTISRDSSKNTLYLQMNSLQAEDSAIYYCAPTTVVPFAYWGQGTLVTVSS

SEQ ID NO: 11451 - protein, 244 aa, Artificial Sequence
  Synthetic Polypeptide
DIQMTQSPSSLSASVGDRVTITCKSSQSLLYSSNQKNYLAWFQQKPGKAPKLLIYWASTRESGVPSRFSGSGSGTDFTLTISSLQPEDFATYFCHQYLSSYTFGQGTKVEIKRGGGGSGGGGSGGGGSEVQLVESGGGLVQPGGSLRLSCAASGYTFTSYWLHWVRQAPGKGLEWVGYIRPSTGYTEYNQKFKDRFTISADTSKNTAYLQMNSLRAEDTAVYYCARSRWLLDYWGQGTLVTVSS

SEQ ID NO: 11452 - protein, 243 aa, Artificial Sequence
  Synthetic Polypeptide
DIQMTQSPSSLSASVGDRVTITCKSSQSVLYSSNQKNYLAWFQQKPGKAPKLLIYWASTRESGVPSRFSGSGSGTDFTLTISSLQPEDFATYFCHQYLSSYTFGQGTKVEIKRGGGGSGGGGSGGGGSEVQLVESGGGLVQPGGSLRLSCAASGFTFTTYWMHWVRQAPGKGLEWVGYIRPSTGYTEYNQKFKDRFTISADTSKNTAYLQMNSLRAEDTAVYYCARSRWLLDYWGQGTLVTVS

SEQ ID NO: 11453 - protein, 243 aa, Artificial Sequence
  Synthetic Polypeptide
EVQLVESGGGLVQPGGSLRLSCAASGYTFTTYWMHWVRQAPGKGLEWVGYIRPSTGYTEYNQKFKDRFTISADTSKNTAYLQMNSLRAEDTAVYYCARSRWLLDYWGQGTLVTVSGGGGSGGGGSGGGGSDIQMTQSPSSLSASVGDRVTITCKSSQSLLYSSNQKNYLAWFQQKPGKAPKLLIYWASTRESGVPSRFSGSGSGTDFTLTISSLQPEDFATYFCHQYLSSYTFGQGTKVEIKR

SEQ ID NO: 11454 - protein, 240 aa, Artificial Sequence
  Synthetic Polypeptide
DIQMTQSPSSLSASVGDRVTITCRASQDISNYLNWYQQKPGKAPKLLIYYTSRLHSGVPSRFSGSGSGTDFTLTISSLQPEDFATYYCQQGNTLPYTFGQGTKVEIKRGGGGSGGGGSGGGGSEVQLVESGGGLVQPGGSLRLSCAASGYTFSDYFMSWVRQAPGKGLEWVATISNGGTYTYYPDSVKGRFTISRDNSKNTLYLQMNSLRAEDTAVYYCARFDGYIFDYWGQGTLVTVSS

SEQ ID NO: 11455 - protein, 240 aa, Artificial Sequence
  Synthetic Polypeptide
DIQMTQSPSSLSASVGDRVTITCRASQDISSYLNWYQQKPGKAPKLLIYYTSRLHSGVPSRFSGSGSGTDFTLTISSLQPEDFATYYCQQGNTLPYTFGQGTKVEIKRGGGGSGGGGSGGGGSEVQLVESGGGLVQPGGSLRLSCAASGFTFSDYFMSWVRQAPGKGLEWVATISNGGTYTYYPDSVKGRFTISRDNSKNTLYLQMNSLRAEDTAVYYCARFDGYIFDYWGQGTLVTVSS

SEQ ID NO: 11456 - protein, 240 aa, Artificial Sequence
  Synthetic Polypeptide
DIQMTQSPSSLSASVGDRVTITCRASQDISNYLNWYQQKPGKAPKLLIYYTSRLHSGVPSRFSGSGSGTDFTLTISSLQPEDFATYYCQQGNTLPWTFGQGTKVEIKRGGGGSGGGGSGGGGSEVQLVESGGGLVQPGGSLRLSCAASGFTFSDYFMSWVRQAPGKGLEWVATISNGGTYTYYPDSVKGRFTISRDNSKNTLYLQMNSLRAEDTAVYYCARFDGYIFDYWGQGTLVTVSS

SEQ ID NO: 11457 - protein, 245 aa, Artificial Sequence
  Synthetic Polypeptide
SYVLTQPPSVSVAPGQTARITCGGNNIGSKTVHWYQQPPGQAPVVVVYDDSDRPSGIPERFSGSNSGNTATLTISRVEAGDEAVYYCQVWDSSSDHVVFGGGTKLTVLGGGGSGGGGSGGGGSQLQLQESGPGLVKPSETLSLTCTVSGGSISSSSYFWGWIRQPPGKGLEWIGSIYYSGITYYNPSLKSRVTISVDTSKNQFSLKLSSVTAADTAVYYCARHDGAVAGLFDYWGQGTLVTVSSA

SEQ ID NO: 11458 - protein, 245 aa, Artificial Sequence
  Synthetic Polypeptide
SYVLTQPPSVSVAPGQTARITCGGKNIGSKSVHWYQQPPGQAPVVVVYDDSDRPSGIPERFSGSNSGNTATLTISRVEAGDEAVYYCQVWDSSSDHVVFGGGTKLTVLGGGGSGGGGSGGGGSQLQLQESGPGLVKPSETLSLTCTVSGGSISSGSYIWGWIRQPPGKGLEWIGSIYYSGITYYNPSLKSRVTISVDTSKNQFSLKLSSVTAADTAVYYCARHDGAVAGLFDYWGQGTLVTVSSA

SEQ ID NO: 11459 - protein, 245 aa, Artificial Sequence
  Synthetic Polypeptide
SYVLTQPPSVSVAPGQTARITCGGKNIGSKSVHWYQQPPGQAPVVVVYDDSDRPSGIPERFSGSNSGNTATLTISRVEAGDEAVYYCQVWDSSSDHVVFGGGTKLTVLGGGGSGGGGSGGGGSQLQLQESGPGLVKPSETLSLTCTVSGGSISSGSYFWGWIRQPPGKGLEWIGSIYYSGITYYNPSLKSRVTISVDTSKNQFSLKLSSVTAADTAVYYCARHDGAMAGLFDYWGQGTLVTVSSA

SEQ ID NO: 11460 - protein, 245 aa, Artificial Sequence
  Synthetic Polypeptide
SYVLTQPPSVSVAPGQTARITCGGKNIGSKSVHWYQQPPGQAPVVVVYDDSDRPSGIPERFSGSNSGNTATLTISRVEAGDEAVYYCQVWDSSSDHVVFGGGTKLTVLGGGGSGGGGSGGGGSQLQLQESGPGLVKPSETLSLTCTVSGGSISSGSYFWGWIRQPPGKGLEWIGSIYYSGSTYYNPSLKSRVTISVDTSKNQFSLKLSSVTAADTAVYYCARHDGAVAGLFDYWGQGTLVTVSSA

SEQ ID NO: 11461 - protein, 245 aa, Artificial Sequence
  Synthetic Polypeptide
SYVLTQPPSVSVAPGQTARITCGGKNIGSKSVHWYQQPPGQAPVVVVYDDSDRPSGIPERFSGSNSGNTATLTISRVEAGDEAVYYCQVWDSSSDHVVFGGGTKLTVLGGGGSGGGGSGGGGSQLQLQESGPGLVKPSETLSLTCTVSGGSISSGSYFWGWIRQPPGKGLEWIGSIYYSGISYYNPSLKSRVTISVDTSKNQFSLKLSSVTAADTAVYYCARHDGAVAGLFDYWGQGTLVTVSSA

SEQ ID NO: 11462 - protein, 245 aa, Artificial Sequence
  Synthetic Polypeptide
SYVLTQPPSVSVAPGQTARITCGGKNIGSKSVHWYQQPPGQAPVVVVYDDSDRPSGIPERFSGSNSGNTATLTISRVEAGDEAVYYCQVWDSSSDHVVFGGGTKLTVLGGGGSGGGGSGGGGSQLQLQESGPGLVKPSETLSLTCTVSGGSISSGSYFWGWIRQPPGKGLEWIGSIYYSGITYYNPGLKSRVTISVDTSKNQFSLKLSSVTAADTAVYYCARHDGAVAGLFDYWGQGTLVTVSSA

SEQ ID NO: 11463 - protein, 245 aa, Artificial Sequence
  Synthetic Polypeptide
SYVLTQPPSVSVAPGQTARITCGGKNIGSKSVHWYQQPPGQAPVVVVYDDSDRPSGIPERFSGSNSGNTATLTISRVEAGDEAVYYCQVWDSSSDHVVFGGGTKLTVLGGGGSGGGGSGGGGSQLQLQESGPGLVKPSETLSLTCTVSGGSISSGSYFWGWIRQPPGKGLEWIGSIYYSGITYYNPTLKSRVTISVDTSKNQFSLKLSSVTAADTAVYYCARHDGAVAGLFDYWGQGTLVTVSSA

SEQ ID NO: 11464 - protein, 245 aa, Artificial Sequence; identical to SEQ ID NO: 11421
  Synthetic Polypeptide

SEQ ID NO: 11465 - protein, 245 aa, Artificial Sequence
  Synthetic Polypeptide
SYVLTQPPSVSVAPGQTARITCGGNNLGSKSVHWYQQPPGQAPVVVVYDDSDRPSGIPERFSGSNSGNTATLTISRVEAGDEAVYYCQVWDSSSDHVVFGGGTKLTVLGGGGSGGGGSGGGGSQLQLQESGPGLVKPSETLSLTCTVSGGSISSGSYIWGWIRQPPGKGLEWIGSIYYSGITYYNPSLKSRVTISVDTSKNQFSLKLSSVTAADTAVYYCARHDGAVAGLFDYWGQGTLVTVSSA

SEQ ID NO: 11466 - protein, 245 aa, Artificial Sequence
  Synthetic Polypeptide
SYVLTQPPSVSVAPGQTARITCGGNNLGSKSVHWYQQPPGQAPVVVVYDDSDRPSGIPERFSGSNSGNTATLTISRVEAGDEAVYYCQVWDSSSDHVVFGGGTKLTVLGGGGSGGGGSGGGGSQLQLQESGPGLVKPSETLSLTCTVSGGSISSGSYFWGWIRQPPGKGLEWIGSIYYSGITYYNPSLKSRVTISVDTSKNQFSLKLSSVTAADTAVYYCARHDGAMAGLFDYWGQGTLVTVSSA

SEQ ID NO: 11467 - protein, 245 aa, Artificial Sequence
  Synthetic Polypeptide
SYVLTQPPSVSVAPGQTARITCGGNNLGSKSVHWYQQPPGQAPVVVVYDDSDRPSGIPERFSGSNSGNTATLTISRVEAGDEAVYYCQVWDSSSDHVVFGGGTKLTVLGGGGSGGGGSGGGGSQLQLQESGPGLVKPSETLSLTCTVSGGSISSGSYFWGWIRQPPGKGLEWIGSIYYSGSTYYNPSLKSRVTISVDTSKNQFSLKLSSVTAADTAVYYCARHDGAVAGLFDYWGQGTLVTVSSA

SEQ ID NO: 11468 - protein, 245 aa, Artificial Sequence
  Synthetic Polypeptide
SYVLTQPPSVSVAPGQTARITCGGNNLGSKSVHWYQQPPGQAPVVVVYDDSDRPSGIPERFSGSNSGNTATLTISRVEAGDEAVYYCQVWDSSSDHVVFGGGTKLTVLGGGGSGGGGSGGGGSQLQLQESGPGLVKPSETLSLTCTVSGGSISSGSYFWGWIRQPPGKGLEWIGSIYYSGISYYNPSLKSRVTISVDTSKNQFSLKLSSVTAADTAVYYCARHDGAVAGLFDYWGQGTLVTVSSA

SEQ ID NO: 11469 - protein, 245 aa, Artificial Sequence
  Synthetic Polypeptide
SYVLTQPPSVSVAPGQTARITCGGNNLGSKSVHWYQQPPGQAPVVVVYDDSDRPSGIPERFSGSNSGNTATLTISRVEAGDEAVYYCQVWDSSSDHVVFGGGTKLTVLGGGGSGGGGSGGGGSQLQLQESGPGLVKPSETLSLTCTVSGGSISSGSYFWGWIRQPPGKGLEWIGSIYYSGITYYNPGLKSRVTISVDTSKNQFSLKLSSVTAADTAVYYCARHDGAVAGLFDYWGQGTLVTVSSA

SEQ ID NO: 11470 - protein, 245 aa, Artificial Sequence
  Synthetic Polypeptide
SYVLTQPPSVSVAPGQTARITCGGNNLGSKSVHWYQQPPGQAPVVVVYDDSDRPSGIPERFSGSNSGNTATLTISRVEAGDEAVYYCQVWDSSSDHVVFGGGTKLTVLGGGGSGGGGSGGGGSQLQLQESGPGLVKPSETLSLTCTVSGGSISSGSYFWGWIRQPPGKGLEWIGSIYYSGITYYNPTLKSRVTISVDTSKNQFSLKLSSVTAADTAVYYCARHDGAVAGLFDYWGQGTLVTVSSA

SEQ ID NO: 11471 - protein, 245 aa, Artificial Sequence; identical to SEQ ID NO: 11422
  Synthetic Polypeptide

SEQ ID NO: 11472 - protein, 245 aa, Artificial Sequence
  Synthetic Polypeptide
SYVLTQPPSVSVAPGQTARITCGGNNIGGKSVHWYQQPPGQAPVVVVYDDSDRPSGIPERFSGSNSGNTATLTISRVEAGDEAVYYCQVWDSSSDHVVFGGGTKLTVLGGGGSGGGGSGGGGSQLQLQESGPGLVKPSETLSLTCTVSGGSISSGSYIWGWIRQPPGKGLEWIGSIYYSGITYYNPSLKSRVTISVDTSKNQFSLKLSSVTAADTAVYYCARHDGAVAGLFDYWGQGTLVTVSSA

SEQ ID NO: 11473 - protein, 245 aa, Artificial Sequence
  Synthetic Polypeptide
SYVLTQPPSVSVAPGQTARITCGGNNIGGKSVHWYQQPPGQAPVVVVYDDSDRPSGIPERFSGSNSGNTATLTISRVEAGDEAVYYCQVWDSSSDHVVFGGGTKLTVLGGGGSGGGGSGGGGSQLQLQESGPGLVKPSETLSLTCTVSGGSISSGSYFWGWIRQPPGKGLEWIGSIYYSGITYYNPSLKSRVTISVDTSKNQFSLKLSSVTAADTAVYYCARHDGAMAGLFDYWGQGTLVTVSSA

SEQ ID NO: 11474 - protein, 245 aa, Artificial Sequence
  Synthetic Polypeptide
SYVLTQPPSVSVAPGQTARITCGGNNIGGKSVHWYQQPPGQAPVVVVYDDSDRPSGIPERFSGSNSGNTATLTISRVEAGDEAVYYCQVWDSSSDHVVFGGGTKLTVLGGGGSGGGGSGGGGSQLQLQESGPGLVKPSETLSLTCTVSGGSISSGSYFWGWIRQPPGKGLEWIGSIYYSGSTYYNPSLKSRVTISVDTSKNQFSLKLSSVTAADTAVYYCARHDGAVAGLFDYWGQGTLVTVSSA

SEQ ID NO: 11475 - protein, 245 aa, Artificial Sequence
  Synthetic Polypeptide
SYVLTQPPSVSVAPGQTARITCGGNNIGGKSVHWYQQPPGQAPVVVVYDDSDRPSGIPERFSGSNSGNTATLTISRVEAGDEAVYYCQVWDSSSDHVVFGGGTKLTVLGGGGSGGGGSGGGGSQLQLQESGPGLVKPSETLSLTCTVSGGSISSGSYFWGWIRQPPGKGLEWIGSIYYSGISYYNPSLKSRVTISVDTSKNQFSLKLSSVTAADTAVYYCARHDGAVAGLFDYWGQGTLVTVSSA

SEQ ID NO: 11476 - protein, 245 aa, Artificial Sequence
  Synthetic Polypeptide
SYVLTQPPSVSVAPGQTARITCGGNNIGGKSVHWYQQPPGQAPVVVVYDDSDRPSGIPERFSGSNSGNTATLTISRVEAGDEAVYYCQVWDSSSDHVVFGGGTKLTVLGGGGSGGGGSGGGGSQLQLQESGPGLVKPSETLSLTCTVSGGSISSGSYFWGWIRQPPGKGLEWIGSIYYSGITYYNPGLKSRVTISVDTSKNQFSLKLSSVTAADTAVYYCARHDGAVAGLFDYWGQGTLVTVSSA

SEQ ID NO: 11477 - protein, 245 aa, Artificial Sequence
  Synthetic Polypeptide
SYVLTQPPSVSVAPGQTARITCGGNNIGGKSVHWYQQPPGQAPVVVVYDDSDRPSGIPERFSGSNSGNTATLTISRVEAGDEAVYYCQVWDSSSDHVVFGGGTKLTVLGGGGSGGGGSGGGGSQLQLQESGPGLVKPSETLSLTCTVSGGSISSGSYFWGWIRQPPGKGLEWIGSIYYSGITYYNPTLKSRVTISVDTSKNQFSLKLSSVTAADTAVYYCARHDGAVAGLFDYWGQGTLVTVSSA

SEQ ID NO: 11478 - protein, 245 aa, Artificial Sequence; identical to SEQ ID NO: 11457
  Synthetic Polypeptide

SEQ ID NO: 11479 - protein, 245 aa, Artificial Sequence
  Synthetic Polypeptide
SYVLTQPPSVSVAPGQTARITCGGNNIGSKTVHWYQQPPGQAPVVVVYDDSDRPSGIPERFSGSNSGNTATLTISRVEAGDEAVYYCQVWDSSSDHVVFGGGTKLTVLGGGGSGGGGSGGGGSQLQLQESGPGLVKPSETLSLTCTVSGGSISSGSYIWGWIRQPPGKGLEWIGSIYYSGITYYNPSLKSRVTISVDTSKNQFSLKLSSVTAADTAVYYCARHDGAVAGLFDYWGQGTLVTVSSA

SEQ ID NO: 11480 - protein, 245 aa, Artificial Sequence
  Synthetic Polypeptide
SYVLTQPPSVSVAPGQTARITCGGNNIGSKTVHWYQQPPGQAPVVVVYDDSDRPSGIPERFSGSNSGNTATLTISRVEAGDEAVYYCQVWDSSSDHVVFGGGTKLTVLGGGGSGGGGSGGGGSQLQLQESGPGLVKPSETLSLTCTVSGGSISSGSYFWGWIRQPPGKGLEWIGSIYYSGITYYNPSLKSRVTISVDTSKNQFSLKLSSVTAADTAVYYCARHDGAMAGLFDYWGQGTLVTVSSA

SEQ ID NO: 11481 - protein, 245 aa, Artificial Sequence
  Synthetic Polypeptide
SYVLTQPPSVSVAPGQTARITCGGNNIGSKTVHWYQQPPGQAPVVVVYDDSDRPSGIPERFSGSNSGNTATLTISRVEAGDEAVYYCQVWDSSSDHVVFGGGTKLTVLGGGGSGGGGSGGGGSQLQLQESGPGLVKPSETLSLTCTVSGGSISSGSYFWGWIRQPPGKGLEWIGSIYYSGSTYYNPSLKSRVTISVDTSKNQFSLKLSSVTAADTAVYYCARHDGAVAGLFDYWGQGTLVTVSSA

SEQ ID NO: 11482 - protein, 245 aa, Artificial Sequence
  Synthetic Polypeptide
SYVLTQPPSVSVAPGQTARITCGGNNIGSKTVHWYQQPPGQAPVVVVYDDSDRPSGIPERFSGSNSGNTATLTISRVEAGDEAVYYCQVWDSSSDHVVFGGGTKLTVLGGGGSGGGGSGGGGSQLQLQESGPGLVKPSETLSLTCTVSGGSISSGSYFWGWIRQPPGKGLEWIGSIYYSGISYYNPSLKSRVTISVDTSKNQFSLKLSSVTAADTAVYYCARHDGAVAGLFDYWGQGTLVTVSSA

SEQ ID NO: 11483 - protein, 245 aa, Artificial Sequence
  Synthetic Polypeptide
SYVLTQPPSVSVAPGQTARITCGGNNIGSKTVHWYQQPPGQAPVVVVYDDSDRPSGIPERFSGSNSGNTATLTISRVEAGDEAVYYCQVWDSSSDHVVFGGGTKLTVLGGGGSGGGGSGGGGSQLQLQESGPGLVKPSETLSLTCTVSGGSISSGSYFWGWIRQPPGKGLEWIGSIYYSGITYYNPGLKSRVTISVDTSKNQFSLKLSSVTAADTAVYYCARHDGAVAGLFDYWGQGTLVTVSSA

SEQ ID NO: 11484 - protein, 245 aa, Artificial Sequence
  Synthetic Polypeptide
SYVLTQPPSVSVAPGQTARITCGGNNIGSKTVHWYQQPPGQAPVVVVYDDSDRPSGIPERFSGSNSGNTATLTISRVEAGDEAVYYCQVWDSSSDHVVFGGGTKLTVLGGGGSGGGGSGGGGSQLQLQESGPGLVKPSETLSLTCTVSGGSISSGSYFWGWIRQPPGKGLEWIGSIYYSGITYYNPTLKSRVTISVDTSKNQFSLKLSSVTAADTAVYYCARHDGAVAGLFDYWGQGTLVTVSSA

SEQ ID NO: 11485 - protein, 238 aa, Artificial Sequence; identical to SEQ ID NO: 11443
  Synthetic Polypeptide

SEQ ID NO: 11486 - protein, 238 aa, Artificial Sequence
  Synthetic Polypeptide
DIQMTQSPSSLSASVGDRVTITCKASQDVGTAVDWYQQKPGKAPKLLIYWASTRHTGVPSRFSGSGSGTDFTLTISSLQPEDFATYYCQQYNSYPLTFGQGTKVEIKRGGGGSGGGGSGGGGSQVQLVQSGAEVKKPGESVKVSCKASGYTFTEYTIHWVRQAPGQGLEWMGNINPNNGGTTYNQKFEDRVTITADKSTSTAYMELSSLRSEDTAVYYCARGWNFDYWGQGTTVTVSS

SEQ ID NO: 11487 - protein, 238 aa, Artificial Sequence; identical to SEQ ID NO: 11442
  Synthetic Polypeptide

SEQ ID NO: 11488 - protein, 238 aa, Artificial Sequence
  Synthetic Polypeptide
DIVMTQSHKFMSTSVGDRVSIICKASQDVGTAVDWYQQKPGQSPKLLIYWASTRHTGVPDRFTGSGSGTDFTLAITNVQSEDLADYFCQQYNSYPLTFGAGTKLEIKRGGGGSGGGGSGGGGSQVQLVQSGAEVKKPGESVKVSCKASGYTFTEYTIHWVRQAPGQGLEWMGNINPNNGGTTYNQKFEDRVTITADKSTSTAYMELSSLRSEDTAVYYCARGWNFDYWGQGTTVTVSS

SEQ ID NO: 11489 - protein, 240 aa, Artificial Sequence
  Synthetic Polypeptide
DIQMTQSPSSLSASVGDRVTITCKASQDVGTAVDWYQQKPGKAPKLLISWASTRHTGVPSRFSGSGSGTDFTLTISSLQPEDFATYFCQQYNSYPLTFGQGTKVEIKRTVGGGGSGGGGSGGGGSEVQLVESGGGLVQPGGSLRLSCAASGYTFTEYTIHWVRQAPGKGLEWVANINPNNGGTTYNQKFEDRFTISRDNSKNTLYLQMNSLRAEDTAVYYCARGWNFDYWGQGTLVTVSS

SEQ ID NO: 11490 - protein, 240 aa, Artificial Sequence
  Synthetic Polypeptide
DIQMTQSPSSLSASVGDRVTITCKASQDVGTAVDWYQQKPGKAPKLLISWASTRHTGVPSRFSGSGSGTDFTLTISSLQPEDFATYFCQQYNSYPLTFGQGTKVEIKRTVGGGGSGGGGSGGGGSEVQLQQSGPELVKPGTSVRISCKTSGYTFTEYTIHWVKQSHGKSLEWIGNINPNNGGTTYNQKFEDKATLTVDKSSSTAYMELRSLTSEDSAVYYCAAGWNFDYWGQGTTLTVSS

SEQ ID NO: 11491 - protein, 240 aa, Artificial Sequence; identical to SEQ ID NO: 11444
  Synthetic Polypeptide

SEQ ID NO: 11492 - protein, 244 aa, Artificial Sequence; identical to SEQ ID NO: 11451
  Synthetic Polypeptide

SEQ ID NO: 11493 - protein, 243 aa, Artificial Sequence
  Synthetic Polypeptide
DIQMTQSPSSLSASVGDRVTITCKSSQSLLYSSNQKNYLAWFQQKPGKAPKLLIYWASTRESGVPSRFSGSGSGTDFTLTISSLQPEDFATYFCHQYLSSYTFGQGTKVEIKRGGGGSGGGGSGGGGSEVQLVESGGGLVQPGGSLRLSCAASGFTFTTYWMHWVRQAPGKGLEWVGYIRPSTGYTEYNQKFKDRFTISADTSKNTAYLQMNSLRAEDTAVYYCARSRWLLDYWGQGTLVTVS

SEQ ID NO: 11494 - protein, 241 aa, Artificial Sequence
  Synthetic Polypeptide
DIQMTQSPSSLSASVGDRVTITCKSSQSLLYSSNQKNYLAWFQQKPGKAPKLLIYWASTRESGVPSRFSGSGSGTDFTLTISSLQPEDFATYFCHQYLSSYTFGQGTKVEIKRGGGGSGGGGSGGGGSDIQMTQSPSSLSASVGDRVTITCKSSQSLLYSSNQKNYLAWFQQKPGKAPKLLIYWASTRESGVPSRFSGSGSGTDFTLTISSLQPEDFATYFCHQYLSSYTFGQGTKVEIKR

SEQ ID NO: 11495 - protein, 240 aa, Artificial Sequence; identical to SEQ ID NO: 11454
  Synthetic Polypeptide

SEQ ID NO: 11496 - protein, 240 aa, Artificial Sequence; identical to SEQ ID NO: 11368
  Synthetic Polypeptide

SEQ ID NO: 11497 - protein, 240 aa, Artificial Sequence
  Synthetic Polypeptide
DIQMTQSPSSLSASVGDRVTITCRASQDISSYLNWYQQKPGKAPKLLIYYTSRLHSGVPSRFSGSGSGTDFTLTISSLQPEDFATYYCQQGNTLPYTFGQGTKVEIKRGGGGSGGGGSGGGGSEVQLVESGGGLVQPGGSLRLSCAASGYTFSDYFMSWVRQAPGKGLEWVATISNGGTYTYYPDSVKGRFTISRDNSKNTLYLQMNSLRAEDTAVYYCARFDGYIFDYWGQGTLVTVSS

SEQ ID NO: 11498 - protein, 240 aa, Artificial Sequence; identical to SEQ ID NO: 11455
  Synthetic Polypeptide

SEQ ID NO: 11499 - protein, 240 aa, Artificial Sequence
  Synthetic Polypeptide
DIQMTQSPSSLSASVGDRVTITCRASQDISNYLNWYQQKPGKAPKLLIYYTSRLHSGVPSRFSGSGSGTDFTLTISSLQPEDFATYYCQQGNTLPWTFGQGTKVEIKRGGGGSGGGGSGGGGSEVQLVESGGGLVQPGGSLRLSCAASGYTFSDYFMSWVRQAPGKGLEWVATISNGGTYTYYPDSVKGRFTISRDNSKNTLYLQMNSLRAEDTAVYYCARFDGYIFDYWGQGTLVTVSS

SEQ ID NO: 11500 - protein, 240 aa, Artificial Sequence; identical to SEQ ID NO: 11456
  Synthetic Polypeptide

SEQ ID NO: 11501 - protein, 5 aa, Artificial Sequence
  Synthetic Polypeptide
GGGGG

SEQ ID NO: 11502 - protein, 5 aa, Artificial Sequence
  Synthetic Polypeptide
GGGGG

SEQ ID NO: 11503 - protein, 5 aa, Artificial Sequence
  Synthetic Polypeptide
GGGGG

SEQ ID NO: 11504 - protein, 5 aa, Artificial Sequence
  Synthetic Polypeptide
GGGGG

SEQ ID NO: 11505 - protein, 5 aa, Artificial Sequence
  Synthetic Polypeptide
GGGGG

SEQ ID NO: 11506 - protein, 267 aa, Artificial Sequence
  Synthetic Polypeptide
MALPVTALLLPLALLLHAARPEVQLVESGGGLVQPGGSLRLSCAASGFNIKDTCIGWVRRAPGKEEELVAKICKYSGHTRYADSVKGRFTISADTSKNTAYLQMNSLRAEDTAVYYCAAVSVRDGHYNYWGQGTTVTVSSGGGSGGGSEVQLVESGGGLVQPGGSLRLSCAASGFNIKDTCIGWVRRAPGKEEELVADICPYKGSTRYADSVKGRFTISADTSKNTAYLQMNSLRAEDTAVYYCAIVSARDGYYNYWGQGTTVTVSS

SEQ ID NO: 11507 - protein, 140 aa, Artificial Sequence
  Synthetic Polypeptide
MALPVTALLLPLALLLHAARPEVQLVESGGGLVQPGGSLRLSCAASGFNIKDTCIGWVRRAPGKEEELVAKICKYSGHTRYADSVKGRFTISADTSKNTAYLQMNSLRAEDTAVYYCAAVSVRDGHYNYWGQGTTVTVSS

SEQ ID NO: 11508 - protein, 267 aa, Artificial Sequence
  Synthetic Polypeptide
MALPVTALLLPLALLLHAARPEVQLVESGGGLVQPGGSLRLSCTFSGGTFSSYTMGWFRQAPGKEREFVAEVRWGGVTTYSNSLKDRFSISEDSVKNAVYLQMNSLKPEDTAVYYCAAVRQMYMTVVPDYWGQGTLVTVSSSGGGGSFEQLQLQESGPGLVKPSETLSLTCTVSGGSISSGDYYWGWIRQPPGKGLEWIGHIYYSGATYYNPSLKSRVTISVDTSRNQFSLKLSSVTAADTAVYYCTRDDSSNWRSRGQGTLVTVSS

SEQ ID NO: 11509 - protein, 141 aa, Artificial Sequence
  Synthetic Polypeptide
MALPVTALLLPLALLLHAARPEVQLVESGGGLVQPGGSLRLSCTFSGGTFSSYTMGWFRQAPGKEREFVAEVRWGGVTTYSNSLKDRFSISEDSVKNAVYLQMNSLKPEDTAVYYCAAVRQMYMTVVPDYWGQGTLVTVSS

SEQ ID NO: 11510 - protein, 279 aa, Artificial Sequence
  Synthetic Polypeptide
MALPVTALLLPLALLLHAARPEVQLVESGGGVVQPGRSLRLSCAASGFSFSGYGMHWVRQAPGKGLEWVAYISYDGSNKYYADSVKGRFTISRDNSKNTLYLQMNSLRAEDTAVYYCAKDPAWGLRLGESSSYDFDIWGQGTMVTVSSGSGGGGSGGGGSGGGGSFEVQLLESGGGLVQPGGSLRLSCAASGFSFSSYALSWVRQAPGKGLEWVSSIGENDGTTDYADAVKGRFTISRDNSKNTLYLQMNSLRVEDTAVYYCVKDGVHWGQGTLVTVSS

SEQ ID NO: 11511 - protein, 148 aa, Artificial Sequence
  Synthetic Polypeptide
MALPVTALLLPLALLLHAARPEVQLVESGGGVVQPGRSLRLSCAASGFSFSGYGMHWVRQAPGKGLEWVAYISYDGSNKYYADSVKGRFTISRDNSKNTLYLQMNSLRAEDTAVYYCAKDPAWGLRLGESSSYDFDIWGQGTMVTVSS

SEQ ID NO: 11512 - protein, 272 aa, Artificial Sequence
  Synthetic Polypeptide
MDWIWRILFLVGAATGAHSEVQLLESGGGLVQPGGSLRLSCAASGFSFSSYALSWVRQAPGKGLEWVSSIGENDGTTDYADAVKGRFTISRDNSKNTLYLQMNSLRVEDTAVYYCVKDGVHWGQGTLVTVSSGSGGGGSGGGGSFEVQLVESGGGVVQPGRSLRLSCAASGFSFSGYGMHWVRQAPGKGLEWVAYISYDGSNKYYADSVKGRFTISRDNSKNTLYLQMNSLRAEDTAVYYCAKDPAWGLRLGESSSYDFDIWGQGTMVTVSS

SEQ ID NO: 11513 - protein, 132 aa, Artificial Sequence
  Synthetic Polypeptide
MDWIWRILFLVGAATGAHSEVQLLESGGGLVQPGGSLRLSCAASGFSFSSYALSWVRQAPGKGLEWVSSIGENDGTTDYADAVKGRFTISRDNSKNTLYLQMNSLRVEDTAVYYCVKDGVHWGQGTLVTVSS

SEQ ID NO: 11514 - protein, 145 aa, Artificial Sequence
  Synthetic Polypeptide
MALPVTALLLPLALLLHAARPQLQLQESGPGLVKPSETLALTCNVSGGSISSSSYYWGWIRQPPGKRLEWIGSIYYSGSTYFNPSLKSRVTISVDTSKNQFSLKLSSVTAADTAVYYCAGGDYYGPVGQWPSDYRGQGTLVTVSS

SEQ ID NO: 11515 - protein, 275 aa, Artificial Sequence
  Synthetic Polypeptide
MDWIWRILFLVGAATGAHSQLQLQESGPGLVKPSETLSLTCTVSGGSVSSSSYYWGWIRQPPGKRLELIGSIYYGGSTYFNPSLKSRVTISVDTSKNQFSLKLSSVTAADTAVYYCAGGDTYGPVGQWPSDYRGQGTLVTVSSGGGGSGGGSFEVQLLESGGGLVQPGGSLRLSCAASGFIFSIYAMSWVRQAPGKGLEWVSGISGSGVNTYYADSVKGRFIISRDNSRNTVYLQMNSLRADDTAVYHCANGKGWDGNTWYEDYRGQGTLVTVSS

SEQ ID NO: 11516 - protein, 143 aa, Artificial Sequence
  Synthetic Polypeptide
MDWIWRILFLVGAATGAHSQLQLQESGPGLVKPSETLSLTCTVSGGSVSSSSYYWGWIRQPPGKRLELIGSIYYGGSTYFNPSLKSRVTISVDTSKNQFSLKLSSVTAADTAVYYCAGGDTYGPVGQWPSDYRGQGTLVTVSS

SEQ ID NO: 11517 - protein, 142 aa, Artificial Sequence
  Synthetic Polypeptide
MALPVTALLLPLALLLHAARPEVQLLESGGGLVQPGGSLRLSCAASGFTFSSYAMSWVRQAPGKGLEWVSSISGSGDYIYYADSVKGRFTISRDISKNTLYLQMNSLRAEDTAVYYCAKEGTGANSSLADYRGQGTLVTVSS

SEQ ID NO: 11518 - protein, 139 aa, Artificial Sequence
  Synthetic Polypeptide
MALPVTALLLPLALLLHAARPQVQLVESGGGLVQPGGSLRLSCAASGFTFTNHAMSWVRQAPGKGLELVSSISGNGRTTYYADSVKGRFTISRDISKNTLDLQMNSLRAEDTAVYYCAKDGGETLVDSRGQGTLVTVSS

SEQ ID NO: 11519 - protein, 267 aa, Artificial Sequence
  Synthetic Polypeptide
MALPVTALLLPLALLLHAARPQLQLQESGPGLVKPSETLSLTCTVSGDSISSGDYYWGWIRQPPGKGLEWIGHIYYSGVTYYNPSLKSRVTISVDTSRNQFSLKLSSVTAADTAVYYCTREDSSNWRSRGQGTLVTVSSLESGGGGSFEVQLLESGGGLIQPGGSLRLSCAASGFTFSSHAMTWVRQAPGKGLEWVSAISGSGDYTHYADSVKGRFTISRDNSKNTVYLQMNSLRAEDSAVYYCAKDEDGGSLLGHRGQGTLVTVSS

SEQ ID NO: 11520 - protein, 127 aa, Artificial Sequence
  Synthetic Polypeptide
EVQLVESGGGVVQPGRSLRLSCAASGFSFSGYGMHWVRQAPGKGLEWVAYISYDGSNKYYADSVKGRFTISRDNSKNTLYLQMNSLRAEDTAVYYCAKDPAWGLRLGESSSYDFDIWGQGTMVTVSS

SEQ ID NO: 11521 - protein, 113 aa, Artificial Sequence
  Synthetic Polypeptide
EVQLLESGGGLVQPGGSLRLSCAASGFSFSSYALSWVRQAPGKGLEWVSSIGENDGTTDYADAVKGRFTISRDNSKNTLYLQMNSLRVEDTAVYYCVKDGVHWGQGTLVTVSS

SEQ ID NO: 11522 - protein, 113 aa, Artificial Sequence; identical to SEQ ID NO: 11521
  Synthetic Polypeptide

SEQ ID NO: 11523 - protein, 127 aa, Artificial Sequence; identical to SEQ ID NO: 11520
  Synthetic Polypeptide

SEQ ID NO: 11524 - protein, 123 aa, Artificial Sequence
  Synthetic Polypeptide
QVQLVESGGGLVQAGDSVTLSCTASGRTFSSYALAWFRQRPGKEREFVAGLRWGGPTNYADSVKDRFTISGDSAKHTMYLQMNSLKPEDTAVYYCGYNPGGWAVPSQYEYDSWGQGTQVTVSS

SEQ ID NO: 11525 - protein, 118 aa, Artificial Sequence
  Synthetic Polypeptide
QVQLQESGGGLAQAGGSLRLSCAASGRTFSMGWFRQAPGKEREFVAAITYSGGSPYYASSVRGRFTISRDNAKNTVYLQMNSLKPEDTAVYYCAANPTYGSDWNAENWGQGTQVTVSS

SEQ ID NO: 11526 - protein, 116 aa, Artificial Sequence
  Synthetic Polypeptide
EVQLVESGGGLVQPGGSLRLSCAASGFSFSDFWMSWVRQAPGKGLEWVATISQAGSEKDYVDSVKGRFTISRDNAKKSLYLQMNSLRAEDTAVYYCASGVYSFDYRGQGTLVTVSS

SEQ ID NO: 11527 - protein, 116 aa, Artificial Sequence
  Synthetic Polypeptide
EVQLVESGGGLVQPGGSLRLSCAASGFTFSNYWMSWVRQAPGKGQEWVATINQDGSDKDYVDSVKGRFTISRDNAKKSLYLQMNSLRAEDTAVYYCASGVYSFDYRGQGTLVTVSS

SEQ ID NO: 11528 - protein, 116 aa, Artificial Sequence
  Synthetic Polypeptide
EVQLVESGGGLVQPGGSLRLSCAASGIDFSRYWMSWVRQAPGKGLEWVATISQAGSEKDYVDSVKGRFTISRDNAKKSLYLQMNSLRAEDTAVYYCASGVYSFDYRGQGTLVTVSS

SEQ ID NO: 11529 - protein, 116 aa, Artificial Sequence
  Synthetic Polypeptide
EVQLVESGGGLVQPGGSLRLSCAASGIDFSRYWMSWVRQAPGKGQEWVATINQDGSDKDYVDSVKGRFTISRDNAKKSLYLQMNSLRAEDTAVYYCASGVYSFDYRGQGTLVTVSS

SEQ ID NO: 11530 - protein, 120 aa, Artificial Sequence
  Synthetic Polypeptide
EVQLVESGGGLVQPGGSLRLSCTFSGGTFSSYTMGWFRQAPGKEREFVAEVRWGGVTTYSNSLKDRFSISEDSVKNAVYLQMNSLKPEDTAVYYCAAVRQMYMTVVPDYWGQGTLVTVSS

SEQ ID NO: 11531 - protein, 118 aa, Artificial Sequence
  Synthetic Polypeptide
EVQLVESGGGLVQAGGSLRLSCAASGRTFSMGWFRQAPGKEREFVAAITYSGGSPYYADSVKGRFTISRDNAKNTVYLQMNSLKPEDTAVYYCAANPTYGSDWNAENWGQGTQVTVSS

SEQ ID NO: 11532 - protein, 118 aa, Artificial Sequence
  Synthetic Polypeptide
QLQLQESGPGLVKPSETLSLTCTVSGGSISSGDYYWGWIRQPPGKGLEWIGHIYYSGATYYNPSLKSRVTISVDTSRNQFSLKLSSVTAADTAVYYCTRDDSSNWRSRGQGTLVTVSS

SEQ ID NO: 11533 - protein, 118 aa, Artificial Sequence
  Synthetic Polypeptide
QLQLQESGPGLVKPSETLSLTCTVSGDSISSGDYYWGWIRQPPGKGLEWIGHIYYSGVTYYNPSLKSRVTISVDTSRNQFSLKLSSVTAADTAVYYCTREDSSNWRSRGQGTLVTVSS

SEQ ID NO: 11534 - protein, 118 aa, Artificial Sequence
  Synthetic Polypeptide
QLQLQESGPGLVKPSETLSLTCTVSGGSISSGDYYWGWIRQPPGKGLEWIGSISYSGSTYYNPSLKSRVTISVDTSRNQFSLKLSSVTAADTAVYYCTREDSSNWRSRGQGTLVTVSS

SEQ ID NO: 11535 - protein, 124 aa, Artificial Sequence
  Synthetic Polypeptide
QLQLQESGPGLVKPSETLALTCNVSGGSISSSSYYWGWIRQPPGKRLEWIGSIYYSGSTYFNPSLKSRVTISVDTSKNQFSLKLSSVTAADTAVYYCAGGDYYGPVGQWPSDYRGQGTLVTVSS

SEQ ID NO: 11536 - protein, 130 aa, Artificial Sequence
  Synthetic Polypeptide
EVQLLESGGGLVQPGGSLRLSCAASGFIFSSYAMSWVRQAPGKGQEWVSGVSGTGVNTYYADSVKGRFTISRDNSKNTLYLQMNSLRAEDTAVYYCASGKGWDSGSWYEDYRGQGTLVTVSSTRPRLCLL

SEQ ID NO: 11537 - protein, 124 aa, Artificial Sequence
  Synthetic Polypeptide
QLQLQESGPGLVKPSETLSLTCTVSGGSVSSSSYYWGWIRQPPGKRLELIGSIYYGGSTYFNPSLKSRVTISVDTSKNQFSLKLSSVTAADTAVYYCAGGDTYGPVGQWPSDYRGQGTLVTVSS

SEQ ID NO: 11538 - protein, 122 aa, Artificial Sequence
  Synthetic Polypeptide
EVQLLESGGGLVQPGGSLRLSCAASGFIFSIYAMSWVRQAPGKGLEWVSGISGSGVNTYYADSVKGRFIISRDNSRNTVYLQMNSLRADDTAVYHCANGKGWDGNTWYEDYRGQGTLVTVSS

SEQ ID NO: 11539 - protein, 117 aa, Artificial Sequence
  Synthetic Polypeptide
EVQVLESGGGLVQPGGSLRLSCAASGFTFSNFAMSWVRQAPGKGLEWVSTISGSAGTTDYADSVKGRFTISRDNSKKTLYLQMNSLRVEDTAVYYCADGRGPFFDYRGQGTLVTVSS

SEQ ID NO: 11540 - protein, 119 aa, Artificial Sequence
  Synthetic Polypeptide
EVQLVESGGGLVQPGGSLRLSCAASGFNIKDTCIGWVRRAPGKEEELVAKICKYSGHTRYADSVKGRFTISADTSKNTAYLQMNSLRAEDTAVYYCAAVSVRDGHYNYWGQGTTVTVSS

SEQ ID NO: 11541 - protein, 119 aa, Artificial Sequence
  Synthetic Polypeptide
EVQLVESGGGLVQPGGSLRLSCAASGFNIKDTCIGWVRRAPGKEEELVADICPYKGSTRYADSVKGRFTISADTSKNTAYLQMNSLRAEDTAVYYCAIVSARDGYYNYWGQGTTVTVSS

SEQ ID NO: 11542 - protein, 119 aa, Artificial Sequence
  Synthetic Polypeptide
EVQLLESGGGLVQPGGSLRLSCAASGFTFSSYAMSWVRQAPGKGLEWVSAITGSGGSTYYADSVKGRFTISRDNSKNTLYLQMNSLRAEDTAVYYCAKDEDGGSLLGHRGQGTLVTVSS

SEQ ID NO: 11543 - protein, 119 aa, Artificial Sequence
  Synthetic Polypeptide
EVQLLESGGGLIQPGGSLRLSCAASGFTFSSHAMTWVRQAPGKGLEWVSAISSGGSYTYYADSVKGRFTISRDNSKNTLYLQMNSLRAEDTAVYYCAKDEDGGSLLGHRGQGTLVTVSS

SEQ ID NO: 11544 - protein, 119 aa, Artificial Sequence
  Synthetic Polypeptide
EVQLVESGGGLVQPGGSLRLSCAASGFSFSDFWMSWVRQAPGKGLEWVSAISGSGDYTHYADSVKGRFTISRDNSKNTVYLQMNSLRAEDSAVYYCAKDEDGGSLLGHRGQGTLVTVSS

SEQ ID NO: 11545 - protein, 121 aa, Artificial Sequence
  Synthetic Polypeptide
EVQLLESGGGLVQPGGSLRLSCAASGFAFSIYDMSWVRQAPGKGLEWVSSISGSGDYIYYADSVKGRFTISRDISKNTLYLQMNSLRAEDTAVYYCAKEGTGANSSLADYRGQGTLVTVSS

SEQ ID NO: 11546 - protein, 121 aa, Artificial Sequence
  Synthetic Polypeptide
EVQLLESGGGLVQPGGSLRLSCAASGFTFSSYAMSWVRQAPGKGLEWVSSISGSGDYIYYADSVKGRFTISRDISKNTLYLQMNSLRAEDTAVYYCAKEGTGANSSLADYRGQGTLVTVSS

SEQ ID NO: 11547 - protein, 118 aa, Artificial Sequence
  Synthetic Polypeptide
QVQLVESGGGLVQPGGSLRLSCAASGFTFTNHAMSWVRQAPGKGLELVSSISGNGRTTYYADSVKGRFTISRDISKNTLDLQMNSLRAEDTAVYYCAKDGGETLVDSRGQGTLVTVSS

SEQ ID NO: 11548 - protein, 119 aa, Artificial Sequence
  Synthetic Polypeptide
EVQLLESGGGLIQPGGSLRLSCAASGFTFSSHAMTWVRQAPGKGLEWVSAISGSGDYTHYADSVKGRFTISRDNSKNTVYLQMNSLRAEDSAVYYCAKDEDGGSLLGHRGQGTLVTVSS

SEQ ID NO: 11549 - protein, 120 aa, Artificial Sequence
  Synthetic Polypeptide
QVQLQESGGGLVQAGDSLRLSCAASGRAVSSLFMGWFRRAPGKERELVAAISRYSLYTYYADSVKGRFTISADNAKNAVYLQMNSLKPEDTAVYYCASKLEYTSNDYDSWGQGTQVTVSS

SEQ ID NO: 11550 - protein, 120 aa, Artificial Sequence
  Synthetic Polypeptide
EVQLQESGGGLVQPGGSLRLSCAASGRTFSSLFMGWFRQAPGKERELVAAISRYSLYTYYADSVKGRFTISADNAKNAVYLQMNSLKPEDTAVYYCASKLEYTSNDYDSWGQGTQVTVSS

SEQ ID NO: 11551 - protein, 120 aa, Artificial Sequence
  Synthetic Polypeptide
EVQLQESGGGLVQPGGSLRLSCAASGRTFSSLFMGWVRQAPGKGLELVSAISRYSLYTYYADSVKGRFTISRDNAKNTLYLQMNSLRPEDTAVYYCASKLEYTSNDYDSWGQGTLVTVSS

SEQ ID NO: 11552 - protein, 128 aa, Artificial Sequence
  Synthetic Polypeptide
EVQLVESGGGLVQPGGSLRLSCEASGFASDDYIIGWFRQAPGKEREGVSCISSKYANTVYTDSVKGRFRLSRGTAKNTVYLQMSALKPEDTAVYYCAMDSRRVTCPEISTMHRNFDSWGQGTLVTVSS

SEQ ID NO: 11553 - protein, 128 aa, Artificial Sequence
  Synthetic Polypeptide
EVQLVESGGGLVQPGGSLRLSCAASGFASDYYIIGWFRQAPGKEREGVSCISSRYANTNYADSVKGRFTISRDNAKNTVYLQMNSLKPEDTAVYYCAADTRRYTCPDIATMHRNFDSWGQGTLVTVSS

SEQ ID NO: 11554 - protein, 124 aa, Artificial Sequence
  Synthetic Polypeptide
EVQLVESGGSLVQPGGSLRLSCAASGFTFDDYAMSWVRQVPGKGLEWVSSINWSGTHTDYADSVKGRFTISRNNANNTLYLQMNSLKSEDTAVYYCAKNWRDAGTTWFEKSGSAGQGTQVTVSS

SEQ ID NO: 11555 - protein, 118 aa, Artificial Sequence
  Synthetic Polypeptide
EVQLVESGGGLVQAGGSLRLSCAASGITFSINTMGWYRQAPGKQRELVALISSIGDTYYADSVKGRFTISRDNAKNTVYLQMNSLKPEDTAVYYCKRFRTAAQGTDYWGQGTQVTVSS

SEQ ID NO: 11556 - protein, 119 aa, Artificial Sequence
  Synthetic Polypeptide
EVQLVESGGGLVQPGGSLRLSCAASGSIFGFNDMAWYRQAPGKQRELVALISRVGVTSSADSVKGRFTISRVNAKDTVYLQMNSLKPEDTAVYYCYMDQRLDGSTLAYWGQGTQVTVSS

SEQ ID NO: 11557 - protein, 120 aa, Artificial Sequence
  Synthetic Polypeptide
DVQLVESGGGLVQPGGSLRLSCAASGSIGGLNAMAWYRQAPGKERELVAGIFGVGSTRYADSVKGRFTISRDNSKNTVYLQMNSLRPEDTAVYYCRMSSVTRGSSDYWGQGTLVTVSSLE

SEQ ID NO: 11558 - protein, 125 aa, Artificial Sequence
  Synthetic Polypeptide
EVQLVESGGGLVQPGGSLRLSCAASGRTYYLNAMGWFRQAPGKEREFVAAIDWSEGNKDYADSVKGRFTISRDNSKNTVYLQMNSLRPEDTAVYYCAADTPPWGPLIYIESYDSWGQGTLVTVSS

SEQ ID NO: 11559 - protein, 123 aa, Artificial Sequence
  Synthetic Polypeptide
EVQLVESGGGSVQAGGSLRLSCAASGDTYGSYWMGWFRQAPGKEREGVAAINRGGGYTVYADSVKGRFTISRDTAKNTVYLQMNSLRPDDTADYYCAASGVLGGLHEDWFNYWGQGTLVTVSS

SEQ ID NO: 11560 - protein, 122 aa, Artificial Sequence
  Synthetic Polypeptide
VQLVESGGGSVQAGGSLRLSCAASGDTYGSYWMGWFRQAPGQEREAVAAINRGGGYTVYADSVKGRFTISRDNAKNTLYLQMNSLRPDDTADYYCAASGVLGGLHEDWFNYWGQGTLVTVSS

SEQ ID NO: 11561 - protein, 124 aa, Artificial Sequence
  Synthetic Polypeptide
EVQLVESGGGSVQTGGSLRLTCAASGRTSRSYGMGWFRQAPGKEREFVSGISWRGDSTGYADSVKGRFTISRDNAKNTVDLQMNSLKPEDTAIYYCAAAAGSAWYGTLYEYDYWGQGTLVTVSS

SEQ ID NO: 11562 - protein, 124 aa, Artificial Sequence
  Synthetic Polypeptide
EVQLVESGGGSVQAGGSLRLTCAASGSTSRSYGMGWFRQAPGKEREFVSGISWRGDSTGYADSVKGRFTISRDNAKNTVDLQMNSLKPEDTAIYYCAAAAGSTWYGTLYEYDYWGQGTLVTVSS

SEQ ID NO: 11563 - protein, 125 aa, Artificial Sequence
  Synthetic Polypeptide
DVQLVESGGGLVQPGGSLRLSCAASGFILDYYAIGWFRQAPGKEREGVLCIDASDDITYYADSVKGRFTISRDNSKNTVYLQMNSLRPEDTAVYYCATPIGLSSSCLLEYDYDYWGQGTLVTVSS

SEQ ID NO: 11564 - protein, 126 aa, Artificial Sequence
  Synthetic Polypeptide
EVQLVESGGGLVQAGDSLRLSCAASGRAFSRYAMGWFRQAPGKEREFVAAIGWGPSKTNYADSVKGRFTISRDNAKNTVYLQMNTLKPEDTAVYSCAAKFVNTDSTWSRSEMYTYWGQGTLVTVSS

SEQ ID NO: 11565 - protein, 122 aa, Artificial Sequence
  Synthetic Polypeptide
EVQLVESGGGLVQAGGSLRLSCVASGISSSKRNMGWYRQAPGKQRESVATISSGGNKDYTDAVKDRFTISRDTTKNTVYLQMNSLKPEDTAVYYCKIEAGTGWATRRGYTYWGQGTLVTVSS

SEQ ID NO: 11566 - protein, 112 aa, Artificial Sequence
  Synthetic Polypeptide
QVQLVQSGGGLVQPGGSLRLSCAASDFDFAAYEMSWVRQAPGQGLEWVAIISHDGIDKYYTDSVKGRFTISRDNSKNTLYLQMNTLRAEDTATYYCLRLGAVGQGTLVTVSS

SEQ ID NO: 11567 - protein, 120 aa, Artificial Sequence
  Synthetic Polypeptide
QVQLVQSGGGLVQPGGSLRLSCAASDFAFDDYEMSWVRQAPGKALEWIGDINHSGTTIYNPSLKSRVTISRDNSKNTLYLQMNTLRAEDTAIYYCARPHYGDYSDAFDIWGQGTMVTVSS

SEQ ID NO: 11568 - protein, 115 aa, Artificial Sequence [sequence omitted]

SEQ ID NO: 11569 - protein, 116 aa, Artificial Sequence
  Synthetic Polypeptide
EVQLVESGGGLVQAGGSLRLSCAASGSIFSGNVMGWYRRQAPGKEREWVAAIASGGSIYYRDSVKGRFTISRDNAKNTVYLQMNSLKPEDTAVYYCNSHPPTLPYWGLGTQVTVSS

SEQ ID NO: 11570 - protein, 126 aa, Artificial Sequence
  Synthetic Polypeptide
EVQLVESGGGSVQAGGSLRLSCTTSGRALNMYVMGWFRQAPGNEREFVAATSSSGGSTSYPDSVKGRFTISRDNAKNTVYLQMNSLKPEDTAAYRCAASPYVSTPTMNILEEYRYWGLGTQVTVSS

SEQ ID NO: 11571 - protein, 121 aa, Artificial Sequence [sequence omitted]

SEQ ID NO: 11572 - protein, 266 aa, Artificial Sequence
  Synthetic Polypeptide
EVQLVESGGGSVQTGGSLRLTCAASGRTSRSYGMGWFRQAPGKEREFVSGISWRGDSTGYADSVKGRFTISRDNAKNTVDLQMNSLKPEDTAIYYCAAAAGSAWYGTLYEYDYWGQGTLVTVSSLEGGGGSGGGGSGGGGSFEEVQLVESGGGSVQAGGSLRLSCAASGDTYGSYWMGWFRQAPGKEREGVAAINRGGGYTVYADSVKGRFTISRDTAKNTVYLQMNSLRPDDTADYYCAASGVLGGLHEDWFNYWGQGTLVTVSS

SEQ ID NO: 11573 - protein, 285 aa, Artificial Sequence
  Synthetic Polypeptide
EVQLVESGGGSVQAGGSLRLTCAASGSTSRSYGMGWFRQAPGKEREFVSGISWRGDSTGYADSVKGRFTISRDNAKNTVDLQMNSLKPEDTAIYYCAAAAGSTWYGTLYEYDYWGQGTLVTVSSLEGGGGSGGGGSGGGGSGSGGSGSGGSGSGGSGSGGSFEVQLVESGGGSVQAGGSLRLSCAASGDTYGSYWMGWFRQAPGQEREAVAAINRGGGYTVYADSVKGRFTISRDNAKNTLYLQMNSLRPDDTADYYCAASGVLGGLHEDWFNYWGQGTLVTVSS

SEQ ID NO: 11574 - protein, 275 aa, Artificial Sequence
  Synthetic Polypeptide
EVQLVESGGGLVQAGGSLRLSCAASGITFSINTMGWYRQAPGKQRELVALISSIGDTYYADSVKGRFTISRDNAKNTVYLQMNSLKPEDTAVYYCKRFRTAAQGTDYWGQGTQVTVSSLEGGGGSGGGGSGGGGSGSGGSGSGGSGSGGSGSGGSFEVQLVESGGGLVQPGGSLRLSCAASGSIFGFNDMAWYRQAPGKQRELVALISRVGVTSSADSVKGRFTISRVNAKDTVYLQMNSLKPEDTAVYYCYMDQRLDGSTLAYWGQGTQVTVSS

SEQ ID NO: 11575 - protein, 242 aa, Artificial Sequence; identical to SEQ ID NO: 11275
  Synthetic Polypeptide

SEQ ID NO: 11576 - protein, 280 aa, Artificial Sequence
  Synthetic Polypeptide
DVQLVESGGGLVQPGGSLRLSCAASGSIGGLNAMAWYRQAPGKERELVAGIFGVGSTRYADSVKGRFTISRDNSKNTVYLQMNSLRPEDTAVYYCRMSSVTRGSSDYWGQGTLVTVSSLEGGGGSGGGGSGGGGSGSGGSGSGGSGSGGSGSGGSFEVQLVESGGSLVQPGGSLRLSCAASGFTFDDYAMSWVRQVPGKGLEWVSSINWSGTHTDYADSVKGRFTISRNNANNTLYLQMNSLKSEDTAVYYCAKNWRDAGTTWFEKSGSAGQGTQVTVSS

SEQ ID NO: 11577 - protein, 288 aa, Artificial Sequence
  Synthetic Polypeptide
DVQLVESGGGLVQPGGSLRLSCAASGFILDYYAIGWFRQAPGKEREGVLCIDASDDITYYADSVKGRFTISRDNSKNTVYLQMNSLRPEDTAVYYCATPIGLSSSCLLEYDYDYWGQGTLVTVSSLEGGSGSGGGGSGGGGSGSGGSGSGGSGSGGSGSGGSFEVQLVESGGGLVQPGGSLRLSCAASGRTYYLNAMGWFRQAPGKEREFVAAIDWSEGNKDYADSVKGRFTISRDNSKNTVYLQMNSLRPEDTAVYYCAADTPPWGPLIYIESYDSWGQGTLVTVSS

SEQ ID NO: 11578 - protein, 271 aa, Artificial Sequence
  Synthetic Polypeptide
QVQLVQSGGGLVQPGGSLRLSCAASDFDFAAYEMSWVRQAPGQGLEWVAIISHDGIDKYYTDSVKGRFTISRDNSKNTLYLQMNTLRAEDTATYYCLRLGAVGQGTLVTVSSLEGGGGSGGGGSGGGGSGSGGSGSGGSGSGGSGSGGSFEQVQLVQSGGGLVQPGGSLRLSCAASDFAFDDYEMSWVRQAPGKALEWIGDINHSGTTIYNPSLKSRVTISRDNSKNTLYLQMNTLRAEDTAIYYCARPHYGDYSDAFDIWGQGTMVTVSS

SEQ ID NO: 11579 - protein, 119 aa, Artificial Sequence
  Synthetic Polypeptide
QVKLEESGGGLVQAGRSLRLSCAASEHTFSSHVMGWFRQAPGKERESVAVIGWRDISTSYADSVKGRFTISRDNAKKTLYLQMNSLKPEDTAVYYCAARRIDAADFDSWGQGTQVTVSS

SEQ ID NO: 11580 - protein, 118 aa, Artificial Sequence
  Synthetic Polypeptide
EVQLVESGGGLVQAGGSLRLSCAASGRTFTMGWFRQAPGKEREFVAAISLSPTLAYYAESVKGRFTISRDNAKNTVVLQMNSLKPEDTALYYCAADRKSVMSIRPDYWGQGTQVTVSS

SEQ ID NO: 11581 - protein, 252 aa, Artificial Sequence
  Synthetic Polypeptide
QVKLEESGGGLVQAGRSLRLSCAASEHTFSSHVMGWFRQAPGKERESVAVIGWRDISTSYADSVKGRFTISRDNAKKTLYLQMNSLKPEDTAVYYCAARRIDAADFDSWGQGTQVTVSSGGGGSGGGGSGGGGSEVQLVESGGGLVQAGGSLRLSCAASGRTFTMGWFRQAPGKEREFVAAISLSPTLAYYAESVKGRFTISRDNAKNTVVLQMNSLKPEDTALYYCAADRKSVMSIRPDYWGQGTQVTVSS

SEQ ID NO: 11582 - protein, 116 aa, Artificial Sequence
  Synthetic Polypeptide
EVQLVESGGGLVQAGGSLRLSCIATGKVFSIYDMGWYRQAPGKQRELVAEITSSGTTHYDDFVSGRFTISRDNAKNTVYLQMNTLKAEDTAVYYCRANHVFGGSYWGQGTQVTVSS

SEQ ID NO: 11583 - protein, 122 aa, Artificial Sequence
  Synthetic Polypeptide
QVQLVESGGGLVQPGGSLRLSCEASGFTLDYYAIGWFRQAPGKEREGVICISRSDGSTYYADSVKGRFTISRDNAKKTVYLQMISLKPEDTAAYYCAAGADCSGYLRDYEFRGQGTQVTVSS

SEQ ID NO: 11584 - protein, 245 aa, Artificial Sequence
  Synthetic Polypeptide
EVQLVESGGGLVQAGGSLRLSCIATGKVFSIYDMGWYRQAPGKQRELVAEITSSGTTHYDDFVSGRFTISRDNAKNTVYLQMNTLKAEDTAVYYCRANHVFGGSYWGQGTQVTVSSEVAALEKQVQLVESGGGLVQPGGSLRLSCEASGFTLDYYAIGWFRQAPGKEREGVICISRSDGSTYYADSVKGRFTISRDNAKKTVYLQMISLKPEDTAAYYCAAGADCSGYLRDYEFRGQGTQVTVSS

SEQ ID NO: 11585 - protein, 128 aa, Artificial Sequence
  Synthetic Polypeptide
QVKLEESGGRLVQPRGSLRLSCAGSGRTFSTYGMAWFRQAPGKEREFVASKASMNYSGRTYYADSVKGRFTIARDNAKNMVFLQMNNLKPEDTAVYYCAAGTGCSTYGCFDAQIIDYWGKGTLVTVSS

SEQ ID NO: 11586 - protein, 119 aa, Artificial Sequence
  Synthetic Polypeptide
QVKLEESGGGLVQPGESLRLSCSASGSIFKVFRVFAMSWYRQGPGKQRELVASISSGETTTYADSVKGRFTISRDNAKNTAYLQMDSLKPEDTAVYYCNADHTFTGDFWGQGTQVTVSS

SEQ ID NO: 11587 - protein, 254 aa, Artificial Sequence
  Synthetic Polypeptide
QVKLEESGGRLVQPRGSLRLSCAGSGRTFSTYGMAWFRQAPGKEREFVASKASMNYSGRTYYADSVKGRFTIARDNAKNMVFLQMNNLKPEDTAVYYCAAGTGCSTYGCFDAQIIDYWGKGTLVTVSSEVAALEKQVKLEESGGGLVQPGESLRLSCSASGSIFKVFRVFAMSWYRQGPGKQRELVASISSGETTTYADSVKGRFTISRDNAKNTAYLQMDSLKPEDTAVYYCNADHTFTGDFWGQGTQVTVSS

SEQ ID NO: 11588 - protein, 117 aa, Artificial Sequence
  Synthetic Polypeptide
QVKLEESGGELVQPGGPLRLSCAASGNIFSINRMGWYRQAPGKQRAFVASITVRGITNYADSVKGRFTISVDKSKNTIYLQMNALKPEDTAVYYCNAVSSNRDPDYWGQGTQVTVSS

SEQ ID NO: 11589 - protein, 129 aa, Artificial Sequence
  Synthetic Polypeptide
PVQLVESGGGLVQAGDSLRLSCAASGRTFGIGTMGWFRQPPGKEREFVAAIRWSTGGTRYADSVKGRFTISRDNAKLTVDLQMDSLKPEDTAVYYCAADRLSLDLSGRYHYNPAVYDYWGQGTQVTVSS

SEQ ID NO: 11590 - protein, 261 aa, Artificial Sequence
  Synthetic Polypeptide
QVKLEESGGELVQPGGPLRLSCAASGNIFSINRMGWYRQAPGKQRAFVASITVRGITNYADSVKGRFTISVDKSKNTIYLQMNALKPEDTAVYYCNAVSSNRDPDYWGQGTQVTVSSGGGGSGGGGSGGGGSPVQLVESGGGLVQAGDSLRLSCAASGRTFGIGTMGWFRQPPGKEREFVAAIRWSTGGTRYADSVKGRFTISRDNAKLTVDLQMDSLKPEDTAVYYCAADRLSLDLSGRYHYNPAVYDYWGQGTQVTVSS

SEQ ID NO: 11591 - protein, 119 aa, Artificial Sequence
  Synthetic Polypeptide
AVQLVESGGGLVQAGDSLRLTCTASGRAFSTYFMAWFRQAPGKEREFVAGIAWSGGSTAYADSVKGRFTISRDNAKNTVYLQMNSLKSEDTAVYYCASRGIEVEEFGAWGQGTQVTVSS

SEQ ID NO: 11592 - protein, 120 aa, Artificial Sequence
  Synthetic Polypeptide
QVQLVESGGGLVQAGGSLRLSCAASGGTLSKNTVAWFRQAPGKERGFVASITWDGRTTYYADSVKGRFTISRDNAKNTVYLQMNSLKPEDTAVYVCADLGKWPAGPADYWGQGTQVTVSS

SEQ ID NO: 11593 - protein, 5 aa, Artificial Sequence
  Synthetic Polypeptide
GGGGG

SEQ ID NO: 11594 - protein, 5 aa, Artificial Sequence
  Synthetic Polypeptide
GGGGG

SEQ ID NO: 11595 - protein, 5 aa, Artificial Sequence
  Synthetic Polypeptide
GGGGG

SEQ ID NO: 11596 - protein, 5 aa, Artificial Sequence
  Synthetic Polypeptide
GGGGG

SEQ ID NO: 11597 - protein, 5 aa, Artificial Sequence
  Synthetic Polypeptide
GGGGG

SEQ ID NO: 11598 - protein, 5 aa, Artificial Sequence
  Synthetic Polypeptide
GGGGG

SEQ ID NO: 11599 - protein, 5 aa, Artificial Sequence
  Synthetic Polypeptide
GGGGG

SEQ ID NO: 11600 - protein, 5 aa, Artificial Sequence
  Synthetic Polypeptide
GGGGG

SEQ ID NO: 11601 - protein, 5 aa, Artificial Sequence
  Synthetic Polypeptide
GGGGG

SEQ ID NO: 11602 - protein, 5 aa, Artificial Sequence
  Synthetic Polypeptide
GGGGG

SEQ ID NO: 11603 - protein, 5 aa, Artificial Sequence
  Synthetic Polypeptide
GGGGG

SEQ ID NO: 11604 - protein, 5 aa, Artificial Sequence
  Synthetic Polypeptide
GGGGG

SEQ ID NO: 11605 - protein, 5 aa, Artificial Sequence
  Synthetic Polypeptide
GGGGG

SEQ ID NO: 11606 - protein, 5 aa, Artificial Sequence
  Synthetic Polypeptide
GGGGG

SEQ ID NO: 11607 - protein, 5 aa, Artificial Sequence
  Synthetic Polypeptide
GGGGG

SEQ ID NO: 11608 - protein, 5 aa, Artificial Sequence
  Synthetic Polypeptide
GGGGG

SEQ ID NO: 11609 - protein, 5 aa, Artificial Sequence
  Synthetic Polypeptide
GGGGG

SEQ ID NO: 11610 - protein, 5 aa, Artificial Sequence
  Synthetic Polypeptide
GGGGG

SEQ ID NO: 11611 - protein, 5 aa, Artificial Sequence
  Synthetic Polypeptide
GGGGG

SEQ ID NO: 11612 - protein, 5 aa, Artificial Sequence
  Synthetic Polypeptide
GGGGG

SEQ ID NO: 11613 - protein, 5 aa, Artificial Sequence
  Synthetic Polypeptide
GGGGG

SEQ ID NO: 11614 - protein, 5 aa, Artificial Sequence
  Synthetic Polypeptide
GGGGG

SEQ ID NO: 11615 - protein, 5 aa, Artificial Sequence
  Synthetic Polypeptide
GGGGG

SEQ ID NO: 11616 - protein, 5 aa, Artificial Sequence
  Synthetic Polypeptide
GGGGG

SEQ ID NO: 11617 - protein, 5 aa, Artificial Sequence
  Synthetic Polypeptide
GGGGG

SEQ ID NO: 11618 - protein, 5 aa, Artificial Sequence
  Synthetic Polypeptide
GGGGG

SEQ ID NO: 11619 - protein, 5 aa, Artificial Sequence
  Synthetic Polypeptide
GGGGG

SEQ ID NO: 11620 - protein, 5 aa, Artificial Sequence
  Synthetic Polypeptide
GGGGG

SEQ ID NO: 11621 - protein, 5 aa, Artificial Sequence
  Synthetic Polypeptide
GGGGG

SEQ ID NO: 11622-11641 - skipped (20 entries)

SEQ ID NO: 11642 - protein, 121 aa, Artificial Sequence
  Synthetic Polypeptide
EVQLVESGGGVVQPGRSLRLSCAASGYTFTSYVMGWVRRAPGKEEELIGYINPYNDGTYYADSVKGRFTISRDNSKNTLYLQMNSLRAEDTAVYYCARGTYYYGTRVFDYRGQGTMVTVSS

SEQ ID NO: 11643 - skipped

SEQ ID NO: 11644 - protein, 119 aa, Artificial Sequence; identical to SEQ ID NO: 11540
  Synthetic Polypeptide

SEQ ID NO: 11645 - protein, 119 aa, Artificial Sequence; identical to SEQ ID NO: 11541
  Synthetic Polypeptide

SEQ ID NO: 11646-11649 - skipped (4 entries)

SEQ ID NO: 11650 - protein, 5 aa, Artificial Sequence
  Synthetic Polypeptide
GGGGG

SEQ ID NO: 11651 - protein, 135 aa, Artificial Sequence
  Synthetic Polypeptide
MACPGFLWALVISTCLEFSMAQTVTQSQPEMSVQEAETVTLSCTYDTSESDYYLFWYKQPPSRQMILVIRQEAYKQQNATENRFSVNFQKAAKSFSLKISDSQLGDAAMYFCAYRSAVNARLMFGDGTQLVVKPN

SEQ ID NO: 11652 - protein, 137 aa, Artificial Sequence
  Synthetic Polypeptide
MTIRLLCYMGFYFLGAGLMEADIYQTPRYLVIGTGKKITLECSQTMGHDKMYWYQQDPGMELHLIHYSYGVNSTEKGDLSSESTVSRIRTEHFPLTLESARPSHTSQYLCASSEARGLAEFTDTQYFGPGTRLTVLE

SEQ ID NO: 11653 - protein, 115 aa, Artificial Sequence
  Synthetic Polypeptide
AQTVTQSQPEMSVQEAETVTLSCTYDTSESDYYLFWYKQPPSRQMILVIRQEAYKQQNATENRFSVNFQKAAKSFSLKISDSQLGDAAMYFCAYRSAVNARLMFGDGTQLVVKPN

SEQ ID NO: 11654 - protein, 118 aa, Artificial Sequence
  Synthetic Polypeptide
EADIYQTPRYLVIGTGKKITLECSQTMGHDKMYWYQQDPGMELHLIHYSYGVNSTEKGDLSSESTVSRIRTEHFPLTLESARPSHTSQYLCASSEARGLAEFTDTQYFGPGTRLTVLE

SEQ ID NO: 11655 - protein, 114 aa, Artificial Sequence
  Synthetic Polypeptide
QEVTQIPAALSVPEGENLVLNCSFTDSAIYNLQWFRQDPGKGLTSLLLIQSSQREQTSGRLNASLDKSSGRSTLYIAASQPGDSATYLCAVRPTSGGSYIPTFGRGTSLIVHPY

SEQ ID NO: 11656 - protein, 114 aa, Artificial Sequence
  Synthetic Polypeptide
NAGVTQTPKFQVLKTGQSMTLQCAQDMNHEYMSWYRQDPGMGLRLIHYSVAIQTTDQGEVPNGYNVSRSTIEDFPLRLLSAAPSQTSVYFCASSYLGNTGELFFGEGSRLTVLE

SEQ ID NO: 11657 - protein, 110 aa, Artificial Sequence
  Synthetic Polypeptide
ILNVEQSPQSLHVQEGDSTNFTCSFPSSNFYALHWYRWETAKSPEALFVMTLNGDEKKKGRISATLNTKEGYSYLYIKGSQPEDSATYLCARNTGNQFYFGTGTSLTVIP

SEQ ID NO: 11658 - protein, 113 aa, Artificial Sequence
  Synthetic Polypeptide
GVTQTPKFQVLKTGQSMTLQCAQDMNHEYMSWYRQDPGMGLRLIHYSVGAGITDQGEVPNGYNVSRSTTEDFPLRLLSAAPSQTSVYFCASSFQTGASYGYTFGSGTRLTVLE

SEQ ID NO: 11659 - protein, 120 aa, Artificial Sequence
  Synthetic Polypeptide
AIELVPEHQTVPVSIGVPATLRCSMKGEAIGNYYINWYRKTQGNTMTFIYREKDIYGPGFKDNFQGDIDIAKNLAVLKILAPSERDEGSYYCACDTLGMGGEYTDKLIFGKGTRVTVEPR

SEQ ID NO: 11660 - protein, 126 aa, Artificial Sequence
  Synthetic Polypeptide
AGHLEQPQISSTKTLSKTARLECVVSGITISATSVYWYRERPGEVIQFLVSISYDGTVRKESGIPSGKFEVDRIPETSTSTLTIHNVEKQDIATYYCALWEAQQELGKKIKVFGPGTKLIITDKQL

SEQ ID NO: 11661 - protein, 5 aa, Artificial Sequence
  Synthetic Polypeptide
GGGGG

SEQ ID NO: 11662 - protein, 124 aa, Artificial Sequence
  Synthetic Polypeptide
GSDLGIKLLFAAAKGQDDEVRILLAAGADVNAKDFEGYTPLHVAAYDGHLEIVEVLLKAGADVNAKDSQGRTPLHEAAYSGHLEIVEVLLKAGADVNAQDDAGETPADLAAAWGHEDIAEVLQK

SEQ ID NO: 11663 - protein, 126 aa, Artificial Sequence
  Synthetic Polypeptide
RSDLGKKLLEAARAGQDDEVRILMANGADVNAKDEYGLTPLYLATAHGHLEIVEVLLKNGADVNAVDAIGFTPLHLAAFIGHLEIAEVLLKHGADVNAQDKFGKTAFDISIGNGNEDLAEILQKLN

SEQ ID NO: 11664 - protein, 58 aa, Artificial Sequence
  Synthetic Polypeptide
VDNKFNKERYSAYYEIWQLPNLNVRQKAAFIGSLQDDPSQSANLLAEAKKLNDAQAPK

SEQ ID NO: 11665 - protein, 51 aa, Artificial Sequence
  Synthetic Polypeptide
YAKEMRNAYWEIALLPNLTNQQKRAPIRKLYDDPSQSSELLSEAKKLNDSQ

SEQ ID NO: 11666 - protein, 51 aa, Artificial Sequence
  Synthetic Polypeptide
YAKEMWIAWEEIRNLPNLNGWQMTAFIAKLLDDPSQSSELLSEAKKLNDSQ

SEQ ID NO: 11667 - protein, 89 aa, Artificial Sequence
  Synthetic Polypeptide
LPAPKNLVVSRVTEDSARLSWTAPDAAFDSFAIGYWEWDDDGEAIVLTVPGSERSYDLTGLKPGTEYPVYIAGVKGGQWSFPLSAIFTT

SEQ ID NO: 11668 - protein, 91 aa, Artificial Sequence
  Synthetic Polypeptide
LPAPKNLVVSRVTEDSARLSWAIDEQRDWFESFLIQYQESEKVGEAIVLTVPGSERSYDLTGLKPGTEYTVSIYGVYHVYRSNPLSAIFTT

SEQ ID NO: 11669 - protein, 89 aa, Artificial Sequence
  Synthetic Polypeptide
LPAPKNLVVSRVTEDSARLSWTAPDAAFDSFPIGYWEWDDDGEAIVLTVPGSERSYDLTGLKPGTEYHVYIAGVKGGQWSFPLSAIFTT

SEQ ID NO: 11670 - protein, 94 aa, Artificial Sequence
  Synthetic Polypeptide
LPAPKNLVVSEVTEDSARLSWDDPWAFYESFLIQYQESEKVGEAIVLTVPGSERSYDLTGLKPGTEYTVSIYGVHNVYKDTNMRGLPLSAIFTT

SEQ ID NO: 11671 - protein, 89 aa, Artificial Sequence
  Synthetic Polypeptide
LPAPKNLVVSRVTEDSARLSWTAPDAAFDSFWIRYFEFLGSGEAIVLTVPGSERSYDLTGLKPGTEYVVNIMGVKGGKISPPLSAIFTT

SEQ ID NO: 11672 - protein, 8 aa, Artificial Sequence
  Synthetic Polypeptide
CENTYRIN

SEQ ID NO: 11673 - protein, 90 aa, Artificial Sequence
  Synthetic Polypeptide
MLPAPKNLVVSRITEDSARLSWTAPDAAFDSFPIRYIETLIWGEAIWLDVPGSERSYDLTGLKPGTEYAVVITGVKGGRFSSPLVASFTT

SEQ ID NO: 11674 - protein, 597 aa, Artificial Sequence
  Synthetic Polypeptide
STIEEQAKTFLDKFNHEAEDLFYQSSLASWNYNTNITEENVQNMNNAGDKWSAFLKEQSTLAQMYPLQEIQNLTVKLQLQALQQNGSSVLSEDKSKRLNTILNTMSTIYSTGKVCNPDNPQECLLLEPGLNEIMANSLDYNERLWAWESWRSEVGKQLRPLYEEYVVLKNEMARANHYEDYGDYWRGDYEVNGVDGYDYSRGQLIEDVEHTFEEIKPLYEHLHAYVRAKLMNAYPSYISPIGCLPAHLLGDMWGRFWTNLYSLTVPFGQKPNIDVTDAMVDQAWDAQRIFKEAEKFFVSVGLPNMTQGFWENSMLTDPGNVQKAVCHPTAWDLGKGDFRILMCTKVTMDDFLTAHHEMGHIQYDMAYAAQPFLLRNGANEGFHEAVGEIMSLSAATPKHLKSIGLLSPDFQEDNETEINFLLKQALTIVGTLPFTYMLEKWRWMVFKGEIPKDQWMKKWWEMKREIVGVVEPVPHDETYCDPASLFHVSNDYSFIRYYTRTLYQFQFQEALCQAAKHEGPLHKCDISNSTEAGQKLFNMLRLGKSEPWTLALENVVGAKNMNVRPLLNYFEPLFTWLKDQNKNSFVGWSTDWSPYAD

SEQ ID NO: 11675 - protein, 269 aa, Artificial Sequence
  Synthetic Polypeptide
EPLVVKVEEGDNAVLQCLKGTSDGPTQQLTWSRESPLKPFLKLSLGLPGLGIHMRPLAIWLFIFNVSQQMGGFYLCQPGPPSEKAWQPGWTVNVEGSGELFRWNVSDLGGLGCGLKNRSSEGPSSPSGKLMSPKLYVWAKDRPEIWEGEPPCLPPRDSLNQSLSQDLTMAPGSTLWLSCGVPPDSVSRGPLSWTHVHPKGPKSLLSLELKDDRPARDMWVMETGLLLPRATAQDAGKYYCHRGNLTMSFHLEITARPVLWHWLLRTGGW

SEQ ID NO: 11676 - protein, 490 aa, Artificial Sequence
  Synthetic Polypeptide
MPSWALFMVTSCLLLAPQNLAQVSSQDVSLLASDSEPLKCFSRTFEDLTCFWDEEEAAPSGTYQLLYAYPREKPRACPLSSQSMPHFGTRYVCQFPDQEEVRLFFPLHLWVKNVFLNQTRTQRVLFVDSVGLPAPPSIIKAMGGSQPGELQISWEEPAPEISDFLRYELRYGPRDPKNSTGPTVIQLIATETCCPALQRPHSASALDQSPCAQPTMPWQDGPKQTSPSREASALTAEGGSCLISGLQPGNSYWLQLRSEPDGISLGGSWGSWSLPVTVDLPGDAVALGLQCFTLDLKNVTCQWQQQDHASSQGFFYHSRARCCPRDRYPIWENCEEEEKTNPGLQTPQFSRCHFKSRNDSIIHILVEVTTAPGTVHSYLGSPFWIHQAVRLPTPNLHWREISSGHLELEWQHPSSWAAQETCYQLRYTGEGHQDWKVLEPPLGARGGTLELRPRSRYRLQLRARLNGPTYQGPWSSWSDPTRVETATETA

SEQ ID NO: 11677 - protein, 167 aa, Artificial Sequence
  Synthetic Polypeptide
MALPVTALLLPLALLLHAARPGWFLDSPDRPWNPPTFSPALLVVTEGDNATFTCSFSNTSESFVLNWYRMSPSNQTDKLAAFPEDRSQPGQDCRFRVTQLPNGRDFHMSVVRARRNDSGTYLCGAISLAPKAQIKESLRAELRVTERRAEVPTAHPSPSPRPAGQFQ

SEQ ID NO: 11678 - protein, 146 aa, Artificial Sequence
  Synthetic Polypeptide
GWFLDSPDRPWNPPTFSPALLVVTEGDNATFTCSFSNTSESFVLNWYRMSPSNQTDKLAAFPEDRSQPGQDCRFRVTQLPNGRDFHMSVVRARRNDSGTYLCGAISLAPKAQIKESLRAELRVTERRAEVPTAHPSPSPRPAGQFQ

SEQ ID NO: 11679 - protein, 167 aa, Artificial Sequence
  Synthetic Polypeptide
MQIPQAPWPVVWAVLQLGWRPGWFLDSPDRPWNPPTFSPALLVVTEGDNATFTCSFSNTSESFVLNWYRMSPSNQTDKLAAFPEDRSQPGQDCRFRVTQLPNGRDFHMSVVRARRNDSGTYLCGAISLAPKAQIKESLRAELRVTERRAEVPTAHPSPSPRPAGQFQ

SEQ ID NO: 11680 - protein, 162 aa, Artificial Sequence
  Synthetic Polypeptide
MACLGFQRHKAQLNLATRTWPCTLLFFLLFIPVFCKAMHVAQPAVVLASSRGIASFVCEYASPGKATEVRVTVLRQADSQVTEVCAATYMMGNELTFLDDSICTGTSSGNQVNLTIQGLRAMDTGLYICKVELMYPPPYYLGIGNGTQIYVIDPEPCPDSDF

SEQ ID NO: 11681 - protein, 135 aa, Artificial Sequence
  Synthetic Polypeptide
LFNQEVQIPLTESYCGPCPKNWICYKNNCYQFFDESKNWYESQASCMSQNASLLKVYSKEDQDLLKLVKSYHWMGLVHIPTNGSWQWEDGSILSPNLLTIIEMQKGDCALYASSFKGYIENCSTPNTYICMQRTV

SEQ ID NO: 11682 - protein, 208 aa, Artificial Sequence
  Synthetic Polypeptide
MVRGVPFRHLLLVLQLALLPAATQGKKVVLGKKGDTVELTCTASQKKSIQFHWKNSNQIKILGNQGSFLTKGPSKLNDRADSRRSLWDQGNFPLIIKNLKIEDSDTYICEVEDQKEEVQLLVFGLTANSDTHLLQGQSLTLTLESPPGSSPSVQCRSPRGKNIQGGKTLSVSQLELQDSGTWTCTVLQNQKKVEFKIDIVVLAFQKAS

SEQ ID NO: 11683 - protein, 167 aa, Artificial Sequence
  Synthetic Polypeptide
IYQELTQLKAAVERLCHPCPWEWTFFQGNCYFMSNSQRNWHDSITACKEVGAQLVVIKSAEEQNFLQLQSSRSNRFTWMGLSDLNQEGTWQWVDGSPLLPSFKQYWNRGEPNNVGEEDCAEFSGNGWNDDKCNLAKFWICKKSAASCSRDEEQFLSPAPATPNPPPA

SEQ ID NO: 11684 - protein, 192 aa, Artificial Sequence
  Synthetic Polypeptide
GMRTEDLPKAVVFLEPQWYRVLEKDSVTLKCQGAYSPEDNSTQWFHNESLISSQASSYFIDAATVDDSGEYRCQTNLSTLSDPVQLEVHIGWLLLQAPRWVFKEEDPIHLRCHSWKNTALHKVTYLQNGKGRKYFHHNSDFYIPKATLKDSGSYFCRGLVGSKNVSSETVNITITQGLAVSTISSFFPPGYQ

SEQ ID NO: 11685 - protein, 192 aa, Artificial Sequence; identical to SEQ ID NO: 11684
  Synthetic Polypeptide

SEQ ID NO: 11686 - protein, 274 aa, Artificial Sequence
  Synthetic Polypeptide
ARKRTQPTFGFTVNWKFSESTTVFTGQCFIDRNGKEVLKTMWLLRSSVNDIGDDWKATRVGINIFTRLRTQKEGGSGGSARKCSLTGKWTNDLGSNMTIGAVNSRGEFTGTYITAVTATSNEIKESPLHGTQNTINKSGGSTTVFTGQCFIDRNGKEVLKTMWLLRSSVNDIGDDWKATRVGINIFTRLRTQKEGGSGGSARKCSLTGKWTNDLGSNMTIGAVNSRGEFTGTYITAVTATSNEIKESPLHGTQNTINKRTQPTFGFTVNWKFSE

SEQ ID NO: 11687 - protein, 566 aa, Artificial Sequence
  Synthetic Polypeptide
EWVKFAKPCREGEDNSKRNPIAKITSDYQATQKITYRISGVGIDQPPFGIFVVDKNTGDINITAIVDREETPSFLITCRALNAQGLDVEKPLILTVKILDINDNPPVFSQQIFMGEIEENSASNSLVMILNATDADEPNHLNSKIAFKIVSQEPAGTPMFLLSRNTGEVRTLTNSLDREQASSYRLVVSGADKDGEGLSTQCECNIKVKDVNDNFPMFRDSQYSARIEENILSSELLRFQVTDLDEEYTDNWLAVYFFTSGNEGNWFEIQTDPRTNEGILKVVKALDYEQLQSVKLSIAVKNKAEFHQSVISRYRVQSTPVTIQVINVREGIAFRPASKTFTVQKGISSKKLVDYILGTYQAIDEDTNKAASNVKYVMGRNDGGYLMIDSKTAEIKFVKNMNRDSTFIVNKTITAEVLAIDEYTGKTSTGTVYVRVPDFNDNCPTAVLEKDAVCSSSPSVVVSARTLNNRYTGPYTFALEDQPVKLPAVWSITTLNATSALLRAQEQIPPGVYHISLVLTDSQNNRCEMPRSLTLEVCQCDNRGICGTSYPTTSPGTRYGRPHSGR

SEQ ID NO: 11688 - protein, 156 aa, Artificial Sequence
  Synthetic Polypeptide
MALPVTALLLPLALLLHAARPLFNQEVQIPLTESYCGPCPKNWICYKNNCYQFFDESKNWYESQASCMSQNASLLKVYSKEDQDLLKLVKSYHWMGLVHIPTNGSWQWEDGSILSPNLLTIIEMQKGDCALYASSFKGYIENCSTPNTYICMQRTV

SEQ ID NO: 11689 - protein, 307 aa, Artificial Sequence
  Synthetic Polypeptide
MALPVTALLLPLALLLHAARPLFNQEVQIPLTESYCGPCPKNWICYKNNCYQFFDESKNWYESQASCMSQNASLLKVYSKEDQDLLKLVKSYHWMGLVHIPTNGSWQWEDGSILSPNLLTIIEMQKGDCALYASSFKGYIENCSTPNTYICMQRTVGGGGSGGGGSGGGGSDLFNQEVQIPLTESYCGPCPKNWICYKNNCYQFFDESKNWYESQASCMSQNASLLKVYSKEDQDLLKLVKSYHWMGLVHIPTNGSWQWEDGSILSPNLLTIIEMQKGDCALYASSFKGYIENCSTPNTYICMQRTV

SEQ ID NO: 11690 - protein, 135 aa, Artificial Sequence; identical to SEQ ID NO: 11681
  Synthetic Polypeptide

SEQ ID NO: 11691 - protein, 223 aa, Artificial Sequence
  Synthetic Polypeptide
RVQPTESIVRFPNITNLCPFGEVFNATRFASVYAWNRKRISNCVADYSVLYNSASFSTFKCYGVSPTKLNDLCFTNVYADSFVIRGDEVRQIAPGQTGKIADYNYKLPDDFTGCVIAWNSNNLDSKVGGNYNYLYRLFRKSNLKPFERDISTEIYQAGSTPCNGVEGFNCYFPLQSYGFQPTNGVGYQPYRVVVLSFELLHAPATVCGPKKSTNLVKNKCVNF

SEQ ID NO: 11692 - protein, 187 aa, Artificial Sequence
  Synthetic Polypeptide
MELTELLLVVMLLLTARLTLSSPAPPACDLRVLSKLLRDSHVLHSRLSQCPEVHPLPTPVLLPAVDFSLGEWKTQMEETKAQDILGAVTLLLEGVMAARGQLGPTCLSSLLGQLSGQVRLLLGALQSLLGTQLPPQGRTTAHKDPNAIFLSFQHLLRGKVRFLMLVGGSTLCVRRAPPTTAVPSRTS

SEQ ID NO: 11693 - protein, 187 aa, Artificial Sequence
  Synthetic Polypeptide
MELTDLLLAAMLLAVARLTLSSPVAPACDPRLLNKLLRDSHLLHSRLSQCPDVDPLSIPVLLPAVDFSLGEWKTQTEQSKAQDILGAVSLLLEGVMAARGQLEPSCLSSLLGQLSGQVRLLLGALQGLLGTQLPLQGRTTAHKDPNALFLSLQQLLRGKVRFLLLVEGPTLCVRRTLPTTAVPSSTS

SEQ ID NO: 11694 - protein, 92 aa, Artificial Sequence
  Synthetic Polypeptide
APDVQDCPECTLQENPFFSQPGAPILQCMGCCFSRAYPTPLRSKKTMLVQKNVTSESTCCVAKSYNRVTVMGGFKVENHTACHCSTCYYHKS

SEQ ID NO: 11695 - protein, 165 aa, Artificial Sequence
  Synthetic Polypeptide
MEMFQGLLLLLLLSMGGTWASREMLRPRCRPINATLAVEKEGCPVCITVNTTICAGYCPTMTRVLQGVLPALPQVVCNYRDVRFESIRLPGCPRGVNPVVSYAVALSCQCALCRRSTTDCGGPKDHPLTCDDPRFQASSSSKAPPPSLPSPSRLPGPSDTPILPQ

SEQ ID NO: 11696 - protein, 111 aa, Artificial Sequence
  Synthetic Polypeptide
NSCELTNITIAIEKEECRFCISINTTWCAGYCYTRDLVYKDPARPKIQKTCTFKELVYETVRVPGCAHHADSLYTYPVATQCHCGKCDSDSTDCTVRGLGPSYCSFGEMKE

SEQ ID NO: 11697 - protein, 141 aa, Artificial Sequence
  Synthetic Polypeptide
MEMLQGLLLLLLLSMGGAWASREPLRPWCHPINAILAVEKEGCPVCITVNTTICAGYCPTMMRVLQAVLPPLPQVVCTYRDVRFESIRLPGCPRGVDPVVSFPVALSCRCGPCRRSTSDCGGPKDHPLTCDHPQLSGLLFL

SEQ ID NO: 11698 - protein, 138 aa, Artificial Sequence
  Synthetic Polypeptide
MTALFLMSMLFGLACGQAMSFCIPTEYTMHIERRECAYCLTINTTICAGYCMTRDINGKLFLPKYALSQDVCTYRDFIYRTVEIPGCPLHVAPYFSYPVALSCKCGKCNTDYSDCIHEAIKTNYCTKPQKSYLVGFSV

SEQ ID NO: 11699 - protein, 272 aa, Artificial Sequence
  Synthetic Polypeptide
MEMFQGLLLLLLLSMGGTWASREMLRPRCRPINATLAVEKEGCPVCITVNTTICAGYCPTMTRVLQGVLPALPQVVCNYRDVRFESIRLPGCPRGVNPVVSYAVALSCQCALCRRSTTDCGGPKDHPLTCDDPRFQASSSSKAPPPSLPSPSRLPGPSDTPILPQGGGGSGGGGSGGGGSAPDVQDCPECTLQENPFFSQPGAPILQCMGCCFSRAYPTPLRSKKTMLVQKNVTSESTCCVAKSYNRVTVMGGFKVENHTACHCSTCYYHKS

SEQ ID NO: 11700 - protein, 239 aa, Artificial Sequence
  Synthetic Polypeptide
MALPVTALLLPLALLLHAARPNSCELTNITIAIEKEECRFCISINTTWCAGYCYTRDLVYKDPARPKIQKTCTFKELVYETVRVPGCAHHADSLYTYPVATQCHCGKCDSDSTDCTVRGLGPSYCSFGEMKEGGGGSGGGGSGGGGSAPDVQDCPECTLQENPFFSQPGAPILQCMGCCFSRAYPTPLRSKKTMLVQKNVTSESTCCVAKSYNRVTVMGGFKVENHTACHCSTCYYHKS

SEQ ID NO: 11701 - protein, 248 aa, Artificial Sequence
  Synthetic Polypeptide
MEMLQGLLLLLLLSMGGAWASREPLRPWCHPINAILAVEKEGCPVCITVNTTICAGYCPTMMRVLQAVLPPLPQVVCTYRDVRFESIRLPGCPRGVDPVVSFPVALSCRCGPCRRSTSDCGGPKDHPLTCDHPQLSGLLFLGGGGSGGGGSGGGGSAPDVQDCPECTLQENPFFSQPGAPILQCMGCCFSRAYPTPLRSKKTMLVQKNVTSESTCCVAKSYNRVTVMGGFKVENHTACHCSTCYYHKS

SEQ ID NO: 11702 - protein, 245 aa, Artificial Sequence
  Synthetic Polypeptide
MTALFLMSMLFGLACGQAMSFCIPTEYTMHIERRECAYCLTINTTICAGYCMTRDINGKLFLPKYALSQDVCTYRDFIYRTVEIPGCPLHVAPYFSYPVALSCKCGKCNTDYSDCIHEAIKTNYCTKPQKSYLVGFSVGGGGSGGGGSGGGGSAPDVQDCPECTLQENPFFSQPGAPILQCMGCCFSRAYPTPLRSKKTMLVQKNVTSESTCCVAKSYNRVTVMGGFKVENHTACHCSTCYYHKS

SEQ ID NO: 11703 - protein, 327 aa, Artificial Sequence
  Synthetic Polypeptide
MALPVTALLLPLALLLHAARPEVQLLESGGGLIQPGGSLRLSCAASGFTFSSHAMTWVRQAPGKGLEWVSAISGSGDYTHYADSVKGRFTISRDNSKNTVYLQMNSLRAEDSAVYYCAKDEDGGSLLGHRGQGTLVTVSSTRGGGGSEPHSLSYDITVIPKFRPGPRWCAVQGQVDEKTFLHYDCGNKTVTPVSPLGKKLNVTTAWKAQNPVLREVVDILTEQLWDIQLENYTPKEPLTLQARMSCEQKAEGHSSGSWQFSFDGQIFLLFDSEKRMWTTVHPGARKMKEKWENDKVVATLLWGWSMGDCIGWLEDFLMGMDSTLEPS

SEQ ID NO: 11704 - protein, 53 aa, Artificial Sequence
  Synthetic Polypeptide
MDPDLEIRAAFLRQRNTALRTEVAELEQEVQRLENEVSQYETRYGPLGGGKTR

SEQ ID NO: 11705 - protein, 53 aa, Artificial Sequence
  Synthetic Polypeptide
TRMDPDLEIEAAFLERENTALETRVAELRQRVQRLRNRVSQYRTRYGPLGGGK

SEQ ID NO: 11706 - protein, 28 aa, Artificial Sequence
  Synthetic Polypeptide
EVAALEKEVAALEKEVAALEKEVAALEK

SEQ ID NO: 11707 - protein, 28 aa, Artificial Sequence
  Synthetic Polypeptide
KVAALKEKVAALKEKVAALKEKVAALKE

SEQ ID NO: 11708 - protein, 135 aa, Artificial Sequence
  Synthetic Polypeptide
LFNQEVQIPLTESYCGPCPKNWICYKNNCYQFFDESKNWYESQASCMSQNASLLKVYSKEDQDLLKLVKSAHWMGLVHIPTNGSWQWEDGSILSPNLLTIIEMQKGDCALYASSFKGFIENCSTPNTYICMQRTV

SEQ ID NO: 11709 - protein, 135 aa, Artificial Sequence
  Synthetic Polypeptide
LFNQEVQIPLTESYCGPCPKNWICYKNNCYQFFDESKNWYESQASCMSQNASLLKVYSKEDQDLLKLVKSAHWMGLVHIPTNGSWQWEDGSILSPNLLTIIEMQKGDCALYASSFKGYIENCSTPNTYICMQRTV

SEQ ID NO: 11710 - protein, 286 aa, Artificial Sequence
  Synthetic Polypeptide
LFNQEVQIPLTESYCGPCPKNWICYKNNCYQFFDESKNWYESQASCMSQNASLLKVYSKEDQDLLKLVKSAHWMGLVHIPTNGSWQWEDGSILSPNLLTIIEMQKGDCALYASSFKGFIENCSTPNTYICMQRTVGGGGSGGGGSGGGGSDLFNQEVQIPLTESYCGPCPKNWICYKNNCYQFFDESKNWYESQASCMSQNASLLKVYSKEDQDLLKLVKSAHWMGLVHIPTNGSWQWEDGSILSPNLLTIIEMQKGDCALYASSFKGFIENCSTPNTYICMQRTV

SEQ ID NO: 11711 - protein, 286 aa, Artificial Sequence
  Synthetic Polypeptide
LFNQEVQIPLTESYCGPCPKNWICYKNNCYQFFDESKNWYESQASCMSQNASLLKVYSKEDQDLLKLVKSAHWMGLVHIPTNGSWQWEDGSILSPNLLTIIEMQKGDCALYASSFKGYIENCSTPNTYICMQRTVSGGGGSGGGGSGGGGDLFNQEVQIPLTESYCGPCPKNWICYKNNCYQFFDESKNWYESQASCMSQNASLLKVYSKEDQDLLKLVKSAHWMGLVHIPTNGSWQWEDGSILSPNLLTIIEMQKGDCALYASSFKGYIENCSTPNTYICMQRTV

SEQ ID NO: 11712 - protein, 180 aa, Artificial Sequence
  Synthetic Polypeptide
EPHSLSYDITVIPKFRPGPRWCAVQGQVDEKTFLHYDCGNKTVTPVSPLGKKLNVTTAWKAQNPVLREVVDILTEQLWDIQLENYTPKEPLTLQARMSCEQKAEGHSSGSWQFSFDGQIFLLFDSEKRMWTTVHPGARKMKEKWENDKVVATLLWGWSMGDCIGWLEDFLMGMDSTLEPS

SEQ ID NO: 11713 - protein, 180 aa, Artificial Sequence
  Synthetic Polypeptide
EPHSLSYDITVIPKFRPGPRWCAVQGQVDEKTFLHYDCGNKTVTPVSPLGKKLNVTTAWKAQNPVLREVVDILTEQLWDIQLENYTPKEPLTLQARMSCEQKAEGHSSGSWQFSFDGQIFLLFDSEKRMWTTVHPGARKMKEKWENDKVVATKLYLWSMGDCIGWLEDFLMGMDSTLEPS

SEQ ID NO: 11714 - protein, 15 aa, Artificial Sequence
  Synthetic Polypeptide
GGGGSGGGGSGGGGS

SEQ ID NO: 11715 - protein, 6 aa, Artificial Sequence
  Synthetic Polypeptide
SGGGGS

SEQ ID NO: 11716 - protein, 8 aa, Artificial Sequence
  Synthetic Polypeptide
GGGSGGGS

SEQ ID NO: 11717 - protein, 10 aa, Artificial Sequence
  Synthetic Polypeptide
GGGGSGGGGS

SEQ ID NO: 11718 - protein, 15 aa, Artificial Sequence
  Synthetic Polypeptide
GGGGSGGGGSGGGGS

SEQ ID NO: 11719 - protein, 12 aa, Artificial Sequence
  Synthetic Polypeptide
EQKLISEEDGSG

SEQ ID NO: 11720 - protein, 13 aa, Artificial Sequence
  Synthetic Polypeptide
EQKLISEEDLGSG

SEQ ID NO: 11721 - protein, 13 aa, Artificial Sequence
  Synthetic Polypeptide
EQKLISEEDLGSG

SEQ ID NO: 11722 - protein, 17 aa, Artificial Sequence
  Synthetic Polypeptide
GKPIPNPLLGLDSTGSG

SEQ ID NO: 11723 - protein, 12 aa, Artificial Sequence
  Synthetic Polypeptide
YPYDVPDYAGSG

SEQ ID NO: 11724 - protein, 9 aa, Artificial Sequence
  Synthetic Polypeptide
HHHHHHGSG

SEQ ID NO: 11725 - protein, 15 aa, Artificial Sequence
  Synthetic Polypeptide
GLNDIFEAQKIEWHE

SEQ ID NO: 11726 - protein, 13 aa, Artificial Sequence
  Synthetic Polypeptide
GSGGGGSGGGGSG

SEQ ID NO: 11727 - protein, 13 aa, Artificial Sequence
  Synthetic Polypeptide
GSGGGGSGGGGSG

SEQ ID NO: 11728 - protein, 11 aa, Artificial Sequence
  Synthetic Polypeptide
WSHPQFEKGSG

SEQ ID NO: 11729 - protein, 11 aa, Artificial Sequence
  Synthetic Polypeptide
WSHPQFEKGSG

SEQ ID NO: 11730 - protein, 11 aa, Artificial Sequence
  Synthetic Polypeptide
DYKDDDDKGQR

SEQ ID NO: 11731 - protein, 327 aa, Artificial Sequence
  Synthetic Polypeptide
MALPVTALLLPLALLLHAARPEVQLLESGGGLIQPGGSLRLSCAASGFTFSSHAMTWVRQAPGKGLEWVSAISGSGDYTHYADSVKGRFTISRDNSKNTVYLQMNSLRAEDSAVYYCAKDEDGGSLLGHRGQGTLVTVSSTRGGGGSEPHSLSYDITVIPKFRPGPRWCAVQGQVDEKTFLHYDCGNKTVTPVSPLGKKLNVTTAWKAQNPVLREVVDILTEQLWDIQLENYTPKEPLTLQARMSCEQKAEGHSSGSWQFSFDGQIFLLFDSEKRMWTTVHPGARKMKEKWENDKVVATKLYLWSMGDCIGWLEDFLMGMDSTLEPS

SEQ ID NO: 11732 - protein, 141 aa, Artificial Sequence
  Synthetic Polypeptide
DIQNPDPAVYQLRDSKSSDKSVCLFTDFDSQTNVSQSKDSDVYITDKTVLDMRSMDFKSNSAVAWSNKSDFACANAFNNSIIPEDTFFPSPESSCDVKLVEKSFETDTNLNFQNLSVIGFRILLLKVAGFNLLMTLRLWSS

SEQ ID NO: 11733 - protein, 140 aa, Artificial Sequence
  Synthetic Polypeptide
IQNPDPAVYQLRDSKSSDKSVCLFTDFDSQTNVSQSKDSDVYITDKTVLDMRSMDFKSNSAVAWSNKSDFACANAFNNSIIPEDTFFPSPESSCDVKLVEKSFETDTNLNFQNLSVIGFRILLLKVAGFNLLMTLRLWSS

SEQ ID NO: 11734 - protein, 140 aa, Artificial Sequence
  Synthetic Polypeptide
IQNPDPAVYQLRDSKSSDKSVCLFTDFDSQTNVSQSKDSDVYITDKCVLDMRSMDFKSNSAVAWSNKSDFACANAFNNSIIPEDTFFPSSDVPCDVKLVEKSFETDTNLNFQNLSVIGFRILLLKVAGFNLLMTLRLWSS

SEQ ID NO: 11735 - protein, 140 aa, Artificial Sequence; identical to SEQ ID NO: 11733
  Synthetic Polypeptide

SEQ ID NO: 11736 - protein, 137 aa, Artificial Sequence
  Synthetic Polypeptide
PDPAVYQLRDSKSSDKSVCLFTDFDSQTNVSQSKDSDVYITDKTVLDMRSMDFKSNSAVAWSNKSDFACANAFNNSIIPEDTFFPSPESSCDVKLVEKSFETDTNLNFQNLSVIGFRILLLKVAGFNLLMTLRLWSS

SEQ ID NO: 11737 - protein, 140 aa, Artificial Sequence
  Synthetic Polypeptide
IQNPDPAVYQLRDSKSSDKSVCLFTDFDSQTNVSQSKDSDVYITDKCVLDMRSMDFKSNSAVAWSNKSDFACANAFNNSIIPEDTFFPSPESSCDVKLVEKSFETDTNLNFQNLSVIGFRILLLKVAGFNLLMTLRLWSS

SEQ ID NO: 11738 - protein, 137 aa, Artificial Sequence
  Synthetic Polypeptide
PDPAVYQLRDSKSSDKSVCLFTDFDSQTNVSQSKDSDVYITDKCVLDMRSMDFKSNSAVAWSNKSDFACANAFNNSIIPEDTFFPSPESSCDVKLVEKSFETDTNLNFQNLSVIGFRILLLKVAGFNLLMTLRLWSS

SEQ ID NO: 11739 - protein, 140 aa, Artificial Sequence
  Synthetic Polypeptide
IQNPDPAVYQLRDSKSSDKSVCLFTDFDSQTNVSQSKDSDVYITDKTVLDMRSMDFKSNSAVAWSNKSDFACANAFNNSIIPEDTFFPSSDVPCDVKLVEKSFETDTNLNFQNLSVIGFRILLLKVAGFNLLMTLRLWSS

SEQ ID NO: 11740 - protein, 140 aa, Artificial Sequence
  Synthetic Polypeptide
IQNPDPAVYQLRDSKSSDKSVCLFTDFDSQTNVSQSKDSDVYITDKTVLDMRSMDFKSNRAVAWSNKSDFACANAFNNSIIPEDTFFPSPESSCDVKLVEKSFETDTNLNFQNLSVIGFRILLLKVAGFNLLMTLRLWSS

SEQ ID NO: 11741 - protein, 140 aa, Artificial Sequence
  Synthetic Polypeptide
IQNPDPAVYQLRDSKSSDKSVCLFTDFDSQTNVSQSKDSDVYITDKTVLDMRSMDFKSNRAVAWSNKSDFACANAFNNSIIPEDTFFPSSDVPCDVKLVEKSFETDTNLNFQNLSVIGFRILLLKVAGFNLLMTLRLWSS

SEQ ID NO: 11742 - protein, 140 aa, Artificial Sequence
  Synthetic Polypeptide
IQNPDPAVYQLRDSKSSDKSVCLFTDFDSQTNVSQSKDSDVYITDKTVLDMRSMDFKSNSAVAWSNKSDFACANAFNNSIIPEDTFFPSSDSSCDVKLVEKSFETDTNLNFQNLSVIGFRILLLKVAGFNLLMTLRLWSS

SEQ ID NO: 11743 - protein, 239 aa, Artificial Sequence
  Synthetic Polypeptide
IQNPDPAVYQLRDSKSSDKSVCLFTDFDSQTNVSQSKDSDVYITDKTVLDMRSMDFKSNSAVAWSNKSDFACANAFNNSIIPEDTFFPSPESSCGTQSFGLLDPKLCYLLDGILFIYGVILTALFLRVKFSRSADAPAYQQGQNQLYNELNLGRREEYDVLDKRRGRDPEMGGKPQRRKNPQEGLYNELQKDKMAEAYSEIGMKGERRRGKGHDGLYQGLSTATKDTYDALHMQALPPR

SEQ ID NO: 11744 - protein, 136 aa, Artificial Sequence
  Synthetic Polypeptide
IQNPEPAVYQLKDPRSQDSTLCLFTDFDSQINVPKTMESGTFITDKTVLDMKAMDSKSNGAIAWSNQTSFTCQDIFKETNATYPSSDVPCDATLTEKSFETDMNLNFQNLSVMGLRILLLKVAGFNLLMTLRLWSS

SEQ ID NO: 11745 - protein, 133 aa, Artificial Sequence
  Synthetic Polypeptide
VQDPDPSVYQMRSPKTGRTVCLFTDFDSQADFQKPEGATVISLNSTVLDMKVMDSKSNGALTWNSETNIECKENFQQPFYPSSNYSCDAKLIEKSFETDMDLNFYNLLVIGLRILLLKVIGFNLFMTLRLWSC

SEQ ID NO: 11746 - protein, 177 aa, Artificial Sequence
  Synthetic Polypeptide
EDLNKVFPPEVAVFEPSEAEISHTQKATLVCLATGFFPDHVELSWWVNGKEVHSGVSTDPQPLKEQPALNDSRYCLSSRLRVSATFWQNPRNHFRCQVQFYGLSENDEWTQDRAKPVTQIVSAEAWGRADCGFTSVSYQQGVLSATILYEILLGKATLYAVLVSALVLMAMVKRKDF

SEQ ID NO: 11747 - protein, 179 aa, Artificial Sequence
  Synthetic Polypeptide
EDLKNVFPPEVAVFEPSEAEISHTQKATLVCLATGFYPDHVELSWWVNGKEVHSGVSTDPQPLKEQPALNDSRYCLSSRLRVSATFWQNPRNHFRCQVQFYGLSENDEWTQDRAKPVTQIVSAEAWGRADCGFTSESYQQGVLSATILYEILLGKATLYAVLVSALVLMAMVKRKDSRG

SEQ ID NO: 11748 - protein, 179 aa, Artificial Sequence; identical to SEQ ID NO: 11747
  Synthetic Polypeptide

SEQ ID NO: 11749 - protein, 179 aa, Artificial Sequence
  Synthetic Polypeptide
EDLKNVFPPEVAVFEPSEAEISHTQKATLVCLATGFYPDHVELSWWVNGKEVHSGVCTDPQPLKEQPALNDSRYCLSSRLRVSATFWQNPRNHFRCQVQFYGLSENDEWTQDRAKPVTQIVSAEAWGRADCGFTSESYQQGVLSATILYEILLGKATLYAVLVSALVLMAMVKRKDSRG

SEQ ID NO: 11750 - protein, 179 aa, Artificial Sequence
  Synthetic Polypeptide
EDLKNVFPPEVAVFEPSKAEIAHTQKATLVCLATGFYPDHVELSWWVNGKEVHSGVCTDPQPLKEQPALNDSRYCLSSRLRVSATFWQNPRNHFRCQVQFYGLSENDEWTQDRAKPVTQIVSAEAWGRADCGITSASYHQGVLSATILYEILLGKATLYAVLVSALVLMAMVKRKDSRG

SEQ ID NO: 11751 - protein, 179 aa, Artificial Sequence; identical to SEQ ID NO: 11747
  Synthetic Polypeptide

SEQ ID NO: 11752 - protein, 178 aa, Artificial Sequence
  Synthetic Polypeptide
DLKNVFPPEVAVFEPSEAEISHTQKATLVCLATGFYPDHVELSWWVNGKEVHSGVSTDPQPLKEQPALNDSRYCLSSRLRVSATFWQNPRNHFRCQVQFYGLSENDEWTQDRAKPVTQIVSAEAWGRADCGFTSESYQQGVLSATILYEILLGKATLYAVLVSALVLMAMVKRKDSRG

SEQ ID NO: 11753 - protein, 177 aa, Artificial Sequence
  Synthetic Polypeptide
EDLKNVFPPEVAVFEPSEAEISHTQKATLVCLATGFFPDHVELSWWVNGKEVHSGVSTDPQPLKEQPALNDSRYCLSSRLRVSATFWQNPRNHFRCQVQFYGLSENDEWTQDRAKPVTQIVSAEAWGRADCGFTSESYQQGVLSATILYEILLGKATLYAVLVSALVLMAMVKRKDF

SEQ ID NO: 11754 - protein, 177 aa, Artificial Sequence; identical to SEQ ID NO: 11746
  Synthetic Polypeptide

SEQ ID NO: 11755 - protein, 179 aa, Artificial Sequence
  Synthetic Polypeptide
EDLKNVFPPEVAVFEPSKAEIAHTQKATLVCLATGFYPDHVELSWWVNGKEVHSGVSTDPQPLKEQPALNDSRYCLSSRLRVSATFWQNPRNHFRCQVQFYGLSENDEWTQDRAKPVTQIVSAEAWGRADCGITSASYHQGVLSATILYEILLGKATLYAVLVSALVLMAMVKRKDSRG

SEQ ID NO: 11756 - protein, 179 aa, Artificial Sequence
  Synthetic Polypeptide
EDLKNVFPPEVAVFEPSKAEIAHTQKATLVCLATGFYPDHVELSWWVNGKEVHSGVSTDPQPLKEQPALNDSRYCLSSRLRVSATFWQNPRNHFRCQVQFYGLSENDEWTQDRAKPVTQIVSAEAWGRADCGFTSESYQQGVLSATILYEILLGKATLYAVLVSALVLMAMVKRKDSRG

SEQ ID NO: 11757 - protein, 179 aa, Artificial Sequence
  Synthetic Polypeptide
EDLKNVFPPEVAVFEPSKAEISHTQKATLVCLATGFYPDHVELSWWVNGKEVHSGVSTDPQPLKEQPALNDSRYCLSSRLRVSATFWQNPRNHFRCQVQFYGLSENDEWTQDRAKPVTQIVSAEAWGRADCGITSESYQQGVLSATILYEILLGKATLYAVLVSALVLMAMVKRKDSRG

SEQ ID NO: 11758 - protein, 179 aa, Artificial Sequence
  Synthetic Polypeptide
EDLKNVFPPEVAVFEPSKAEISHTQKATLVCLATGFYPDHVELSWWVNGKEVHSGVSTDPQPLKEQPALNDSRYCLSSRLRVSATFWQNPRNHFRCQVQFYGLSENDEWTQDRAKPVTQIVSAEAWGRADCGFTSASYQQGVLSATILYEILLGKATLYAVLVSALVLMAMVKRKDSRG

SEQ ID NO: 11759 - protein, 179 aa, Artificial Sequence
  Synthetic Polypeptide
EDLKNVFPPEVAVFEPSKAEISHTQKATLVCLATGFYPDHVELSWWVNGKEVHSGVSTDPQPLKEQPALNDSRYCLSSRLRVSATFWQNPRNHFRCQVQFYGLSENDEWTQDRAKPVTQIVSAEAWGRADCGFTSESYHQGVLSATILYEILLGKATLYAVLVSALVLMAMVKRKDSRG

SEQ ID NO: 11760 - protein, 179 aa, Artificial Sequence
  Synthetic Polypeptide
EDLKNVFPPEVAVFEPSRAEIAHTQKATLVCLATGFYPDHVELSWWVNGKEVHSGVSTDPQPLKEQPALNDSRYCLSSRLRVSATFWQNPRNHFRCQVQFYGLSENDEWTQDRAKPVTQIVSAEAWGRADCGFTSESYQQGVLSATILYEILLGKATLYAVLVSALVLMAMVKRKDSRG

SEQ ID NO: 11761 - protein, 179 aa, Artificial Sequence
  Synthetic Polypeptide
EDLKNVFPPEVAVFEPSRAEISHTQKATLVCLATGFYPDHVELSWWVNGKEVHSGVSTDPQPLKEQPALNDSRYCLSSRLRVSATFWQNPRNHFRCQVQFYGLSENDEWTQDRAKPVTQIVSAEAWGRADCGFTSESYQQGVLSATILYEILLGKATLYAVLVSALVLMAMVKRKDSRG

SEQ ID NO: 11762 - protein, 179 aa, Artificial Sequence
  Synthetic Polypeptide
EDLKNVFPPEVAVFEPSKAEIAHTQKATLVCLATGFYPDHVELSWWVNGKEVHSGVSTDPQPLKEQPALNDSRYCLSSGLRVSATFWQNPRNHFRCQVQFYGLSENDEWTQDRAKPVTQIVSAEAWGRADCGITSASYHQGVLSATILYEILLGKATLYAVLVSALVLMAMVKRKDSRG

SEQ ID NO: 11763 - protein, 179 aa, Artificial Sequence
  Synthetic Polypeptide
EDLKNVFPPEVAVFEPSKAEIAHTQKATLVCLATGFYPDHVELSWWVNGKEVHSGVSTDPQPLKEQPALNDSRYCLSSGLRVSATFWQNPRNHFRCQVQFYGLSENDEWTQDRAKPVTQIVSAEAWGRADCGFTSESYQQGVLSATILYEILLGKATLYAVLVSALVLMAMVKRKDSRG

SEQ ID NO: 11764 - protein, 179 aa, Artificial Sequence
  Synthetic Polypeptide
EDLKNVFPPEVAVFEPSEAEISHTQKATLVCLATGFYPDHVELSWWVNGKEVHSGVSTDPQPLKEQPALNDSRYCLSSGLRVSATFWQNPRNHFRCQVQFYGLSENDEWTQDRAKPVTQIVSAEAWGRADCGFTSESYQQGVLSATILYEILLGKATLYAVLVSALVLMAMVKRKDSRG

SEQ ID NO: 11765 - protein, 171 aa, Artificial Sequence
  Synthetic Polypeptide
EDLRNVTPPKVSLFEPSKAEIANKQKATLVCLARGFFPDHVELSWWVNGKEVHSGVSTDPQAYKESNYSYCLSSRLRVSATFWHNPRNHFRCQVQFHGLSEEDKWPEGSPKPVTQNISAEAWGRACGITSSYQQGVLSATILYEILLGKATLYAVLVSTLVVMAMVKRKNS

SEQ ID NO: 11766 - protein, 177 aa, Artificial Sequence
  Synthetic Polypeptide
EDLQKVTPPTVTVFEPSEAEISRTQKATLVCLARGFYPDHVELSWWVNGKEVTSGFSTDPQPDKERPSENDSSYCLSSRLRVSASFWHNPRNHFRCQVQFYGLGDDDEWKYDRVKPITQNISAEAWGRADCGFTSVSYHQGVLSATILYEILLGKATLYAVLVSILVLMAKVKRKGS

SEQ ID NO: 11767 - protein, 276 aa, Artificial Sequence
  Synthetic Polypeptide
EDLKNVFPPEVAVFEPSEAEISHTQKATLVCLATGFYPDHVELSWWVNGKEVHSGVSTDPQPLKEQPALNDSRYCLSSRLRVSATFWQNPRNHFRCQVQFYGLSENDEWTQDRAKPVTQIVSAEAWGRADCGSQSFGLLDPKLCYLLDGILFIYGVILTALFLRVKFSRSADAPAYQQGQNQLYNELNLGRREEYDVLDKRRGRDPEMGGKPQRRKNPQEGLYNELQKDKMAEAYSEIGMKGERRRGKGHDGLYQGLSTATKDTYDALHMQALPPR

SEQ ID NO: 11768 - protein, 269 aa, Artificial Sequence
  Synthetic Polypeptide
GCPALPTGVGGTPFPSLAPPIMLLVDGKQQMVVVCLVLDVAPPGLDSPIWFSAGNGSALDAFTYGPSPATDGTWTNLAHLSLPSEELASWEPLVCHTGPGAEGHSRSTQPMHLSGEASTARTCPQEPLRGTPGGALWLGVLRLLLFKLLLFDLLLTCSCLCDPAGPLPSPATTTRLRALGSHRLHPATETGGREATSSPRPQPRDRRWGDTPPGRKPGSPVWGEGSYLSSYPTCPAQAWCSRSRLRAPSSSLGAFFAGDLPPPLQAGAA

SEQ ID NO: 11769 - protein, 258 aa, Artificial Sequence
  Synthetic Polypeptide
TPFPSLAPPIMLLVDGKQQMVVVCLVLDVAPPGLDSPIWFSAGNGSALDAFTYGPSPATDGTWTNLAHLSLPSEELASWEPLVCHTGPGAEGHSRSTQPMHLSGEASTARTCPQEPLRGTPGGALWLGVLRLLLFKLLLFDLLLTCSCLCDPAGPLPSPATTTRLRALGSHRLHPATETGGREATSSPRPQPRDRRWGDTPPGRKPGSPVWGEGSYLSSYPTCPAQAWCSRSALRAPSSSLGAFFAGDLPPPLQAGAA

SEQ ID NO: 11770 - protein, 210 aa, Artificial Sequence
  Synthetic Polypeptide
TPFPSLAPPIMLLVDGKQQMVVVCLVLDVAPPGLDSPIWFSAGNGSALDAFTYGPSPATDGTWTNLAHLSLPSEELASWEPLVCHTGPGAEGHSRSTQPMHLSGEASTARTCPQEPLRGTPGGALWLGVLRLLLFKLLLFDLLLTCSCLCDPAGPLPSPATTTRLRALGSHRLHPATETGGREATSSPRPQPRDRRWGDTPPGRKPGSPV

SEQ ID NO: 11771 - protein, 189 aa, Artificial Sequence
  Synthetic Polypeptide
DKQLDADVSPKPTIFLPSIAETKLQKAGTYLCLLEKFFPDIIKIHWQEKKSNTILGSQEGNTMKTNDTYMKFSWLTVPEESLDKEHRCIVRHENNKNGIDQEIIFPPIKTDVTTVDPKYNYSKDANDVITMDPKDNWSKDANDTLLLQLTNTSAYYMYLLLLLKSVVYFAIITCCLLGRTAFCCNGEKS

SEQ ID NO: 11772 - protein, 173 aa, Artificial Sequence
  Synthetic Polypeptide
DKQLDADVSPKPTIFLPSIAETKLQKAGTYLCLLEKFFPDVIKIHWQEKKSNTILGSQEGNTMKTNDTYMKFSWLTVPEKSLDKEHRCIVRHENNKNGVDQEIIFPPIKTDVITMDPKDNCSKDANDTLLLQLTNTSAYYMYLLLLLKSVVYFAIITCCLLRRTAFCCNGEKS

SEQ ID NO: 11773 - protein, 153 aa, Artificial Sequence
  Synthetic Polypeptide
SQPHTKPSVFVMKNGTNVACLVKEFYPKDIRINLVSSKKITEFDPAIVISPSGKYNAVKLGKYEDSNSVTCSVQHDNKTVHSTDFEVKTDSTDHVKPKETENTKQPSKSCHKPKAIVHTEKVNMMSLTVLGLRMLFAKTVAVNFLLTAKLFFL

SEQ ID NO: 11774 - protein, 153 aa, Artificial Sequence; identical to SEQ ID NO: 11773
  Synthetic Polypeptide

SEQ ID NO: 11775 - protein, 107 aa, Artificial Sequence
  Synthetic Polypeptide
IQNPDPAVYITDKTVLDMRSMDFKSNSAVAWSNKSDFACANAFNNSIIPEDTFFPSPESSCDVKLVEKSFETDTNLNFQNLSVIGFRILLLKVAGFNLLMTLRLWSS

SEQ ID NO: 11776 - protein, 179 aa, Artificial Sequence
  Synthetic Polypeptide
EDLKNVFPPEVAVFEPSRAEISHTQKATLVCLATGFYPDHVELSWWVNGKEVHSGVCTDPQPLKEQPALNDSRYCLSSRLRVSATFWQNPRNHFRCQVQFYGLSENDEWTQDRAKPVTQIVSAEAWGRADCGFTSESYQQGVLSATILYEILLGKATLYAVLVSALVLMAMVKRKDSRG

SEQ ID NO: 11777 - protein, 179 aa, Artificial Sequence
  Synthetic Polypeptide
EDLKNVFPPEVAVFEPSRAEIAHTQKATLVCLATGFYPDHVELSWWVNGKEVHSGVCTDPQPLKEQPALNDSRYCLSSRLRVSATFWQNPRNHFRCQVQFYGLSENDEWTQDRAKPVTQIVSAEAWGRADCGFTSESYQQGVLSATILYEILLGKATLYAVLVSALVLMAMVKRKDSRG

SEQ ID NO: 11778 - protein, 30 aa, Artificial Sequence
  Synthetic Polypeptide
QSFGLLDPKLCYLLDGILFIYGVILTALFL

SEQ ID NO: 11779 - protein, 143 aa, Artificial Sequence
  Synthetic Polypeptide
QSFGLLDPKLCYLLDGILFIYGVILTALFLRVKFSRSADAPAYQQGQNQLYNELNLGRREEYDVLDKRRGRDPEMGGKPQRRKNPQEGLYNELQKDKMAEAYSEIGMKGERRRGKGHDGLYQGLSTATKDTYDALHMQALPPR

SEQ ID NO: 11780 - protein, 143 aa, Artificial Sequence; identical to SEQ ID NO: 11779
  Synthetic Polypeptide

SEQ ID NO: 11781 - protein, 41 aa, Artificial Sequence
  Synthetic Polypeptide
RSKRSRLLHSDYMNMTPRRPGPTRKHYQPYAPPRDFAAYRS

SEQ ID NO: 11782 - protein, 42 aa, Artificial Sequence
  Synthetic Polypeptide
KRGRKKLLYIFKQPFMRPVQTTQEEDGCSCRFPEEEEGGCEL

SEQ ID NO: 11783 - protein, 55 aa, Artificial Sequence
  Synthetic Polypeptide
KNRKAKAKPVTRGAGAGGRQRGQNKERPPPVPNPDYEPIRKGQRDLYSGLNQRRI

SEQ ID NO: 11784 - protein, 30 aa, Artificial Sequence; identical to SEQ ID NO: 11778
  Synthetic Polypeptide

SEQ ID NO: 11785 - protein, 113 aa, Artificial Sequence
  Synthetic Polypeptide
RVKFSRSADAPAYQQGQNQLYNELNLGRREEYDVLDKRRGRDPEMGGKPQRRKNPQEGLYNELQKDKMAEAYSEIGMKGERRRGKGHDGLYQGLSTATKDTYDALHMQALPPR

SEQ ID NO: 11786 - protein, 143 aa, Artificial Sequence; identical to SEQ ID NO: 11779
  Synthetic Polypeptide

SEQ ID NO: 11787 - protein, 41 aa, Artificial Sequence; identical to SEQ ID NO: 11781
  Synthetic Polypeptide

SEQ ID NO: 11788 - protein, 42 aa, Artificial Sequence; identical to SEQ ID NO: 11782
  Synthetic Polypeptide

SEQ ID NO: 11789 - protein, 184 aa, Artificial Sequence
  Synthetic Polypeptide
QSFGLLDPKLCYLLDGILFIYGVILTALFLRSKRSRLLHSDYMNMTPRRPGPTRKHYQPYAPPRDFAAYRSRVKFSRSADAPAYQQGQNQLYNELNLGRREEYDVLDKRRGRDPEMGGKPQRRKNPQEGLYNELQKDKMAEAYSEIGMKGERRRGKGHDGLYQGLSTATKDTYDALHMQALPPR

SEQ ID NO: 11790 - protein, 185 aa, Artificial Sequence
  Synthetic Polypeptide
QSFGLLDPKLCYLLDGILFIYGVILTALFLKRGRKKLLYIFKQPFMRPVQTTQEEDGCSCRFPEEEEGGCELRVKFSRSADAPAYQQGQNQLYNELNLGRREEYDVLDKRRGRDPEMGGKPQRRKNPQEGLYNELQKDKMAEAYSEIGMKGERRRGKGHDGLYQGLSTATKDTYDALHMQALPPR

SEQ ID NO: 11791 - protein, 184 aa, Artificial Sequence; identical to SEQ ID NO: 11789
  Synthetic Polypeptide

SEQ ID NO: 11792 - protein, 185 aa, Artificial Sequence; identical to SEQ ID NO: 11790
  Synthetic Polypeptide

SEQ ID NO: 11793 - protein, 136 aa, Artificial Sequence
  Synthetic Polypeptide
DPAVYQLRDSKSSDKSVCLFTDFDSQTNVSQSKDSDVYITDKCVLDMRSMDFKSNSAVAWSNKSDFACANAFNNSIIPEDTFFPSPESSCDVKLVEKSFETDTNLNFQNLSVIGFRILLLKVAGFNLLMTLRLWSS

SEQ ID NO: 11794 - protein, 134 aa, Artificial Sequence
  Synthetic Polypeptide
AVYQLRDSKSSDKSVCLFTDFDSQTNVSQSKDSDVYITDKCVLDMRSMDFKSNSAVAWSNKSDFACANAFNNSIIPEDTFFPSPESSCDVKLVEKSFETDTNLNFQNLSVIGFRILLLKVAGFNLLMTLRLWSS

SEQ ID NO: 11795 - protein, 130 aa, Artificial Sequence
  Synthetic Polypeptide
LRDSKSSDKSVCLFTDFDSQTNVSQSKDSDVYITDKCVLDMRSMDFKSNSAVAWSNKSDFACANAFNNSIIPEDTFFPSPESSCDVKLVEKSFETDTNLNFQNLSVIGFRILLLKVAGFNLLMTLRLWSS

SEQ ID NO: 11796 - protein, 127 aa, Artificial Sequence
  Synthetic Polypeptide
SKSSDKSVCLFTDFDSQTNVSQSKDSDVYITDKCVLDMRSMDFKSNSAVAWSNKSDFACANAFNNSIIPEDTFFPSPESSCDVKLVEKSFETDTNLNFQNLSVIGFRILLLKVAGFNLLMTLRLWSS

SEQ ID NO: 11797 - protein, 123 aa, Artificial Sequence
  Synthetic Polypeptide
DKSVCLFTDFDSQTNVSQSKDSDVYITDKCVLDMRSMDFKSNSAVAWSNKSDFACANAFNNSIIPEDTFFPSPESSCDVKLVEKSFETDTNLNFQNLSVIGFRILLLKVAGFNLLMTLRLWSS

SEQ ID NO: 11798 - protein, 114 aa, Artificial Sequence
  Synthetic Polypeptide
FDSQTNVSQSKDSDVYITDKCVLDMRSMDFKSNSAVAWSNKSDFACANAFNNSIIPEDTFFPSPESSCDVKLVEKSFETDTNLNFQNLSVIGFRILLLKVAGFNLLMTLRLWSS

SEQ ID NO: 11799 - protein, 108 aa, Artificial Sequence
  Synthetic Polypeptide
VSQSKDSDVYITDKCVLDMRSMDFKSNSAVAWSNKSDFACANAFNNSIIPEDTFFPSPESSCDVKLVEKSFETDTNLNFQNLSVIGFRILLLKVAGFNLLMTLRLWSS

SEQ ID NO: 11800 - protein, 94 aa, Artificial Sequence
  Synthetic Polypeptide
CVLDMRSMDFKSNSAVAWSNKSDFACANAFNNSIIPEDTFFPSPESSCDVKLVEKSFETDTNLNFQNLSVIGFRILLLKVAGFNLLMTLRLWSS

SEQ ID NO: 11801 - protein, 88 aa, Artificial Sequence
  Synthetic Polypeptide
SMDFKSNSAVAWSNKSDFACANAFNNSIIPEDTFFPSPESSCDVKLVEKSFETDTNLNFQNLSVIGFRILLLKVAGFNLLMTLRLWSS

SEQ ID NO: 11802 - protein, 60 aa, Artificial Sequence
  Synthetic Polypeptide
IPEDTFFPSPESSCDVKLVEKSFETDTNLNFQNLSVIGFRILLLKVAGFNLLMTLRLWSS

SEQ ID NO: 11803 - protein, 50 aa, Artificial Sequence
  Synthetic Polypeptide
ESSCDVKLVEKSFETDTNLNFQNLSVIGFRILLLKVAGFNLLMTLRLWSS

SEQ ID NO: 11804 - protein, 179 aa, Artificial Sequence; identical to SEQ ID NO: 11749
  Synthetic Polypeptide

SEQ ID NO: 11805 - protein, 176 aa, Artificial Sequence
  Synthetic Polypeptide
KNVFPPEVAVFEPSEAEISHTQKATLVCLATGFYPDHVELSWWVNGKEVHSGVCTDPQPLKEQPALNDSRYCLSSRLRVSATFWQNPRNHFRCQVQFYGLSENDEWTQDRAKPVTQIVSAEAWGRADCGFTSESYQQGVLSATILYEILLGKATLYAVLVSALVLMAMVKRKDSRG

SEQ ID NO: 11806 - protein, 175 aa, Artificial Sequence
  Synthetic Polypeptide
NVFPPEVAVFEPSEAEISHTQKATLVCLATGFYPDHVELSWWVNGKEVHSGVCTDPQPLKEQPALNDSRYCLSSRLRVSATFWQNPRNHFRCQVQFYGLSENDEWTQDRAKPVTQIVSAEAWGRADCGFTSESYQQGVLSATILYEILLGKATLYAVLVSALVLMAMVKRKDSRG

SEQ ID NO: 11807 - protein, 173 aa, Artificial Sequence
  Synthetic Polypeptide
FPPEVAVFEPSEAEISHTQKATLVCLATGFYPDHVELSWWVNGKEVHSGVCTDPQPLKEQPALNDSRYCLSSRLRVSATFWQNPRNHFRCQVQFYGLSENDEWTQDRAKPVTQIVSAEAWGRADCGFTSESYQQGVLSATILYEILLGKATLYAVLVSALVLMAMVKRKDSRG

SEQ ID NO: 11808 - protein, 169 aa, Artificial Sequence
  Synthetic Polypeptide
VAVFEPSEAEISHTQKATLVCLATGFYPDHVELSWWVNGKEVHSGVCTDPQPLKEQPALNDSRYCLSSRLRVSATFWQNPRNHFRCQVQFYGLSENDEWTQDRAKPVTQIVSAEAWGRADCGFTSESYQQGVLSATILYEILLGKATLYAVLVSALVLMAMVKRKDSRG

SEQ ID NO: 11809 - protein, 164 aa, Artificial Sequence
  Synthetic Polypeptide
PSEAEISHTQKATLVCLATGFYPDHVELSWWVNGKEVHSGVCTDPQPLKEQPALNDSRYCLSSRLRVSATFWQNPRNHFRCQVQFYGLSENDEWTQDRAKPVTQIVSAEAWGRADCGFTSESYQQGVLSATILYEILLGKATLYAVLVSALVLMAMVKRKDSRG

SEQ ID NO: 11810 - protein, 161 aa, Artificial Sequence
  Synthetic Polypeptide
AEISHTQKATLVCLATGFYPDHVELSWWVNGKEVHSGVCTDPQPLKEQPALNDSRYCLSSRLRVSATFWQNPRNHFRCQVQFYGLSENDEWTQDRAKPVTQIVSAEAWGRADCGFTSESYQQGVLSATILYEILLGKATLYAVLVSALVLMAMVKRKDSRG

SEQ ID NO: 11811 - protein, 149 aa, Artificial Sequence
  Synthetic Polypeptide
CLATGFYPDHVELSWWVNGKEVHSGVCTDPQPLKEQPALNDSRYCLSSRLRVSATFWQNPRNHFRCQVQFYGLSENDEWTQDRAKPVTQIVSAEAWGRADCGFTSESYQQGVLSATILYEILLGKATLYAVLVSALVLMAMVKRKDSRG

SEQ ID NO: 11812 - protein, 137 aa, Artificial Sequence
  Synthetic Polypeptide
LSWWVNGKEVHSGVCTDPQPLKEQPALNDSRYCLSSRLRVSATFWQNPRNHFRCQVQFYGLSENDEWTQDRAKPVTQIVSAEAWGRADCGFTSESYQQGVLSATILYEILLGKATLYAVLVSALVLMAMVKRKDSRG

SEQ ID NO: 11813 - protein, 128 aa, Artificial Sequence
  Synthetic Polypeptide
VHSGVCTDPQPLKEQPALNDSRYCLSSRLRVSATFWQNPRNHFRCQVQFYGLSENDEWTQDRAKPVTQIVSAEAWGRADCGFTSESYQQGVLSATILYEILLGKATLYAVLVSALVLMAMVKRKDSRG

SEQ ID NO: 11814 - protein, 123 aa, Artificial Sequence
  Synthetic Polypeptide
CTDPQPLKEQPALNDSRYCLSSRLRVSATFWQNPRNHFRCQVQFYGLSENDEWTQDRAKPVTQIVSAEAWGRADCGFTSESYQQGVLSATILYEILLGKATLYAVLVSALVLMAMVKRKDSRG

SEQ ID NO: 11815 - protein, 115 aa, Artificial Sequence
  Synthetic Polypeptide
EQPALNDSRYCLSSRLRVSATFWQNPRNHFRCQVQFYGLSENDEWTQDRAKPVTQIVSAEAWGRADCGFTSESYQQGVLSATILYEILLGKATLYAVLVSALVLMAMVKRKDSRG

SEQ ID NO: 11816 - protein, 53 aa, Artificial Sequence
  Synthetic Polypeptide
GRADCGFTSESYQQGVLSATILYEILLGKATLYAVLVSALVLMAMVKRKDSRG

SEQ ID NO: 11817 - protein, 51 aa, Artificial Sequence
  Synthetic Polypeptide
ADCGFTSESYQQGVLSATILYEILLGKATLYAVLVSALVLMAMVKRKDSRG

SEQ ID NO: 11818 - protein, 173 aa, Artificial Sequence; identical to SEQ ID NO: 11772
  Synthetic Polypeptide

SEQ ID NO: 11819 - protein, 168 aa, Artificial Sequence
  Synthetic Polypeptide
ADVSPKPTIFLPSIAETKLQKAGTYLCLLEKFFPDVIKIHWQEKKSNTILGSQEGNTMKTNDTYMKFSWLTVPEKSLDKEHRCIVRHENNKNGVDQEIIFPPIKTDVITMDPKDNCSKDANDTLLLQLTNTSAYYMYLLLLLKSVVYFAIITCCLLRRTAFCCNGEKS

SEQ ID NO: 11820 - protein, 166 aa, Artificial Sequence
  Synthetic Polypeptide
VSPKPTIFLPSIAETKLQKAGTYLCLLEKFFPDVIKIHWQEKKSNTILGSQEGNTMKTNDTYMKFSWLTVPEKSLDKEHRCIVRHENNKNGVDQEIIFPPIKTDVITMDPKDNCSKDANDTLLLQLTNTSAYYMYLLLLLKSVVYFAIITCCLLRRTAFCCNGEKS

SEQ ID NO: 11821 - protein, 161 aa, Artificial Sequence
  Synthetic Polypeptide
TIFLPSIAETKLQKAGTYLCLLEKFFPDVIKIHWQEKKSNTILGSQEGNTMKTNDTYMKFSWLTVPEKSLDKEHRCIVRHENNKNGVDQEIIFPPIKTDVITMDPKDNCSKDANDTLLLQLTNTSAYYMYLLLLLKSVVYFAIITCCLLRRTAFCCNGEKS

SEQ ID NO: 11822 - protein, 67 aa, Artificial Sequence
  Synthetic Polypeptide
PIKTDVITMDPKDNCSKDANDTLLLQLTNTSAYYMYLLLLLKSVVYFAIITCCLLRRTAFCCNGEKS

SEQ ID NO: 11823 - protein, 59 aa, Artificial Sequence
  Synthetic Polypeptide
MDPKDNCSKDANDTLLLQLTNTSAYYMYLLLLLKSVVYFAIITCCLLRRTAFCCNGEKS

SEQ ID NO: 11824 - protein, 153 aa, Artificial Sequence; identical to SEQ ID NO: 11773
  Synthetic Polypeptide

SEQ ID NO: 11825 - protein, 151 aa, Artificial Sequence
  Synthetic Polypeptide
PHTKPSVFVMKNGTNVACLVKEFYPKDIRINLVSSKKITEFDPAIVISPSGKYNAVKLGKYEDSNSVTCSVQHDNKTVHSTDFEVKTDSTDHVKPKETENTKQPSKSCHKPKAIVHTEKVNMMSLTVLGLRMLFAKTVAVNFLLTAKLFFL

SEQ ID NO: 11826 - protein, 147 aa, Artificial Sequence
  Synthetic Polypeptide
PSVFVMKNGTNVACLVKEFYPKDIRINLVSSKKITEFDPAIVISPSGKYNAVKLGKYEDSNSVTCSVQHDNKTVHSTDFEVKTDSTDHVKPKETENTKQPSKSCHKPKAIVHTEKVNMMSLTVLGLRMLFAKTVAVNFLLTAKLFFL

SEQ ID NO: 11827 - protein, 145 aa, Artificial Sequence
  Synthetic Polypeptide
VFVMKNGTNVACLVKEFYPKDIRINLVSSKKITEFDPAIVISPSGKYNAVKLGKYEDSNSVTCSVQHDNKTVHSTDFEVKTDSTDHVKPKETENTKQPSKSCHKPKAIVHTEKVNMMSLTVLGLRMLFAKTVAVNFLLTAKLFFL

SEQ ID NO: 11828 - protein, 140 aa, Artificial Sequence
  Synthetic Polypeptide
NGTNVACLVKEFYPKDIRINLVSSKKITEFDPAIVISPSGKYNAVKLGKYEDSNSVTCSVQHDNKTVHSTDFEVKTDSTDHVKPKETENTKQPSKSCHKPKAIVHTEKVNMMSLTVLGLRMLFAKTVAVNFLLTAKLFFL

SEQ ID NO: 11829 - protein, 68 aa, Artificial Sequence
  Synthetic Polypeptide
EVKTDSTDHVKPKETENTKQPSKSCHKPKAIVHTEKVNMMSLTVLGLRMLFAKTVAVNFLLTAKLFFL

SEQ ID NO: 11830 - protein, 61 aa, Artificial Sequence
  Synthetic Polypeptide
DHVKPKETENTKQPSKSCHKPKAIVHTEKVNMMSLTVLGLRMLFAKTVAVNFLLTAKLFFL

SEQ ID NO: 11831 - protein, 5 aa, Artificial Sequence
  Synthetic Polypeptide
GGGGG

SEQ ID NO: 11832 - protein, 106 aa, Artificial Sequence
  Synthetic Polypeptide
GQPKANPTVTLFPPSSEELQANKATLVCLISDFYPGAVTVAWKADGSPVKAGVETTKPSKQSNNKYAASSYLSLTPEQWKSHRSYSCQVTHEGSTVEKTVAPTECS

SEQ ID NO: 11833 - protein, 103 aa, Artificial Sequence
  Synthetic Polypeptide
ASTKGPSVFPLAPSSKSTSGGTAALGCLVKDYFPEPVTVSWNSGALTSGVHTFPAVLQSSGLYSLSSVVTVPSSSLGTQTYICNVNHKPSNTKVDKRVEPKSC

SEQ ID NO: 11834 - protein, 102 aa, Artificial Sequence
  Synthetic Polypeptide
ASTKGPSVFPLAPSSKSTSGGTAALGCLVKDYFPEPVTVSWNSGALTSGVHTFPAVLQSSGLYSLSSVVTVPSSSLGTQTYICNVNHKPSNTKVDKRVEPKS

SEQ ID NO: 11835 - protein, 113 aa, Artificial Sequence
  Synthetic Polypeptide
ASTKGPSVFPLAPSSKSTSGGTAALGCLVKDYFPEPVTVSWNSGALTSGVHTFPAVLQSSGLYSLSSVVTVPSSSLGTQTYICNVNHKPSNTKVDKRVEPKSCDKTHTCPPCP

SEQ ID NO: 11836 - protein, 103 aa, Artificial Sequence
  Synthetic Polypeptide
ASTKGPSVFPLAPSSKSTSGGTAALGCLVKDYFPEPVTVSWNSGALTSGVHTFPAVLQSSGLYSLSSVVTVPSSSLGTQTYICNVNHKPSNTKVDKKVEPKSC

SEQ ID NO: 11837 - protein, 102 aa, Artificial Sequence
  Synthetic Polypeptide
ASTKGPSVFPLAPSSKSTSGGTAALGCLVKDYFPEPVTVSWNSGALTSGVHTFPAVLQSSGLYSLSSVVTVPSSSLGTQTYICNVNHKPSNTKVDKKVEPKS

SEQ ID NO: 11838 - protein, 113 aa, Artificial Sequence
  Synthetic Polypeptide
ASTKGPSVFPLAPSSKSTSGGTAALGCLVKDYFPEPVTVSWNSGALTSGVHTFPAVLQSSGLYSLSSVVTVPSSSLGTQTYICNVNHKPSNTKVDKKVEPKSCDKTHTCPPCP

SEQ ID NO: 11839 - protein, 101 aa, Artificial Sequence
  Synthetic Polypeptide
ASTKGPSVFPLAPCSRSTSESTAALGCLVKDYFPEPVTVSWNSGALTSGVHTFPAVLQSSGLYSLSSVVTVPSSNFGTQTYTCNVDHKPSNTKVDKTVERK

SEQ ID NO: 11840 - protein, 102 aa, Artificial Sequence
  Synthetic Polypeptide
ASTKGPSVFPLAPCSRSTSESTAALGCLVKDYFPEPVTVSWNSGALTSGVHTFPAVLQSSGLYSLSSVVTVPSSNFGTQTYTCNVDHKPSNTKVDKTVERKC

SEQ ID NO: 11841 - protein, 103 aa, Artificial Sequence
  Synthetic Polypeptide
ASTKGPSVFPLAPCSRSTSESTAALGCLVKDYFPEPVTVSWNSGALTSGVHTFPAVLQSSGLYSLSSVVTVPSSNFGTQTYTCNVDHKPSNTKVDKTVERKCC

SEQ ID NO: 11842 - protein, 103 aa, Artificial Sequence
  Synthetic Polypeptide
ASTKGPSVFPLAPCSRSTSESTAALGCLVKDYFPEPVTVSWNSGALTSGVHTFPAVLQSSGLYSLSSVVTVPSSSLGTKTYTCNVDHKPSNTKVDKRVESKYG

SEQ ID NO: 11843 - protein, 121 aa, Artificial Sequence
  Synthetic Polypeptide
ASPTSPKVFPLSLCSTQPDGNVVIACLVQGFFPQEPLSVTWSESGQGVTARNFPPSQDASGDLYTTSSQLTLPATQCLAGKSVTCHVKHYTNPSQDVTVPCPVPSTPPTPSPSTPPTPSPS

SEQ ID NO: 11844 - protein, 108 aa, Artificial Sequence
  Synthetic Polypeptide
ASPTSPKVFPLSLDSTPQDGNVVVACLVQGFFPQEPLSVTWSESGQNVTARNFPPSQDASGDLYTTSSQLTLPATQCPDGKSVTCHVKHYTNPSQDVTVPCPVPPPPP

SEQ ID NO: 11845 - protein, 159 aa, Artificial Sequence
  Synthetic Polypeptide
APTKAPDVFPIISGCRHPKDNSPVVLACLITGYHPTSVTVTWYMGTQSQPQRTFPEIQRRDSYYMTSSQLSTPLQQWRQGEYKCVVQHTASKSKKEIFRWPESPKAQASSVPTAQPQAEGSLAKATTAPATTRNTGRGGEEKKKEKEKEEQEERETKTP

SEQ ID NO: 11846 - protein, 103 aa, Artificial Sequence
  Synthetic Polypeptide
ASTQSPSVFPLTRCCKNIPSNATSVTLGCLATGYFPEPVMVTWDTGSLNGTTMTLPATTLTLSGHYATISLLTVSGAWAKQMFTCRVAHTPSSTDWVDNKTFS

SEQ ID NO: 11847 - protein, 104 aa, Artificial Sequence
  Synthetic Polypeptide
GSASAPTLFPLVSCENSPSDTSSVAVGCLAQDFLPDSITLSWKYKNNSDISSTRGFPSVLRGGKYAATSQVLLPSKDVMQGTDEHVVCKVQHPNGNKEKNVPLP

SEQ ID NO: 11848 - protein, 80 aa, Artificial Sequence
  Synthetic Polypeptide
IQNPDPAVYQLRDSKSSDKSVCLFTDFDSQTNVSQSKDSDVYITDKTVLDMRSMDFKSNSAVAWSNKSDFACANAFNNSI

SEQ ID NO: 11849 - protein, 90 aa, Artificial Sequence
  Synthetic Polypeptide
IQNPDPAVYQLRDSKSSDKSVCLFTDFDSQTNVSQSKDSDVYITDKTVLDMRSMDFKSNSAVAWSNKSDFACANAFNNSIIPEDTFFPSP

SEQ ID NO: 11850 - protein, 126 aa, Artificial Sequence
  Synthetic Polypeptide
EDLKNVFPPEVAVFEPSEAEISHTQKATLVCLATGFYPDHVELSWWVNGKEVHSGVSTDPQPLKEQPALNDSRYCLSSRLRVSATFWQNPRNHFRCQVQFYGLSENDEWTQDRAKPVTQIVSAEAW

SEQ ID NO: 11851 - protein, 128 aa, Artificial Sequence
  Synthetic Polypeptide
EDLKNVFPPEVAVFEPSEAEISHTQKATLVCLATGFYPDHVELSWWVNGKEVHSGVSTDPQPLKEQPALNDSRYCLSSRLRVSATFWQNPRNHFRCQVQFYGLSENDEWTQDRAKPVTQIVSAEAWGR

SEQ ID NO: 11852 - protein, 106 aa, Artificial Sequence
  Synthetic Polypeptide
DKQLDADVSPKPTIFLPSIAETKLQKAGTYLCLLEKFFPDVIKIHWQEKKSNTILGSQEGNTMKTNDTYMKFSWLTVPEKSLDKEHRCIVRHENNKNGVDQEIIFP

SEQ ID NO: 11853 - protein, 114 aa, Artificial Sequence
  Synthetic Polypeptide
DKQLDADVSPKPTIFLPSIAETKLQKAGTYLCLLEKFFPDVIKIHWQEKKSNTILGSQEGNTMKTNDTYMKFSWLTVPEKSLDKEHRCIVRHENNKNGVDQEIIFPPIKTDVIT

SEQ ID NO: 11854 - protein, 85 aa, Artificial Sequence
  Synthetic Polypeptide
SQPHTKPSVFVMKNGTNVACLVKEFYPKDIRINLVSSKKITEFDPAIVISPSGKYNAVKLGKYEDSNSVTCSVQHDNKTVHSTDF

SEQ ID NO: 11855 - protein, 92 aa, Artificial Sequence
  Synthetic Polypeptide
SQPHTKPSVFVMKNGTNVACLVKEFYPKDIRINLVSSKKITEFDPAIVISPSGKYNAVKLGKYEDSNSVTCSVQHDNKTVHSTDFEVKTDST

SEQ ID NO: 11856 - protein, 131 aa, Artificial Sequence
  Synthetic Polypeptide
EDLKNVFPPEVAVFEPSEAEISHTQKATLVCLATGFYPDHVELSWWVNGKEVHSGVSTDPQPLKEQPALNDSRYCLSSRLRVSATFWQNPRNHFRCQVQFYGLSENDEWTQDRAKPVTQIVSAEAWGRADC

SEQ ID NO: 11857 - protein, 94 aa, Artificial Sequence
  Synthetic Polypeptide
IQNPDPAVYQLRDSKSSDKSVCLFTDFDSQTNVSQSKDSDVYITDKTVLDMRSMDFKSNSAVAWSNKSDFACANAFNNSIIPEDTFFPSPESSC

SEQ ID NO: 11858 - protein, 94 aa, Artificial Sequence; identical to SEQ ID NO: 11857
  Synthetic Polypeptide

SEQ ID NO: 11859 - protein, 79 aa, Artificial Sequence
  Synthetic Polypeptide
KSSDKSVCLFTDFDSQTNVSQSKDSDVYITDKTVLDMRSMDFKSNSAVAWSNKSDFACANAFNNSIIPEDTFFPSPESS

SEQ ID NO: 11860 - protein, 126 aa, Artificial Sequence; identical to SEQ ID NO: 11850
  Synthetic Polypeptide

SEQ ID NO: 11861 - protein, 110 aa, Artificial Sequence
  Synthetic Polypeptide
PEVAVFEPSEAEISHTQKATLVCLATGFYPDHVELSWWVNGKEVHSGVSTDPQPLKEQPALNDSRYCLSSRLRVSATFWQNPRNHFRCQVQFYGLSENDEWTQDRAKPVT

SEQ ID NO: 11862 - protein, 114 aa, Artificial Sequence; identical to SEQ ID NO: 11853
  Synthetic Polypeptide

SEQ ID NO: 11863 - protein, 95 aa, Artificial Sequence
  Synthetic Polypeptide
PKPTIFLPSIAETKLQKAGTYLCLLEKFFPDVIKIHWQEKKSNTILGSQEGNTMKTNDTYMKFSWLTVPEKSLDKEHRCIVRHENNKNGVDQEII

SEQ ID NO: 11864 - protein, 85 aa, Artificial Sequence; identical to SEQ ID NO: 11854
  Synthetic Polypeptide

SEQ ID NO: 11865 - protein, 92 aa, Artificial Sequence; identical to SEQ ID NO: 11855
  Synthetic Polypeptide

SEQ ID NO: 11866 - protein, 10 aa, Artificial Sequence
  Synthetic Polypeptide
GGGGGGGGGG

SEQ ID NO: 11867 - protein, 21 aa, Artificial Sequence
  Synthetic Polypeptide
DVKLVEKSFETDTNLNFQNLS

SEQ ID NO: 11868 - protein, 22 aa, Artificial Sequence
  Synthetic Polypeptide
CDVKLVEKSFETDTNLNFQNLS

SEQ ID NO: 11869 - protein, 19 aa, Artificial Sequence
  Synthetic Polypeptide
GRADCGFTSESYQQGVLSA

SEQ ID NO: 11870 - protein, 27 aa, Artificial Sequence
  Synthetic Polypeptide
QIVSAEAWGRADCGFTSESYQQGVLSA

SEQ ID NO: 11871 - protein, 24 aa, Artificial Sequence
  Synthetic Polypeptide
MDPKDNCSKDANDTLLLQLTNTSA

SEQ ID NO: 11872 - protein, 34 aa, Artificial Sequence
  Synthetic Polypeptide
FPPIKTDVITMDPKDNCSKDANDTLLLQLTNTSA

SEQ ID NO: 11873 - protein, 44 aa, Artificial Sequence
  Synthetic Polypeptide
EVKTDSTDHVKPKETENTKQPSKSCHKPKAIVHTEKVNMMSLTV

SEQ ID NO: 11874 - protein, 37 aa, Artificial Sequence
  Synthetic Polypeptide
DHVKPKETENTKQPSKSCHKPKAIVHTEKVNMMSLTV

SEQ ID NO: 11875 - protein, 10 aa, Artificial Sequence
  Synthetic Polypeptide
QSFGLLDPKL

SEQ ID NO: 11876 - protein, 5 aa, Artificial Sequence
  Synthetic Polypeptide
GGGGG

SEQ ID NO: 11877 - protein, 20 aa, Artificial Sequence
  Synthetic Polypeptide
VIGFRILLLKVAGFNLLMTL

SEQ ID NO: 11878 - protein, 23 aa, Artificial Sequence
  Synthetic Polypeptide
TILYEILLGKATLYAVLVSALVL

SEQ ID NO: 11879 - protein, 23 aa, Artificial Sequence
  Synthetic Polypeptide
YYMYLLLLLKSVVYFAIITCCLL

SEQ ID NO: 11880 - protein, 23 aa, Artificial Sequence
  Synthetic Polypeptide
LGLRMLFAKTVAVNFLLTAKLFF

SEQ ID NO: 11881 - protein, 20 aa, Artificial Sequence
  Synthetic Polypeptide
CYLLDGILFIYGVILTALFL

SEQ ID NO: 11882 - protein, 5 aa, Artificial Sequence
  Synthetic Polypeptide
GGGGG

SEQ ID NO: 11883 - protein, 5 aa, Artificial Sequence
  Synthetic Polypeptide
RLWSS

SEQ ID NO: 11884 - protein, 11 aa, Artificial Sequence
  Synthetic Polypeptide
MAMVKRKDSRG

SEQ ID NO: 11885 - protein, 12 aa, Artificial Sequence
  Synthetic Polypeptide
RRTAFCCNGEKS

SEQ ID NO: 11886 - protein, 113 aa, Artificial Sequence; identical to SEQ ID NO: 11785
  Synthetic Polypeptide

SEQ ID NO: 11887 - protein, 5 aa, Artificial Sequence
  Synthetic Polypeptide
GGGGG

SEQ ID NO: 11888 - protein, 10 aa, Artificial Sequence
  Synthetic Polypeptide
DKTHTCPPCP

SEQ ID NO: 11889 - protein, 9 aa, Artificial Sequence
  Synthetic Polypeptide
CCVECPPCP

SEQ ID NO: 11890 - protein, 234 aa, Artificial Sequence
  Synthetic Polypeptide
PAEPKSPDKTHTCPPCPAPPVAGPSVFLFPPKPKDTLMIARTPEVTCVVVDVSHEDPEVKFNWYVDGVEVHNAKTKPREEQYNSTYRVVSVLTVLHQDWLNGKEYKCKVSNKALPAPIEKTISKAKGQPREPQVYTLPPSRDELTKNQVSLTCLVKGFYPSDIAVEWESNGQPENNYKTTPPVLDSDGSFFLYSKLTVDKSRWQQGNVFSCSVMHEALHNHYTQKSLSLSPGKK

SEQ ID NO: 11891 - protein, 235 aa, Artificial Sequence
  Synthetic Polypeptide
PAEPKSPDKTHTCPPCPAPPVAGPSVFLFPPKPKDTLMIARTPEVTCVVVDVSHEDPEVKFNWYVDGVEVHNAKTKPREEQYNSTYRVVSVLTVLHQDWLNGKEYKCKVSNKALPAPIEKTISKAKGQPREPQVYTLPPSRDELTKNQVSLTCLVKGFYPSDIAVEWESNGQPENNYKTTPPVLDSDGSFFLYSKLTVDKSRWQQGNVFSCSVMHEALHNHYTQKSLSSLSPGKK

SEQ ID NO: 11892 - protein, 229 aa, Artificial Sequence
  Synthetic Polypeptide
ESKYGPPCPPCPAPEFEGGPSVFLFPPKPKDTLMISRTPEVTCVVVDVSQEDPEVQFNWYVDGVEVHNAKTKPREEQFNSTYRVVSVLTVLHQDWLNGKEYKCKVSNKGLPSSIEKTISKAKGQPREPQVYTLPPSQEEMTKNQVSLTCLVKGFYPSDIAVEWESNGQPENNYKTTPPVLDSDGSFFLYSRLTVDKSRWQEGNVFSCSVMHEALHNHYTQKSLSLSLGK

SEQ ID NO: 11893 - protein, 119 aa, Artificial Sequence
  Synthetic Polypeptide
ESKYGPPCPPCPGQPREPQVYTLPPSQEEMTKNQVSLTCLVKGFYPSDIAVEWESNGQPENNYKTTPPVLDSDGSFFLYSRLTVDKSRWQEGNVFSCSVMHEALHNHYTQKSLSLSLGK

SEQ ID NO: 11894 - protein, 12 aa, Artificial Sequence
  Synthetic Polypeptide
ESKYGPPCPPCP

SEQ ID NO: 11895 - protein, 5 aa, Artificial Sequence
  Synthetic Polypeptide
GGGGG

SEQ ID NO: 11896 - protein, 112 aa, Artificial Sequence
  Synthetic Polypeptide
RVKFSRSADAPAYQQGQNQLYNELNLGRREEYDVLDKRRGRDPEMGGKPRRKNPQEGLYNELQKDKMAEAYSEIGMKGERRRGKGHDGLYQGLSTATKDTYDALHMQALPPR

SEQ ID NO: 11897 - protein, 112 aa, Artificial Sequence; identical to SEQ ID NO: 11896
  Synthetic Polypeptide

SEQ ID NO: 11898 - protein, 42 aa, Artificial Sequence; identical to SEQ ID NO: 11782
  Synthetic Polypeptide

SEQ ID NO: 11899 - protein, 72 aa, Artificial Sequence
  Synthetic Polypeptide
AKPTTTPAPRPPTPAPTIASQPLSLRPEACRPAAGGAVHTRGLDFACDIYIWAPLAGTCGVLLLSLVITLYC

SEQ ID NO: 11900 - protein, 226 aa, Artificial Sequence
  Synthetic Polypeptide
AKPTTTPAPRPPTPAPTIASQPLSLRPEACRPAAGGAVHTRGLDFACDIYIWAPLAGTCGVLLLSLVITLYCKRGRKKLLYIFKQPFMRPVQTTQEEDGCSCRFPEEEEGGCELRVKFSRSADAPAYQQGQNQLYNELNLGRREEYDVLDKRRGRDPEMGGKPRRKNPQEGLYNELQKDKMAEAYSEIGMKGERRRGKGHDGLYQGLSTATKDTYDALHMQALPPR

SEQ ID NO: 11901 - protein, 114 aa, Artificial Sequence
  Synthetic Polypeptide
AKPTTTPAPRPPTPAPTIASQPLSLRPEACRPAAGGAVHTRGLDFACDIYIWAPLAGTCGVLLLSLVITLYCKRGRKKLLYIFKQPFMRPVQTTQEEDGCSCRFPEEEEGGCEL

SEQ ID NO: 11902 - protein, 108 aa, Artificial Sequence
  Synthetic Polypeptide
KIEVMYPPPYLDNEKSNGTIIHVKGKHLCPSPLFPGPSKPFWVLVVVGGVLACYSLLVTVAFIIFWVRSKRSRLLHSDYMNMTPRRPGPTRKHYQPYAPPRDFAAYRS

SEQ ID NO: 11903 - protein, 150 aa, Artificial Sequence
  Synthetic Polypeptide
FKIPIEELEDRVFVNCNTSITWVEGTVGTLLSDITRLDLGKRILDPRGIYRCNGTDIYKDKESTVQVHYRMCQSCVELDPATVAGIIVTDVIATLLLALGVFCFAGHETGRLSGAADTQALLRNDQVYQPLRDRDDAQYSHLGGNWARNK

SEQ ID NO: 11904 - protein, 185 aa, Artificial Sequence
  Synthetic Polypeptide
DGNEEMGGITQTPYKVSISGTTVILTCPQYPGSEILWQHNDKNIGGDEDDKNIGSDEDHLSLKEFSELEQSGYYVCYPRGSKPEDANFYLYLRARVCENCMEMDVMSVATIVIVDICITGGLLLLVYYWSKNRKAKAKPVTRGAGAGGRQRGQNKERPPPVQNPDYEPIRKGQRDLYSGLNQRRI

SEQ ID NO: 11905 - protein, 160 aa, Artificial Sequence
  Synthetic Polypeptide
QSIKGNHLVKVYDYQEDGSVLLTCDAEAKNITWFKDGKMIGFLTEDKKKWNLGSNAKDPRGMYQCKGSQNKSKPLQVYYRMCQNCIELNAATISGFLFAEIVSIFVLAVGVYFIAGQDGVRQSRASDKQTLLPNDQLYQPLKDREDDQYSHLQGNQLRRN

SEQ ID NO: 11906 - protein, 143 aa, Artificial Sequence; identical to SEQ ID NO: 11779
  Synthetic Polypeptide

SEQ ID NO: 11907 - protein, 5 aa, Artificial Sequence
  Synthetic Polypeptide
GGGGG

SEQ ID NO: 11908 - protein, 9 aa, Artificial Sequence
  Synthetic Polypeptide
GAIGFLRTA

SEQ ID NO: 11909 - protein, 10 aa, Artificial Sequence
  Synthetic Polypeptide
ALRRLLGLFG

SEQ ID NO: 11910 - protein, 10 aa, Artificial Sequence
  Synthetic Polypeptide
RAARVLGLET

SEQ ID NO: 11911 - protein, 8 aa, Artificial Sequence
  Synthetic Polypeptide
GPQGIFGQ

SEQ ID NO: 11912 - protein, 8 aa, Artificial Sequence
  Synthetic Polypeptide
RAIHIQAE

SEQ ID NO: 11913 - protein, 8 aa, Artificial Sequence
  Synthetic Polypeptide
APGQIAGQ

SEQ ID NO: 11914 - protein, 8 aa, Artificial Sequence
  Synthetic Polypeptide
GPQGLAGQ

SEQ ID NO: 11915 - protein, 8 aa, Artificial Sequence
  Synthetic Polypeptide
GPLGIAGI

SEQ ID NO: 11916 - protein, 8 aa, Artificial Sequence
  Synthetic Polypeptide
IPENFFGV

SEQ ID NO: 11917 - protein, 8 aa, Artificial Sequence
  Synthetic Polypeptide
MAASAKRE

SEQ ID NO: 11918 - protein, 8 aa, Artificial Sequence
  Synthetic Polypeptide
PFSPLVAT

SEQ ID NO: 11919 - protein, 8 aa, Artificial Sequence
  Synthetic Polypeptide
GPLGIAGQ

SEQ ID NO: 11920 - protein, 8 aa, Artificial Sequence
  Synthetic Polypeptide
GPQAIAGQ

SEQ ID NO: 11921 - protein, 5 aa, Artificial Sequence
  Synthetic Polypeptide
PGYIN

SEQ ID NO: 11922 - protein, 5 aa, Artificial Sequence
  Synthetic Polypeptide
GGGGG

SEQ ID NO: 11923 - protein, 22 aa, Artificial Sequence
  Synthetic Polypeptide
VKQTLNFDLLKLAGDVESNPGP

SEQ ID NO: 11924 - protein, 18 aa, Artificial Sequence
  Synthetic Polypeptide
EGRGSLLTCGDVEENPGP

SEQ ID NO: 11925 - protein, 18 aa, Artificial Sequence
  Synthetic Polypeptide
EGRGSLLTCGDVEENPGP

SEQ ID NO: 11926 - protein, 19 aa, Artificial Sequence
  Synthetic Polypeptide
ATNFSLLKQAGDVEENPGP

SEQ ID NO: 11927 - protein, 19 aa, Artificial Sequence
  Synthetic Polypeptide
ATNFSLLKQAGDVEQNPGP

SEQ ID NO: 11928 - protein, 20 aa, Artificial Sequence
  Synthetic Polypeptide
QCTNYALLKLAGDVESNPGP

SEQ ID NO: 11929 - protein, 4 aa, Artificial Sequence
  Synthetic Polypeptide
SGSG

SEQ ID NO: 11930 - protein, 4 aa, Artificial Sequence
  Synthetic Polypeptide
SGSG

SEQ ID NO: 11931 - protein, 4 aa, Artificial Sequence
  Synthetic Polypeptide
RAKR

SEQ ID NO: 11932 - protein, 4 aa, Artificial Sequence
  Synthetic Polypeptide
RAKR

SEQ ID NO: 11933 - protein, 4 aa, Artificial Sequence
  Synthetic Polypeptide
RAKR

SEQ ID NO: 11934 - protein, 622 aa, Artificial Sequence
  Synthetic Polypeptide
MALPVTALLLPLALLLHAARPDIQMTQSPSSLSASVGDRVTITCKASDHINNWLAWYQQKPGKAPKLLIYGATTLETGVPSRFSGSGSGTDFTLTISSLQPEDFATYYCQQSWNTPWTFGQGTKVEIKRLEDLKNVFPPEVAVFEPSEAEISHTQKATLVCLATGFYPDHVELSWWVNGKEVHSGVCTDPQPLKEQPALNDSRYCLSSRLRVSATFWQNPRNHFRCQVQFYGLSENDEWTQDRAKPVTQIVSAEAWGRADCGFTSESYQQGVLSATILYEILLGKATLYAVLVSALVLMAMVKRKDSRGRAKRSGSGATNFSLLKQAGDVEENPGPTSMDWIWRILFLVGAATGAHSFEEVQLVESGGGLVQPGGSLRLSCAASGYAFSSYWVNWVRQAPGKGLEWVAQIYPGDGDTNYNGKFKGRFTISRDNSKNTLYLQMNSLRAEDTAVYYCARSITTVVGCAMDYWGQGTLVTVSSTRIQNPDPAVYQLRDSKSSDKSVCLFTDFDSQTNVSQSKDSDVYITDKCVLDMRSMDFKSNSAVAWSNKSDFACANAFNNSIIPEDTFFPSPESSCDVKLVEKSFETDTNLNFQNLSVIGFRILLLKVAGFNLLMTLRLWSS

SEQ ID NO: 11935 - protein, 730 aa, Artificial Sequence
  Synthetic Polypeptide
MALPVTALLLPLALLLHAARPDIQMTQTTSSLSASLGDRVTISCRASQDISKYLNWYQQKPDGTVKLLIYHTSRLHSGVPSRFSGSGSGTDYSLTISNLEQEDIATYFCQQGNTLPYTFGGGTKLEITGGGGSGGGGSGGGGSEVKLQESGPGLVAPSQSLSVTCTVSGVSLPDYGVSWIRQPPRKGLEWLGVIWGSETTYYNSALKSRLTIIKDNSKSQVFLKMNSLQTDDTAIYYCAKHYYYGGSYAMDYWGQGTSVTVSSTRGGSGVFTLEDFVGDWRQTAGYNLDQVLEQGGVSSLFQNLGVSVTPIQRIVLSGENGLKIDIHVIIPYEGLSGDQMGQIEKIFKVVYPVDDHHFKVILHYGTLVIDGVTPNMIDYFGRPYEGIAVFDGKKITVTGTLWNGNKIIDERLINPDGSLLFRVTINGVTGWRLCERILALEGGSWSHPQFEKDYKDDDDKGSDYKDDDDKGSDYKDDDDKGSDYKDDDDKAWSHPQFEKHHHHHHHHTSGSGEGRGSLLTCGDVEENPGPHMTEYKPTVRLATRDDVPRAVRTLAAAFADYPATRHTVDPDRHIERVTELQELFLTRVGLDIGKVWVADDGAAVAVWTTPESVEAGAVFAEIGPRMAELSGSRLAAQQQMEGLLAPHRPKEPAWFLATVGVSPDHQGKGLGSAVVLPGVEAAERAGVPAFLETSAPRNLPFYERLGFTVTADVEVPEGPRTWCMTRKPGA

SEQ ID NO: 11936 - protein, 730 aa, Artificial Sequence
  Synthetic Polypeptide
MALPVTALLLPLALLLHAARPEIVMTQSPATLSLSPGERATLSCRASQDISKYLNWYQQKPGQAPRLLIYHTSRLHSGIPARFSGSGSGTDYTLTISSLQPEDFAVYFCQQGNTLPYTFGQGTKLEIKGGGGSGGGGSGGGGSQVQLQESGPGLVKPSETLSLTCTVSGVSLPDYGVSWIRQPPGKGLEWIGVIWGSETTYYNSSLKSRVTISKDNSKNQVSLKLSSVTAADTAVYYCAKHYYYGGSYAMDYWGQGTLVTVSSTRGGSGVFTLEDFVGDWRQTAGYNLDQVLEQGGVSSLFQNLGVSVTPIQRIVLSGENGLKIDIHVIIPYEGLSGDQMGQIEKIFKVVYPVDDHHFKVILHYGTLVIDGVTPNMIDYFGRPYEGIAVFDGKKITVTGTLWNGNKIIDERLINPDGSLLFRVTINGVTGWRLCERILALEGGSWSHPQFEKDYKDDDDKGSDYKDDDDKGSDYKDDDDKGSDYKDDDDKAWSHPQFEKHHHHHHHHTSGSGEGRGSLLTCGDVEENPGPHMTEYKPTVRLATRDDVPRAVRTLAAAFADYPATRHTVDPDRHIERVTELQELFLTRVGLDIGKVWVADDGAAVAVWTTPESVEAGAVFAEIGPRMAELSGSRLAAQQQMEGLLAPHRPKEPAWFLATVGVSPDHQGKGLGSAVVLPGVEAAERAGVPAFLETSAPRNLPFYERLGFTVTADVEVPEGPRTWCMTRKPGA

SEQ ID NO: 11937 - protein, 732 aa, Artificial Sequence
  Synthetic Polypeptide
MALPVTALLLPLALLLHAARPDIQMTQSPSSLSASVGDRVTITCSASQDISNYLNWYQQKPGKAPKLLIYYTSNLHSGVPSRFSGSGSGTDFTLTISSLQPEDFATYYCQQYRKLPWTFGQGTKLEIKRGGGGSGGGGSGGGGSQVQLVQSGAEVKKPGSSVKVSCKASGGTFSNYWMHWVRQAPGQGLEWMGATYRGHSDTYYNQKFKGRVTITADKSTSTAYMELSSLRSEDTAVYYCARGAIYDGYDVLDNWGQGTLVTVSSTRGGSGVFTLEDFVGDWRQTAGYNLDQVLEQGGVSSLFQNLGVSVTPIQRIVLSGENGLKIDIHVIIPYEGLSGDQMGQIEKIFKVVYPVDDHHFKVILHYGTLVIDGVTPNMIDYFGRPYEGIAVFDGKKITVTGTLWNGNKIIDERLINPDGSLLFRVTINGVTGWRLCERILALEGGSWSHPQFEKDYKDDDDKGSDYKDDDDKGSDYKDDDDKGSDYKDDDDKAWSHPQFEKHHHHHHHHTSGSGEGRGSLLTCGDVEENPGPHMTEYKPTVRLATRDDVPRAVRTLAAAFADYPATRHTVDPDRHIERVTELQELFLTRVGLDIGKVWVADDGAAVAVWTTPESVEAGAVFAEIGPRMAELSGSRLAAQQQMEGLLAPHRPKEPAWFLATVGVSPDHQGKGLGSAVVLPGVEAAERAGVPAFLETSAPRNLPFYERLGFTVTADVEVPEGPRTWCMTRKPGA

SEQ ID NO: 11938 - protein, 732 aa, Artificial Sequence
  Synthetic Polypeptide
MALPVTALLLPLALLLHAARPDIVLTQSPATLSLSPGDRATISCRASESVTILGSHLIYWYQQKPGQPPRLLIQLASNVQTGVPARFSGSGSRTDFTLTISSVEPEDFAVYYCLQSRTIPRTFGQGTKLEIKRGGGGSGGGGSGGGGSQVQLVQSGPEVKKPGESVKISCKASGYTFRHYSMNWVKQAPGQGLKWMGRINTESGVPIYADDFKGRFSFTVDTSASTAYLEISSLTSEDTAVYFCSNDYLYSLDFWGQGTTLTVSSTRGGSGVFTLEDFVGDWRQTAGYNLDQVLEQGGVSSLFQNLGVSVTPIQRIVLSGENGLKIDIHVIIPYEGLSGDQMGQIEKIFKVVYPVDDHHFKVILHYGTLVIDGVTPNMIDYFGRPYEGIAVFDGKKITVTGTLWNGNKIIDERLINPDGSLLFRVTINGVTGWRLCERILALEGGSWSHPQFEKDYKDDDDKGSDYKDDDDKGSDYKDDDDKGSDYKDDDDKAWSHPQFEKHHHHHHHHTSGSGEGRGSLLTCGDVEENPGPHMTEYKPTVRLATRDDVPRAVRTLAAAFADYPATRHTVDPDRHIERVTELQELFLTRVGLDIGKVWVADDGAAVAVWTTPESVEAGAVFAEIGPRMAELSGSRLAAQQQMEGLLAPHRPKEPAWFLATVGVSPDHQGKGLGSAVVLPGVEAAERAGVPAFLETSAPRNLPFYERLGFTVTADVEVPEGPRTWCMTRKPGA

SEQ ID NO: 11939 - protein, 733 aa, Artificial Sequence
  Synthetic Polypeptide
MALPVTALLLPLALLLHAARPDEIVLTQSPATLSLSPGERATLSCRASQSVSSYLAWYQQKPGQAPRLLIYDASNRATGIPARFSGSGSGTDFTLTISSLEPEDFAVYYCQQRSNWPITFGQGTRLEIKGGGGSGGGGSGGGGSEVQLVESGGGLVQPGRSLRLSCAASGFTFNDYAMHWVRQAPGKGLEWVSTISWNSGSIGYADSVKGRFTISRDNAKKSLYLQMNSLRAEDTALYYCAKDIQYGNYYYGMDVWGQGTTVTVSSTRGGSGVFTLEDFVGDWRQTAGYNLDQVLEQGGVSSLFQNLGVSVTPIQRIVLSGENGLKIDIHVIIPYEGLSGDQMGQIEKIFKVVYPVDDHHFKVILHYGTLVIDGVTPNMIDYFGRPYEGIAVFDGKKITVTGTLWNGNKIIDERLINPDGSLLFRVTINGVTGWRLCERILALEGGSWSHPQFEKDYKDDDDKGSDYKDDDDKGSDYKDDDDKGSDYKDDDDKAWSHPQFEKHHHHHHHHTSGSGEGRGSLLTCGDVEENPGPHMTEYKPTVRLATRDDVPRAVRTLAAAFADYPATRHTVDPDRHIERVTELQELFLTRVGLDIGKVWVADDGAAVAVWTTPESVEAGAVFAEIGPRMAELSGSRLAAQQQMEGLLAPHRPKEPAWFLATVGVSPDHQGKGLGSAVVLPGVEAAERAGVPAFLETSAPRNLPFYERLGFTVTADVEVPEGPRTWCMTRKPGA

SEQ ID NO: 11940 - protein, 5 aa, Artificial Sequence
  Synthetic Polypeptide
GGGGG

SEQ ID NO: 11941-11945 - skipped (5 entries)

SEQ ID NO: 11946 - protein, 744 aa, Artificial Sequence
  Synthetic Polypeptide
MDWIWRILFLVGAATGAHSQVQLVESGGGLVQPGGSLRLSCAASGFTFSNYGMSWVRQAPGKGLELVSSIRSDGSWTYYADSVKGRFTISRDISKNTLDLQMNSLRAEDTAVYYCARRYWSKSHASVTDYRGQGTLVTVSSGSGGGGSGGGGSFEQLQLQESGPGLVKPSETLSLTCTVSGGSVSSGSYYWGWIRQPPGKGLEWIGHISYSGSTYYNPSLKSRVTISVDTSRNQFSLKLSSVTAADTAVYYCARGRGYATSLAFDIRGQGTLVTVSSTRGGSGVFTLEDFVGDWRQTAGYNLDQVLEQGGVSSLFQNLGVSVTPIQRIVLSGENGLKIDIHVIIPYEGLSGDQMGQIEKIFKVVYPVDDHHFKVILHYGTLVIDGVTPNMIDYFGRPYEGIAVFDGKKITVTGTLWNGNKIIDERLINPDGSLLFRVTINGVTGWRLCERILALEGGSWSHPQFEKDYKDDDDKGSDYKDDDDKGSDYKDDDDKGSDYKDDDDKAWSHPQFEKHHHHHHHHTSGSGEGRGSLLTCGDVEENPGPHMTEYKPTVRLATRDDVPRAVRTLAAAFADYPATRHTVDPDRHIERVTELQELFLTRVGLDIGKVWVADDGAAVAVWTTPESVEAGAVFAEIGPRMAELSGSRLAAQQQMEGLLAPHRPKEPAWFLATVGVSPDHQGKGLGSAVVLPGVEAAERAGVPAFLETSAPRNLPFYERLGFTVTADVEVPEGPRTWCMTRKPGA

SEQ ID NO: 11947-11954 - skipped (8 entries)

SEQ ID NO: 11955 - protein, 734 aa, Artificial Sequence
  Synthetic Polypeptide
MALPVTALLLPLALLLHAARPEVQLVESGGGLVQPGGSLRLSCAASGFNIKDTCIGWVRRAPGKEEELVAKICKYSGHTRYADSVKGRFTISADTSKNTAYLQMNSLRAEDTAVYYCAAVSVRDGHYNYWGQGTTVTVSSGGGSGGGSEVQLVESGGGLVQPGGSLRLSCAASGFNIKDTCIGWVRRAPGKEEELVADICPYKGSTRYADSVKGRFTISADTSKNTAYLQMNSLRAEDTAVYYCAIVSARDGYYNYWGQGTTVTVSSTRGGSGVFTLEDFVGDWRQTAGYNLDQVLEQGGVSSLFQNLGVSVTPIQRIVLSGENGLKIDIHVIIPYEGLSGDQMGQIEKIFKVVYPVDDHHFKVILHYGTLVIDGVTPNMIDYFGRPYEGIAVFDGKKITVTGTLWNGNKIIDERLINPDGSLLFRVTINGVTGWRLCERILALEGGSWSHPQFEKDYKDDDDKGSDYKDDDDKGSDYKDDDDKGSDYKDDDDKAWSHPQFEKHHHHHHHHTSGSGEGRGSLLTCGDVEENPGPHMTEYKPTVRLATRDDVPRAVRTLAAAFADYPATRHTVDPDRHIERVTELQELFLTRVGLDIGKVWVADDGAAVAVWTTPESVEAGAVFAEIGPRMAELSGSRLAAQQQMEGLLAPHRPKEPAWFLATVGVSPDHQGKGLGSAVVLPGVEAAERAGVPAFLETSAPRNLPFYERLGFTVTADVEVPEGPRTWCMTRKPGA

SEQ ID NO: 11956 - protein, 607 aa, Artificial Sequence
  Synthetic Polypeptide
MALPVTALLLPLALLLHAARPEVQLVESGGGLVQPGGSLRLSCAASGFNIKDTCIGWVRRAPGKEEELVAKICKYSGHTRYADSVKGRFTISADTSKNTAYLQMNSLRAEDTAVYYCAAVSVRDGHYNYWGQGTTVTVSSTRGGSGVFTLEDFVGDWRQTAGYNLDQVLEQGGVSSLFQNLGVSVTPIQRIVLSGENGLKIDIHVIIPYEGLSGDQMGQIEKIFKVVYPVDDHHFKVILHYGTLVIDGVTPNMIDYFGRPYEGIAVFDGKKITVTGTLWNGNKIIDERLINPDGSLLFRVTINGVTGWRLCERILALEGGSWSHPQFEKDYKDDDDKGSDYKDDDDKGSDYKDDDDKGSDYKDDDDKAWSHPQFEKHHHHHHHHTSGSGEGRGSLLTCGDVEENPGPHMTEYKPTVRLATRDDVPRAVRTLAAAFADYPATRHTVDPDRHIERVTELQELFLTRVGLDIGKVWVADDGAAVAVWTTPESVEAGAVFAEIGPRMAELSGSRLAAQQQMEGLLAPHRPKEPAWFLATVGVSPDHQGKGLGSAVVLPGVEAAERAGVPAFLETSAPRNLPFYERLGFTVTADVEVPEGPRTWCMTRKPGA

SEQ ID NO: 11957 - protein, 734 aa, Artificial Sequence
  Synthetic Polypeptide
MALPVTALLLPLALLLHAARPEVQLVESGGGLVQPGGSLRLSCTFSGGTFSSYTMGWFRQAPGKEREFVAEVRWGGVTTYSNSLKDRFSISEDSVKNAVYLQMNSLKPEDTAVYYCAAVRQMYMTVVPDYWGQGTLVTVSSSGGGGSFEQLQLQESGPGLVKPSETLSLTCTVSGGSISSGDYYWGWIRQPPGKGLEWIGHIYYSGATYYNPSLKSRVTISVDTSRNQFSLKLSSVTAADTAVYYCTRDDSSNWRSRGQGTLVTVSSTRGGSGVFTLEDFVGDWRQTAGYNLDQVLEQGGVSSLFQNLGVSVTPIQRIVLSGENGLKIDIHVIIPYEGLSGDQMGQIEKIFKVVYPVDDHHFKVILHYGTLVIDGVTPNMIDYFGRPYEGIAVFDGKKITVTGTLWNGNKIIDERLINPDGSLLFRVTINGVTGWRLCERILALEGGSWSHPQFEKDYKDDDDKGSDYKDDDDKGSDYKDDDDKGSDYKDDDDKAWSHPQFEKHHHHHHHHTSGSGEGRGSLLTCGDVEENPGPHMTEYKPTVRLATRDDVPRAVRTLAAAFADYPATRHTVDPDRHIERVTELQELFLTRVGLDIGKVWVADDGAAVAVWTTPESVEAGAVFAEIGPRMAELSGSRLAAQQQMEGLLAPHRPKEPAWFLATVGVSPDHQGKGLGSAVVLPGVEAAERAGVPAFLETSAPRNLPFYERLGFTVTADVEVPEGPRTWCMTRKPGA

SEQ ID NO: 11958 - protein, 608 aa, Artificial Sequence
  Synthetic Polypeptide
MALPVTALLLPLALLLHAARPEVQLVESGGGLVQPGGSLRLSCTFSGGTFSSYTMGWFRQAPGKEREFVAEVRWGGVTTYSNSLKDRFSISEDSVKNAVYLQMNSLKPEDTAVYYCAAVRQMYMTVVPDYWGQGTLVTVSSTRGGSGVFTLEDFVGDWRQTAGYNLDQVLEQGGVSSLFQNLGVSVTPIQRIVLSGENGLKIDIHVIIPYEGLSGDQMGQIEKIFKVVYPVDDHHFKVILHYGTLVIDGVTPNMIDYFGRPYEGIAVFDGKKITVTGTLWNGNKIIDERLINPDGSLLFRVTINGVTGWRLCERILALEGGSWSHPQFEKDYKDDDDKGSDYKDDDDKGSDYKDDDDKGSDYKDDDDKAWSHPQFEKHHHHHHHHTSGSGEGRGSLLTCGDVEENPGPHMTEYKPTVRLATRDDVPRAVRTLAAAFADYPATRHTVDPDRHIERVTELQELFLTRVGLDIGKVWVADDGAAVAVWTTPESVEAGAVFAEIGPRMAELSGSRLAAQQQMEGLLAPHRPKEPAWFLATVGVSPDHQGKGLGSAVVLPGVEAAERAGVPAFLETSAPRNLPFYERLGFTVTADVEVPEGPRTWCMTRKPGA

SEQ ID NO: 11959 - protein, 746 aa, Artificial Sequence
  Synthetic Polypeptide
MALPVTALLLPLALLLHAARPEVQLVESGGGVVQPGRSLRLSCAASGFSFSGYGMHWVRQAPGKGLEWVAYISYDGSNKYYADSVKGRFTISRDNSKNTLYLQMNSLRAEDTAVYYCAKDPAWGLRLGESSSYDFDIWGQGTMVTVSSGSGGGGSGGGGSGGGGSFEVQLLESGGGLVQPGGSLRLSCAASGFSFSSYALSWVRQAPGKGLEWVSSIGENDGTTDYADAVKGRFTISRDNSKNTLYLQMNSLRVEDTAVYYCVKDGVHWGQGTLVTVSSTRGGSGVFTLEDFVGDWRQTAGYNLDQVLEQGGVSSLFQNLGVSVTPIQRIVLSGENGLKIDIHVIIPYEGLSGDQMGQIEKIFKVVYPVDDHHFKVILHYGTLVIDGVTPNMIDYFGRPYEGIAVFDGKKITVTGTLWNGNKIIDERLINPDGSLLFRVTINGVTGWRLCERILALEGGSWSHPQFEKDYKDDDDKGSDYKDDDDKGSDYKDDDDKGSDYKDDDDKAWSHPQFEKHHHHHHHHTSGSGEGRGSLLTCGDVEENPGPHMTEYKPTVRLATRDDVPRAVRTLAAAFADYPATRHTVDPDRHIERVTELQELFLTRVGLDIGKVWVADDGAAVAVWTTPESVEAGAVFAEIGPRMAELSGSRLAAQQQMEGLLAPHRPKEPAWFLATVGVSPDHQGKGLGSAVVLPGVEAAERAGVPAFLETSAPRNLPFYERLGFTVTADVEVPEGPRTWCMTRKPGA

SEQ ID NO: 11960 - protein, 615 aa, Artificial Sequence
  Synthetic Polypeptide
MALPVTALLLPLALLLHAARPEVQLVESGGGVVQPGRSLRLSCAASGFSFSGYGMHWVRQAPGKGLEWVAYISYDGSNKYYADSVKGRFTISRDNSKNTLYLQMNSLRAEDTAVYYCAKDPAWGLRLGESSSYDFDIWGQGTMVTVSSTRGGSGVFTLEDFVGDWRQTAGYNLDQVLEQGGVSSLFQNLGVSVTPIQRIVLSGENGLKIDIHVIIPYEGLSGDQMGQIEKIFKVVYPVDDHHFKVILHYGTLVIDGVTPNMIDYFGRPYEGIAVFDGKKITVTGTLWNGNKIIDERLINPDGSLLFRVTINGVTGWRLCERILALEGGSWSHPQFEKDYKDDDDKGSDYKDDDDKGSDYKDDDDKGSDYKDDDDKAWSHPQFEKHHHHHHHHTSGSGEGRGSLLTCGDVEENPGPHMTEYKPTVRLATRDDVPRAVRTLAAAFADYPATRHTVDPDRHIERVTELQELFLTRVGLDIGKVWVADDGAAVAVWTTPESVEAGAVFAEIGPRMAELSGSRLAAQQQMEGLLAPHRPKEPAWFLATVGVSPDHQGKGLGSAVVLPGVEAAERAGVPAFLETSAPRNLPFYERLGFTVTADVEVPEGPRTWCMTRKPGA

SEQ ID NO: 11961 - protein, 739 aa, Artificial Sequence
  Synthetic Polypeptide
MDWIWRILFLVGAATGAHSEVQLLESGGGLVQPGGSLRLSCAASGFSFSSYALSWVRQAPGKGLEWVSSIGENDGTTDYADAVKGRFTISRDNSKNTLYLQMNSLRVEDTAVYYCVKDGVHWGQGTLVTVSSGSGGGGSGGGGSFEVQLVESGGGVVQPGRSLRLSCAASGFSFSGYGMHWVRQAPGKGLEWVAYISYDGSNKYYADSVKGRFTISRDNSKNTLYLQMNSLRAEDTAVYYCAKDPAWGLRLGESSSYDFDIWGQGTMVTVSSTRGGSGVFTLEDFVGDWRQTAGYNLDQVLEQGGVSSLFQNLGVSVTPIQRIVLSGENGLKIDIHVIIPYEGLSGDQMGQIEKIFKVVYPVDDHHFKVILHYGTLVIDGVTPNMIDYFGRPYEGIAVFDGKKITVTGTLWNGNKIIDERLINPDGSLLFRVTINGVTGWRLCERILALEGGSWSHPQFEKDYKDDDDKGSDYKDDDDKGSDYKDDDDKGSDYKDDDDKAWSHPQFEKHHHHHHHHTSGSGEGRGSLLTCGDVEENPGPHMTEYKPTVRLATRDDVPRAVRTLAAAFADYPATRHTVDPDRHIERVTELQELFLTRVGLDIGKVWVADDGAAVAVWTTPESVEAGAVFAEIGPRMAELSGSRLAAQQQMEGLLAPHRPKEPAWFLATVGVSPDHQGKGLGSAVVLPGVEAAERAGVPAFLETSAPRNLPFYERLGFTVTADVEVPEGPRTWCMTRKPGA

SEQ ID NO: 11962 - protein, 599 aa, Artificial Sequence
  Synthetic Polypeptide
MDWIWRILFLVGAATGAHSEVQLLESGGGLVQPGGSLRLSCAASGFSFSSYALSWVRQAPGKGLEWVSSIGENDGTTDYADAVKGRFTISRDNSKNTLYLQMNSLRVEDTAVYYCVKDGVHWGQGTLVTVSSTRGGSGVFTLEDFVGDWRQTAGYNLDQVLEQGGVSSLFQNLGVSVTPIQRIVLSGENGLKIDIHVIIPYEGLSGDQMGQIEKIFKVVYPVDDHHFKVILHYGTLVIDGVTPNMIDYFGRPYEGIAVFDGKKITVTGTLWNGNKIIDERLINPDGSLLFRVTINGVTGWRLCERILALEGGSWSHPQFEKDYKDDDDKGSDYKDDDDKGSDYKDDDDKGSDYKDDDDKAWSHPQFEKHHHHHHHHTSGSGEGRGSLLTCGDVEENPGPHMTEYKPTVRLATRDDVPRAVRTLAAAFADYPATRHTVDPDRHIERVTELQELFLTRVGLDIGKVWVADDGAAVAVWTTPESVEAGAVFAEIGPRMAELSGSRLAAQQQMEGLLAPHRPKEPAWFLATVGVSPDHQGKGLGSAVVLPGVEAAERAGVPAFLETSAPRNLPFYERLGFTVTADVEVPEGPRTWCMTRKPGA

SEQ ID NO: 11963 - protein, 612 aa, Artificial Sequence
  Synthetic Polypeptide
MALPVTALLLPLALLLHAARPQLQLQESGPGLVKPSETLALTCNVSGGSISSSSYYWGWIRQPPGKRLEWIGSIYYSGSTYFNPSLKSRVTISVDTSKNQFSLKLSSVTAADTAVYYCAGGDYYGPVGQWPSDYRGQGTLVTVSSTRGGSGVFTLEDFVGDWRQTAGYNLDQVLEQGGVSSLFQNLGVSVTPIQRIVLSGENGLKIDIHVIIPYEGLSGDQMGQIEKIFKVVYPVDDHHFKVILHYGTLVIDGVTPNMIDYFGRPYEGIAVFDGKKITVTGTLWNGNKIIDERLINPDGSLLFRVTINGVTGWRLCERILALEGGSWSHPQFEKDYKDDDDKGSDYKDDDDKGSDYKDDDDKGSDYKDDDDKAWSHPQFEKHHHHHHHHTSGSGEGRGSLLTCGDVEENPGPHMTEYKPTVRLATRDDVPRAVRTLAAAFADYPATRHTVDPDRHIERVTELQELFLTRVGLDIGKVWVADDGAAVAVWTTPESVEAGAVFAEIGPRMAELSGSRLAAQQQMEGLLAPHRPKEPAWFLATVGVSPDHQGKGLGSAVVLPGVEAAERAGVPAFLETSAPRNLPFYERLGFTVTADVEVPEGPRTWCMTRKPGA

SEQ ID NO: 11964 - protein, 742 aa, Artificial Sequence
  Synthetic Polypeptide
MDWIWRILFLVGAATGAHSQLQLQESGPGLVKPSETLSLTCTVSGGSVSSSSYYWGWIRQPPGKRLELIGSIYYGGSTYFNPSLKSRVTISVDTSKNQFSLKLSSVTAADTAVYYCAGGDTYGPVGQWPSDYRGQGTLVTVSSGGGGSGGGSFEVQLLESGGGLVQPGGSLRLSCAASGFIFSIYAMSWVRQAPGKGLEWVSGISGSGVNTYYADSVKGRFIISRDNSRNTVYLQMNSLRADDTAVYHCANGKGWDGNTWYEDYRGQGTLVTVSSTRGGSGVFTLEDFVGDWRQTAGYNLDQVLEQGGVSSLFQNLGVSVTPIQRIVLSGENGLKIDIHVIIPYEGLSGDQMGQIEKIFKVVYPVDDHHFKVILHYGTLVIDGVTPNMIDYFGRPYEGIAVFDGKKITVTGTLWNGNKIIDERLINPDGSLLFRVTINGVTGWRLCERILALEGGSWSHPQFEKDYKDDDDKGSDYKDDDDKGSDYKDDDDKGSDYKDDDDKAWSHPQFEKHHHHHHHHTSGSGEGRGSLLTCGDVEENPGPHMTEYKPTVRLATRDDVPRAVRTLAAAFADYPATRHTVDPDRHIERVTELQELFLTRVGLDIGKVWVADDGAAVAVWTTPESVEAGAVFAEIGPRMAELSGSRLAAQQQMEGLLAPHRPKEPAWFLATVGVSPDHQGKGLGSAVVLPGVEAAERAGVPAFLETSAPRNLPFYERLGFTVTADVEVPEGPRTWCMTRKPGA

SEQ ID NO: 11965 - protein, 610 aa, Artificial Sequence
  Synthetic Polypeptide
MDWIWRILFLVGAATGAHSQLQLQESGPGLVKPSETLSLTCTVSGGSVSSSSYYWGWIRQPPGKRLELIGSIYYGGSTYFNPSLKSRVTISVDTSKNQFSLKLSSVTAADTAVYYCAGGDTYGPVGQWPSDYRGQGTLVTVSSTRGGSGVFTLEDFVGDWRQTAGYNLDQVLEQGGVSSLFQNLGVSVTPIQRIVLSGENGLKIDIHVIIPYEGLSGDQMGQIEKIFKVVYPVDDHHFKVILHYGTLVIDGVTPNMIDYFGRPYEGIAVFDGKKITVTGTLWNGNKIIDERLINPDGSLLFRVTINGVTGWRLCERILALEGGSWSHPQFEKDYKDDDDKGSDYKDDDDKGSDYKDDDDKGSDYKDDDDKAWSHPQFEKHHHHHHHHTSGSGEGRGSLLTCGDVEENPGPHMTEYKPTVRLATRDDVPRAVRTLAAAFADYPATRHTVDPDRHIERVTELQELFLTRVGLDIGKVWVADDGAAVAVWTTPESVEAGAVFAEIGPRMAELSGSRLAAQQQMEGLLAPHRPKEPAWFLATVGVSPDHQGKGLGSAVVLPGVEAAERAGVPAFLETSAPRNLPFYERLGFTVTADVEVPEGPRTWCMTRKPGA

SEQ ID NO: 11966 - protein, 609 aa, Artificial Sequence
  Synthetic Polypeptide
MALPVTALLLPLALLLHAARPEVQLLESGGGLVQPGGSLRLSCAASGFTFSSYAMSWVRQAPGKGLEWVSSISGSGDYIYYADSVKGRFTISRDISKNTLYLQMNSLRAEDTAVYYCAKEGTGANSSLADYRGQGTLVTVSSTRGGSGVFTLEDFVGDWRQTAGYNLDQVLEQGGVSSLFQNLGVSVTPIQRIVLSGENGLKIDIHVIIPYEGLSGDQMGQIEKIFKVVYPVDDHHFKVILHYGTLVIDGVTPNMIDYFGRPYEGIAVFDGKKITVTGTLWNGNKIIDERLINPDGSLLFRVTINGVTGWRLCERILALEGGSWSHPQFEKDYKDDDDKGSDYKDDDDKGSDYKDDDDKGSDYKDDDDKAWSHPQFEKHHHHHHHHTSGSGEGRGSLLTCGDVEENPGPHMTEYKPTVRLATRDDVPRAVRTLAAAFADYPATRHTVDPDRHIERVTELQELFLTRVGLDIGKVWVADDGAAVAVWTTPESVEAGAVFAEIGPRMAELSGSRLAAQQQMEGLLAPHRPKEPAWFLATVGVSPDHQGKGLGSAVVLPGVEAAERAGVPAFLETSAPRNLPFYERLGFTVTADVEVPEGPRTWCMTRKPGA

SEQ ID NO: 11967 - protein, 606 aa, Artificial Sequence
  Synthetic Polypeptide
MALPVTALLLPLALLLHAARPQVQLVESGGGLVQPGGSLRLSCAASGFTFTNHAMSWVRQAPGKGLELVSSISGNGRTTYYADSVKGRFTISRDISKNTLDLQMNSLRAEDTAVYYCAKDGGETLVDSRGQGTLVTVSSTRGGSGVFTLEDFVGDWRQTAGYNLDQVLEQGGVSSLFQNLGVSVTPIQRIVLSGENGLKIDIHVIIPYEGLSGDQMGQIEKIFKVVYPVDDHHFKVILHYGTLVIDGVTPNMIDYFGRPYEGIAVFDGKKITVTGTLWNGNKIIDERLINPDGSLLFRVTINGVTGWRLCERILALEGGSWSHPQFEKDYKDDDDKGSDYKDDDDKGSDYKDDDDKGSDYKDDDDKAWSHPQFEKHHHHHHHHTSGSGEGRGSLLTCGDVEENPGPHMTEYKPTVRLATRDDVPRAVRTLAAAFADYPATRHTVDPDRHIERVTELQELFLTRVGLDIGKVWVADDGAAVAVWTTPESVEAGAVFAEIGPRMAELSGSRLAAQQQMEGLLAPHRPKEPAWFLATVGVSPDHQGKGLGSAVVLPGVEAAERAGVPAFLETSAPRNLPFYERLGFTVTADVEVPEGPRTWCMTRKPGA

SEQ ID NO: 11968 - protein, 734 aa, Artificial Sequence
  Synthetic Polypeptide
MALPVTALLLPLALLLHAARPQLQLQESGPGLVKPSETLSLTCTVSGDSISSGDYYWGWIRQPPGKGLEWIGHIYYSGVTYYNPSLKSRVTISVDTSRNQFSLKLSSVTAADTAVYYCTREDSSNWRSRGQGTLVTVSSLESGGGGSFEVQLLESGGGLIQPGGSLRLSCAASGFTFSSHAMTWVRQAPGKGLEWVSAISGSGDYTHYADSVKGRFTISRDNSKNTVYLQMNSLRAEDSAVYYCAKDEDGGSLLGHRGQGTLVTVSSTRGGSGVFTLEDFVGDWRQTAGYNLDQVLEQGGVSSLFQNLGVSVTPIQRIVLSGENGLKIDIHVIIPYEGLSGDQMGQIEKIFKVVYPVDDHHFKVILHYGTLVIDGVTPNMIDYFGRPYEGIAVFDGKKITVTGTLWNGNKIIDERLINPDGSLLFRVTINGVTGWRLCERILALEGGSWSHPQFEKDYKDDDDKGSDYKDDDDKGSDYKDDDDKGSDYKDDDDKAWSHPQFEKHHHHHHHHTSGSGEGRGSLLTCGDVEENPGPHMTEYKPTVRLATRDDVPRAVRTLAAAFADYPATRHTVDPDRHIERVTELQELFLTRVGLDIGKVWVADDGAAVAVWTTPESVEAGAVFAEIGPRMAELSGSRLAAQQQMEGLLAPHRPKEPAWFLATVGVSPDHQGKGLGSAVVLPGVEAAERAGVPAFLETSAPRNLPFYERLGFTVTADVEVPEGPRTWCMTRKPGA

SEQ ID NO: 11969 - protein, 332 aa, Artificial Sequence
  Synthetic Polypeptide
MALPVTALLLPLALLLHAARPWSHPQFEKGSGEFRVQPTESIVRFPNITNLCPFGEVFNATRFASVYAWNRKRISNCVADYSVLYNSASFSTFKCYGVSPTKLNDLCFTNVYADSFVIRGDEVRQIAPGQTGKIADYNYKLPDDFTGCVIAWNSNNLDSKVGGNYNYLYRLFRKSNLKPFERDISTEIYQAGSTPCNGVEGFNCYFPLQSYGFQPTNGVGYQPYRVVVLSFELLHAPATVCGPKKSTNLVKNKCVNFTRTTTKPVLRTPSPVHPTGTSQPQRPEDCRPRGSVKGTGLDFACDIYIWAPLAGICVAPLLSLIITLICYHRSLE

SEQ ID NO: 11970 - protein, 675 aa, Artificial Sequence
  Synthetic Polypeptide
MPSWALFMVTSCLLLAPQNLAQVSSQDVSLLASDSEPLKCFSRTFEDLTCFWDEEEAAPSGTYQLLYAYPREKPRACPLSSQSMPHFGTRYVCQFPDQEEVRLFFPLHLWVKNVFLNQTRTQRVLFVDSVGLPAPPSIIKAMGGSQPGELQISWEEPAPEISDFLRYELRYGPRDPKNSTGPTVIQLIATETCCPALQRPHSASALDQSPCAQPTMPWQDGPKQTSPSREASALTAEGGSCLISGLQPGNSYWLQLRSEPDGISLGGSWGSWSLPVTVDLPGDAVALGLQCFTLDLKNVTCQWQQQDHASSQGFFYHSRARCCPRDRYPIWENCEEEEKTNPGLQTPQFSRCHFKSRNDSIIHILVEVTTAPGTVHSYLGSPFWIHQAVRLPTPNLHWREISSGHLELEWQHPSSWAAQETCYQLRYTGEGHQDWKVLEPPLGARGGTLELRPRSRYRLQLRARLNGPTYQGPWSSWSDPTRVETATETATRGGSGVFTLEDFVGDWRQTAGYNLDQVLEQGGVSSLFQNLGVSVTPIQRIVLSGENGLKIDIHVIIPYEGLSGDQMGQIEKIFKVVYPVDDHHFKVILHYGTLVIDGVTPNMIDYFGRPYEGIAVFDGKKITVTGTLWNGNKIIDERLINPDGSLLFRVTINGVTGWRLCERILASWKDASGWS

SEQ ID NO: 11971 - protein, 483 aa, Artificial Sequence
  Synthetic Polypeptide
MPPPRLLFFLLFLTPMEVRPDYKDDDDKEEPLVVKVEEGDNAVLQCLKGTSDGPTQQLTWSRESPLKPFLKLSLGLPGLGIHMRPLAIWLFIFNVSQQMGGFYLCQPGPPSEKAWQPGWTVNVEGSGELFRWNVSDLGGLGCGLKNRSSEGPSSPSGKLMSPKLYVWAKDRPEIWEGEPPCLPPRDSLNQSLSQDLTMAPGSTLWLSCGVPPDSVSRGPLSWTHVHPKGPKSLLSLELKDDRPARDMWVMETGLLLPRATAQDAGKYYCHRGNLTMSFHLEITARPVLWHWLLRTGGWTRGGSGVFTLEDFVGDWRQTAGYNLDQVLEQGGVSSLFQNLGVSVTPIQRIVLSGENGLKIDIHVIIPYEGLSGDQMGQIEKIFKVVYPVDDHHFKVILHYGTLVIDGVTPNMIDYFGRPYEGIAVFDGKKITVTGTLWNGNKIIDERLINPDGSLLFRVTINGVTGWRLCERILASWKDASGWS

SEQ ID NO: 11972 - protein, 765 aa, Artificial Sequence
  Synthetic Polypeptide
MPPPRLLFFLLFLTPMEVRPDYKDDDDKEEPLVVKVEEGDNAVLQCLKGTSDGPTQQLTWSRESPLKPFLKLSLGLPGLGIHMRPLAIWLFIFNVSQQMGGFYLCQPGPPSEKAWQPGWTVNVEGSGELFRWNVSDLGGLGCGLKNRSSEGPSSPSGKLMSPKLYVWAKDRPEIWEGEPPCLPPRDSLNQSLSQDLTMAPGSTLWLSCGVPPDSVSRGPLSWTHVHPKGPKSLLSLELKDDRPARDMWVMETGLLLPRATAQDAGKYYCHRGNLTMSFHLEITARPVLWHWLLRTGGWTRGGSGVFTLEDFVGDWRQTAGYNLDQVLEQGGVSSLFQNLGVSVTPIQRIVLSGENGLKIDIHVIIPYEGLSGDQMGQIEKIFKVVYPVDDHHFKVILHYGTLVIDGVTPNMIDYFGRPYEGIAVFDGKKITVTGTLWNGNKIIDERLINPDGSLLFRVTINGVTGWRLCERILALEGGSWSHPQFEKDYKDDDDKGSDYKDDDDKGSDYKDDDDKGSDYKDDDDKAWSHPQFEKHHHHHHHHTSGSGEGRGSLLTCGDVEENPGPHMTEYKPTVRLATRDDVPRAVRTLAAAFADYPATRHTVDPDRHIERVTELQELFLTRVGLDIGKVWVADDGAAVAVWTTPESVEAGAVFAEIGPRMAELSGSRLAAQQQMEGLLAPHRPKEPAWFLATVGVSPDHQGKGLGSAVVLPGVEAAERAGVPAFLETSAPRNLPFYERLGFTVTADVEVPEGPRTWCMTRKPGA

SEQ ID NO: 11973 - protein, 719 aa, Artificial Sequence
  Synthetic Polypeptide
MPLLLLLPLLWAGALAMDPNFWLQVQESVTVQEGLCVLVPCTFFHPIPYYDKNSPVHGYWFREGAIISGDSPVATNKLDQEVQEETQGRFRLLGDPSRNNCSLSIVDARRRDNGSYFFRMERGSTKYSYKSPQLSVHVTDLTHRPKILIPGTLEPGHSKNLTCSVSWACEQGTPPIFSWLSAAPTSLGPRTTHSSVLIITPRPQDHGTNLTCQVKFAGAGVTTERTIQLNVTYVPQNPTTGIFPGDGSGKQETRGGSGVFTLEDFVGDWRQTAGYNLDQVLEQGGVSSLFQNLGVSVTPIQRIVLSGENGLKIDIHVIIPYEGLSGDQMGQIEKIFKVVYPVDDHHFKVILHYGTLVIDGVTPNMIDYFGRPYEGIAVFDGKKITVTGTLWNGNKIIDERLINPDGSLLFRVTINGVTGWRLCERILALEGGSWSHPQFEKDYKDDDDKGSDYKDDDDKGSDYKDDDDKGSDYKDDDDKAWSHPQFEKHHHHHHHHTSGSGEGRGSLLTCGDVEENPGPHMTEYKPTVRLATRDDVPRAVRTLAAAFADYPATRHTVDPDRHIERVTELQELFLTRVGLDIGKVWVADDGAAVAVWTTPESVEAGAVFAEIGPRMAELSGSRLAAQQQMEGLLAPHRPKEPAWFLATVGVSPDHQGKGLGSAVVLPGVEAAERAGVPAFLETSAPRNLPFYERLGFTVTADVEVPEGPRTWCMTRKPGA

SEQ ID NO: 11974 - protein, 695 aa, Artificial Sequence
  Synthetic Polypeptide
MPLLLLLPLLWAGALAMDPNFWLQVQESVTVQEGLCVLVPCTFFHPIPYYDKNSPVHGYWFREGAIISGDSPVATNKLDQEVQEETQGRFRLLGDPSRNNCSLSIVDARRRDNGSYFFRMERGSTKYSYKSPQLSVHVTDLTHRPKILIPGTLEPGHSKNLTCSVSWACEQGTPPIFSWLSAAPTSLGPRTTHSSVLIITPRPQDHGTNLTCQVKFAGAGVTTERTIQLNVTYVPQNPTTGIFPGDGSGKQETRGGSEAEAERGKLPGKKLPLEVLIELEANARKAGCTRGCLICLSKIKCTAKMKKYIPGRCADYGGDKKTGQAGIVGAIVDIPEISGFKEMEPMEQFIAQVDRCADCTTGCLKGLANVKCSDLLKKWLPGRCATFADKIQSEVDNIKGLAGDLEGGSWSHPQFEKDYKDDDDKGSDYKDDDDKGSDYKDDDDKGSDYKDDDDKAWSHPQFEKHHHHHHHHTSGSGEGRGSLLTCGDVEENPGPHMTEYKPTVRLATRDDVPRAVRTLAAAFADYPATRHTVDPDRHIERVTELQELFLTRVGLDIGKVWVADDGAAVAVWTTPESVEAGAVFAEIGPRMAELSGSRLAAQQQMEGLLAPHRPKEPAWFLATVGVSPDHQGKGLGSAVVLPGVEAAERAGVPAFLETSAPRNLPFYERLGFTVTADVEVPEGPRTWCMTRKPGA

SEQ ID NO: 11975 - protein, 729 aa, Artificial Sequence
  Synthetic Polypeptide
MPLLLLLPLLWAGALAMDPNFWLQVQESVTVQEGLCVLVPCTFFHPIPYYDKNSPVHGYWFREGAIISGDSPVATNKLDQEVQEETQGRFRLLGDPSRNNCSLSIVDARRRDNGSYFFRMERGSTKYSYKSPQLSVHVTDLTHRPKILIPGTLEPGHSKNLTCSVSWACEQGTPPIFSWLSAAPTSLGPRTTHSSVLIITPRPQDHGTNLTCQVKFAGAGVTTERTIQLNVTYVPQNPTTGIFPGDGSGKQETRGGSQPTENKQESQIEDIDRSTSLGLMCYEQCTGQSGLDLKCYKECADFTGDRNRGRKLPGKKLPLEVLKIMEANARRAGCTRGCLICLSKIKCTAKMKQYIPGRCHTYEGDKSIGQGGIGGPIVDIPEIIGFQNMEPMEQFIAQVDLCADCTTGCLKGLANVRCNDLLKKWLPDRCAGFANKIQSEVDNIKGLAGDRLEYPYDVPDYAWSHPQFEKYPYDVPDYAGYPYDVPDYAGYPYDVPDYHHHHHHHHTSGSGEGRGSLLTCGDVEENPGPHMTEYKPTVRLATRDDVPRAVRTLAAAFADYPATRHTVDPDRHIERVTELQELFLTRVGLDIGKVWVADDGAAVAVWTTPESVEAGAVFAEIGPRMAELSGSRLAAQQQMEGLLAPHRPKEPAWFLATVGVSPDHQGKGLGSAVVLPGVEAAERAGVPAFLETSAPRNLPFYERLGFTVTADVEVPEGPRTWCMTRKPGA

SEQ ID NO: 11976 - protein, 461 aa, Artificial Sequence
  Synthetic Polypeptide
MPLLLLLPLLWAGALAMDPNFWLQVQESVTVQEGLCVLVPCTFFHPIPYYDKNSPVHGYWFREGAIISGDSPVATNKLDQEVQEETQGRFRLLGDPSRNNCSLSIVDARRRDNGSYFFRMERGSTKYSYKSPQLSVHVTDLTHRPKILIPGTLEPGHSKNLTCSVSWACEQGTPPIFSWLSAAPTSLGPRTTHSSVLIITPRPQDHGTNLTCQVKFAGAGVTTERTIQLNVTYVPQNPTTGIFPGDGSGKQETRGGSAASEEADDDHVSLVKNYWRIGVGNERDVSLDRGGPPKLSKELLAEMHAIASNAGCSRVCLIGLSKIKCTPKMKTFLPGRCNTFAPKPATGDGPFAAAAAIPGFSDLTAMEQYKAQVAQCDCSNRCLVGLANIKCSAALKAALPQRCTTFATNIQKEGEVDSIKGYGRKLETDFYDYKDDDDKDYKDDDDKVETDFYDYKDDDDK

SEQ ID NO: 11977 - protein, 708 aa, Artificial Sequence
  Synthetic Polypeptide
MRRAALWLWLCALALSLQPALPQIVATNLPPEDQDGSGDDSDNFSGSGAGALQDITLSQQTPSTWKDTQLLTAIPTSPEPTGLEATAASTSTLPAGEGPKEGEAVVLPEVEPGLTAREQEATPRPRETTQLPTTHQASTTTATTAQEPATSHPHRDMQPGHHETSTPAGPSQADLHTPHTEDGGPSATERAAEDGASSQLPAAEGSGEQDFTFETSGENTAVVAVEPDRRNQSPVDQGATGTRGGSGVFTLEDFVGDWRQTAGYNLDQVLEQGGVSSLFQNLGVSVTPIQRIVLSGENGLKIDIHVIIPYEGLSGDQMGQIEKIFKVVYPVDDHHFKVILHYGTLVIDGVTPNMIDYFGRPYEGIAVFDGKKITVTGTLWNGNKIIDERLINPDGSLLFRVTINGVTGWRLCERILALEGGSWSHPQFEKDYKDDDDKGSDYKDDDDKGSDYKDDDDKGSDYKDDDDKAWSHPQFEKHHHHHHHHTSGSGEGRGSLLTCGDVEENPGPHMTEYKPTVRLATRDDVPRAVRTLAAAFADYPATRHTVDPDRHIERVTELQELFLTRVGLDIGKVWVADDGAAVAVWTTPESVEAGAVFAEIGPRMAELSGSRLAAQQQMEGLLAPHRPKEPAWFLATVGVSPDHQGKGLGSAVVLPGVEAAERAGVPAFLETSAPRNLPFYERLGFTVTADVEVPEGPRTWCMTRKPGA

SEQ ID NO: 11978 - protein, 767 aa, Artificial Sequence
  Synthetic Polypeptide
MVLLWLTLLLIALPCLLQTKEDPNPPITNLRMKAKAQQLTWDLNRNVTDIECVKDADYSMPAVNNSYCQFGAISLCEVTNYTVRVANPPFSTWILFPENSGKPWAGAENLTCWIHDVDFLSCSWAVGPGAPADVQYDLYLNVANRRQQYECLHYKTDAQGTRIGCRFDDISRLSSGSQSSHILVRGRSAAFGIPCTDKFVVFSQIEILTPPNMTAKCNKTHSFMHWKMRSHFNRKFRYELQIQKRMQPVITEQVRDRTSFQLLNPGTYTVQIRARERVYEFLSAWSTPQRFECDQEEGANTRGGSGVFTLEDFVGDWRQTAGYNLDQVLEQGGVSSLFQNLGVSVTPIQRIVLSGENGLKIDIHVIIPYEGLSGDQMGQIEKIFKVVYPVDDHHFKVILHYGTLVIDGVTPNMIDYFGRPYEGIAVFDGKKITVTGTLWNGNKIIDERLINPDGSLLFRVTINGVTGWRLCERILALEGGSWSHPQFEKDYKDDDDKGSDYKDDDDKGSDYKDDDDKGSDYKDDDDKAWSHPQFEKHHHHHHHHTSGSGEGRGSLLTCGDVEENPGPHMTEYKPTVRLATRDDVPRAVRTLAAAFADYPATRHTVDPDRHIERVTELQELFLTRVGLDIGKVWVADDGAAVAVWTTPESVEAGAVFAEIGPRMAELSGSRLAAQQQMEGLLAPHRPKEPAWFLATVGVSPDHQGKGLGSAVVLPGVEAAERAGVPAFLETSAPRNLPFYERLGFTVTADVEVPEGPRTWCMTRKPGA

SEQ ID NO: 11979 - protein, 1176 aa, Artificial Sequence
  Synthetic Polypeptide
MGPWSRSLSALLLLLQVSSWLCQEPEPCHPGFDAESYTFTVPRRHLERGRVLGRVNFEDCTGRQRTAYFSLDTRFKVGTDGVITVKRPLRFHNPQIHFLVYAWDSTYRKFSTKVTLNTVGHHHRPPPHQASVSGIQAELLTFPNSSPGLRRQKRDWVIPPISCPENEKGPFPKNLVQIKSNKDKEGKVFYSITGQGADTPPVGVFIIERETGWLKVTEPLDRERIATYTLFSHAVSSNGNAVEDPMEILITVTDQNDNKPEFTQEVFKGSVMEGALPGTSVMEVTATDADDDVNTYNAAIAYTILSQDPELPDKNMFTINRNTGVISVVTTGLDRESFPTYTLVVQAADLQGEGLSTTATAVITVTDTNDNPPIFNPTTYKGQVPENEANVVITTLKVTDADAPNTPAWEAVYTILNDDGGQFVVTTNPVNNDGILKTAKGLDFEAKQQYILHVAVTNVVPFEVSLTTSTATVTVDVLDVNEAPIFVPPEKRVEVSEDFGVGQEITSYTAQEPDTFMEQKITYRIWRDTANWLEINPDTGAISTRAELDREDFEHVKNSTYTALIIATDNGSPVATGTGTLLLILSDVNDNAPIPEPRTIFFCERNPKPQVINIIDADLPPNTSPFTAELTHGASANWTIQYNDPTQESIILKPKMALEVGDYKINLKLMDNQNKDQVTTLEVSVCDCEGAAGVCRKAQPVEAGLQIPATRGGSGVFTLEDFVGDWRQTAGYNLDQVLEQGGVSSLFQNLGVSVTPIQRIVLSGENGLKIDIHVIIPYEGLSGDQMGQIEKIFKVVYPVDDHHFKVILHYGTLVIDGVTPNMIDYFGRPYEGIAVFDGKKITVTGTLWNGNKIIDERLINPDGSLLFRVTINGVTGWRLCERILALEGGSWSHPQFEKDYKDDDDKGSDYKDDDDKGSDYKDDDDKGSDYKDDDDKAWSHPQFEKHHHHHHHHTSGSGEGRGSLLTCGDVEENPGPHMTEYKPTVRLATRDDVPRAVRTLAAAFADYPATRHTVDPDRHIERVTELQELFLTRVGLDIGKVWVADDGAAVAVWTTPESVEAGAVFAEIGPRMAELSGSRLAAQQQMEGLLAPHRPKEPAWFLATVGVSPDHQGKGLGSAVVLPGVEAAERAGVPAFLETSAPRNLPFYERLGFTVTADVEVPEGPRTWCMTRKPGA

SEQ ID NO: 11980 - protein, 706 aa, Artificial Sequence
  Synthetic Polypeptide
MSAPRLLISIIIMVSASSSSCMGGKQMTQNYSTIFAEGNISQPVLMDINAVLCCPPIALRNLIIITWEIILRGQPSCTKAYKKETNETKETNCTVERITWVSRPDQNSDLQILPVDTTHDGYYRGIVVTPDGNFHRGYHLQVLVTPEVNLFQSRNITAVCKAVTGKPAAQISWIPEGSILATKQEYWGNGTVTVKSTCPWEGHKSTVTCHVSHLTGNKSLSVKLNSGLRTSGSPALSLLTRGGSGVFTLEDFVGDWRQTAGYNLDQVLEQGGVSSLFQNLGVSVTPIQRIVLSGENGLKIDIHVIIPYEGLSGDQMGQIEKIFKVVYPVDDHHFKVILHYGTLVIDGVTPNMIDYFGRPYEGIAVFDGKKITVTGTLWNGNKIIDERLINPDGSLLFRVTINGVTGWRLCERILALEGGSWSHPQFEKDYKDDDDKGSDYKDDDDKGSDYKDDDDKGSDYKDDDDKAWSHPQFEKHHHHHHHHTSGSGEGRGSLLTCGDVEENPGPHMTEYKPTVRLATRDDVPRAVRTLAAAFADYPATRHTVDPDRHIERVTELQELFLTRVGLDIGKVWVADDGAAVAVWTTPESVEAGAVFAEIGPRMAELSGSRLAAQQQMEGLLAPHRPKEPAWFLATVGVSPDHQGKGLGSAVVLPGVEAAERAGVPAFLETSAPRNLPFYERLGFTVTADVEVPEGPRTWCMTRKPGA

SEQ ID NO: 11981 - protein, 955 aa, Artificial Sequence
  Synthetic Polypeptide
MECLYYFLGFLLLAARLPLDAAKRFHDVLGNERPSAYMREHNQLNGWSSDENDWNEKLYPVWKRGDMRWKNSWKGGRVQAVLTSDSPALVGSNITFAVNLIFPRCQKEDANGNIVYEKNCRNEAGLSADPYVYNWTAWSEDSDGENGTGQSHHNVFPDGKPFPHHPGWRRWNFIYVFHTLGQYFQKLGRCSVRVSVNTANVTLGPQLMEVTVYRRHGRAYVPIAQVKDVYVVTDQIPVFVTMFQKNDRNSSDETFLKDLPIMFDVLIHDPSHFLNYSTINYKWSFGDNTGLFVSTNHTVNHTYVLNGTFSLNLTVKAAAPGPCPPPPPPPRPSKPTPSLGPAGDNPLELSRIPDENCQINRYGHFQATITIVEGILEVNIIQMTDVLMPVPWPESSLIDFVVTCQGSIPTEVCTIISDPTCEITQNTVCSPVDVDEMCLLTVRRTFNGSGTYCVNLTLGDDTSLALTSTLISVPDRDPASPLRMANSATRGGSGVFTLEDFVGDWRQTAGYNLDQVLEQGGVSSLFQNLGVSVTPIQRIVLSGENGLKIDIHVIIPYEGLSGDQMGQIEKIFKVVYPVDDHHFKVILHYGTLVIDGVTPNMIDYFGRPYEGIAVFDGKKITVTGTLWNGNKIIDERLINPDGSLLFRVTINGVTGWRLCERILALEGGSWSHPQFEKDYKDDDDKGSDYKDDDDKGSDYKDDDDKGSDYKDDDDKAWSHPQFEKHHHHHHHHTSGSGEGRGSLLTCGDVEENPGPHMTEYKPTVRLATRDDVPRAVRTLAAAFADYPATRHTVDPDRHIERVTELQELFLTRVGLDIGKVWVADDGAAVAVWTTPESVEAGAVFAEIGPRMAELSGSRLAAQQQMEGLLAPHRPKEPAWFLATVGVSPDHQGKGLGSAVVLPGVEAAERAGVPAFLETSAPRNLPFYERLGFTVTADVEVPEGPRTWCMTRKPGA

SEQ ID NO: 11982 - protein, 1131 aa, Artificial Sequence
  Synthetic Polypeptide
MGAARGSPARPRRLPLLSVLLLPLLGGTQTAIVFIKQPSSQDALQGRRALLRCEVEAPGPVHVYWLLDGAPVQDTERRFAQGSSLSFAAVDRLQDSGTFQCVARDDVTGEEARSANASFNIKWIEAGPVVLKHPASEAEIQPQTQVTLRCHIDGHPRPTYQWFRDGTPLSDGQSNHTVSSKERNLTLRPAGPEHSGLYSCCAHSAFGQACSSQNFTLSIADESFARVVLAPQDVVVARYEEAMFHCQFSAQPPPSLQWLFEDETPITNRSRPPHLRRATVFANGSLLLTQVRPRNAGIYRCIGQGQRGPPIILEATLHLAEIEDMPLFEPRVFTAGSEERVTCLPPKGLPEPSVWWEHAGVRLPTHGRVYQKGHELVLANIAESDAGVYTCHAANLAGQRRQDVNITVATVPSWLKKPQDSQLEEGKPGYLDCLTQATPKPTVVWYRNQMLISEDSRFEVFKNGTLRINSVEVYDGTWYRCMSSTPAGSIEAQARVQVLDGSSLPEWVTDNAGTLHFARVTRDDAGNYTCIASNGPQGQIRAHVQLTVAVFITFKVEPERTTVYQGHTALLQCEAQGDPKPLIQWKGKDRILDPTKLGPRMHIFQNGSLVIHDVAPEDSGRYTCIAGNSCNIKHTEAPLYVVDKPVPEESEGPGSPPPYKMIQTTRGGSGVFTLEDFVGDWRQTAGYNLDQVLEQGGVSSLFQNLGVSVTPIQRIVLSGENGLKIDIHVIIPYEGLSGDQMGQIEKIFKVVYPVDDHHFKVILHYGTLVIDGVTPNMIDYFGRPYEGIAVFDGKKITVTGTLWNGNKIIDERLINPDGSLLFRVTINGVTGWRLCERILALEGGSWSHPQFEKDYKDDDDKGSDYKDDDDKGSDYKDDDDKGSDYKDDDDKAWSHPQFEKHHHHHHHHTSGSGEGRGSLLTCGDVEENPGPHMTEYKPTVRLATRDDVPRAVRTLAAAFADYPATRHTVDPDRHIERVTELQELFLTRVGLDIGKVWVADDGAAVAVWTTPESVEAGAVFAEIGPRMAELSGSRLAAQQQMEGLLAPHRPKEPAWFLATVGVSPDHQGKGLGSAVVLPGVEAAERAGVPAFLETSAPRNLPFYERLGFTVTADVEVPEGPRTWCMTRKPGA

SEQ ID NO: 11983 - protein, 757 aa, Artificial Sequence
  Synthetic Polypeptide
MLVRRGARAGPRMPRGWTALCLLSLLPSGFMSLDNNGTATPELPTQGTFSNVSTNVSYQETTTPSTLGSTSLHPVSQHGNEATTNITETTVKFTSTSVITSVYGNTNSSVQSQTSVISTVFTTPANVSTPETTLKPSLSPGNVSDLSTTSTSLATSPTKPYTSSSPILSDIKAEIKCSGIREVKLTQGICLEQNKTSSCAEFKKDRGEGLARVLCGEEQADADAGAQVCSLLLAQSEVRPQCLLLVLANRTEISSKLQLMKKHQSDLKKLGILDFTEQDVASHQSYSQKTTRGGSGVFTLEDFVGDWRQTAGYNLDQVLEQGGVSSLFQNLGVSVTPIQRIVLSGENGLKIDIHVIIPYEGLSGDQMGQIEKIFKVVYPVDDHHFKVILHYGTLVIDGVTPNMIDYFGRPYEGIAVFDGKKITVTGTLWNGNKIIDERLINPDGSLLFRVTINGVTGWRLCERILALEGGSWSHPQFEKDYKDDDDKGSDYKDDDDKGSDYKDDDDKGSDYKDDDDKAWSHPQFEKHHHHHHHHTSGSGEGRGSLLTCGDVEENPGPHMTEYKPTVRLATRDDVPRAVRTLAAAFADYPATRHTVDPDRHIERVTELQELFLTRVGLDIGKVWVADDGAAVAVWTTPESVEAGAVFAEIGPRMAELSGSRLAAQQQMEGLLAPHRPKEPAWFLATVGVSPDHQGKGLGSAVVLPGVEAAERAGVPAFLETSAPRNLPFYERLGFTVTADVEVPEGPRTWCMTRKPGA

SEQ ID NO: 11984 - protein, 735 aa, Artificial Sequence
  Synthetic Polypeptide
MAPPQVLAFGLLLAAATATFAAAQEECVCENYKLAVNCFVNNNRQCQCTSVGAQNTVICSKLAAKCLVMKAEMNGSKLGRRAKPEGALQNNDGLYDPDCDESGLFKAKQCNGTSTCWCVNTAGVRRTDKDTEITCSERVRTYWIIIELKHKAREKPYDSKSLRTALQKEITTRYQLDPKFITSILYENNVITIDLVQNSSQKTQNDVDIADVAYYFEKDVKGESLFHSKKMDLTVNGEQLDLDPGQTLIYYVDEKAPEFSMQGLKQARTRGGSGVFTLEDFVGDWRQTAGYNLDQVLEQGGVSSLFQNLGVSVTPIQRIVLSGENGLKIDIHVIIPYEGLSGDQMGQIEKIFKVVYPVDDHHFKVILHYGTLVIDGVTPNMIDYFGRPYEGIAVFDGKKITVTGTLWNGNKIIDERLINPDGSLLFRVTINGVTGWRLCERILALEGGSWSHPQFEKDYKDDDDKGSDYKDDDDKGSDYKDDDDKGSDYKDDDDKAWSHPQFEKHHHHHHHHTSGSGEGRGSLLTCGDVEENPGPHMTEYKPTVRLATRDDVPRAVRTLAAAFADYPATRHTVDPDRHIERVTELQELFLTRVGLDIGKVWVADDGAAVAVWTTPESVEAGAVFAEIGPRMAELSGSRLAAQQQMEGLLAPHRPKEPAWFLATVGVSPDHQGKGLGSAVVLPGVEAAERAGVPAFLETSAPRNLPFYERLGFTVTADVEVPEGPRTWCMTRKPGA

SEQ ID NO: 11985 - protein, 732 aa, Artificial Sequence
  Synthetic Polypeptide
MSEEVTYADLQFQNSSEMEKIPEIGKFGEKAPPAPSHVWRPAALFLTLLCLLLLIGLGVLASMFHVTLKIEMKKMNKLQNISEELQRNISLQLMSNMNISNKIRNLSTTLQTIATKLCRELYSKEQEHKCKPCPRRWIWHKDSCYFLSDDVQTWQESKMACAAQNASLLKINNKNALEFIKSQSRSYDYWLGLSPEEDSTRGMRVDNIINSSAWVIRNAPDLNNMYCGYINRLYVQYYHCTYKQRMICEKMANPVQLGSTYFREATRGGSGVFTLEDFVGDWRQTAGYNLDQVLEQGGVSSLFQNLGVSVTPIQRIVLSGENGLKIDIHVIIPYEGLSGDQMGQIEKIFKVVYPVDDHHFKVILHYGTLVIDGVTPNMIDYFGRPYEGIAVFDGKKITVTGTLWNGNKIIDERLINPDGSLLFRVTINGVTGWRLCERILALEGGSWSHPQFEKDYKDDDDKGSDYKDDDDKGSDYKDDDDKGSDYKDDDDKAWSHPQFEKHHHHHHHHTSGSGEGRGSLLTCGDVEENPGPHMTEYKPTVRLATRDDVPRAVRTLAAAFADYPATRHTVDPDRHIERVTELQELFLTRVGLDIGKVWVADDGAAVAVWTTPESVEAGAVFAEIGPRMAELSGSRLAAQQQMEGLLAPHRPKEPAWFLATVGVSPDHQGKGLGSAVVLPGVEAAERAGVPAFLETSAPRNLPFYERLGFTVTADVEVPEGPRTWCMTRKPGA

SEQ ID NO: 11986 - protein, 630 aa, Artificial Sequence
  Synthetic Polypeptide
MALPVTALLLPLALLLHAARPFECPAGIYAPICSGGGGSCGGGGSKISHFLKMESLNFIRAHTPYINIYNCEPANPSEKNSPSTQYCYSIQSGGGGSCGGGGSPAGIYAPIGGGGSKISHFLKMESLNFIRAHTPYINIYNCEPANPSEKNSPSTQYCYSIQSTRGGSGVFTLEDFVGDWRQTAGYNLDQVLEQGGVSSLFQNLGVSVTPIQRIVLSGENGLKIDIHVIIPYEGLSGDQMGQIEKIFKVVYPVDDHHFKVILHYGTLVIDGVTPNMIDYFGRPYEGIAVFDGKKITVTGTLWNGNKIIDERLINPDGSLLFRVTINGVTGWRLCERILALEGGSWSHPQFEKDYKDDDDKGSDYKDDDDKGSDYKDDDDKGSDYKDDDDKAWSHPQFEKHHHHHHHHTSGSGEGRGSLLTCGDVEENPGPHMTEYKPTVRLATRDDVPRAVRTLAAAFADYPATRHTVDPDRHIERVTELQELFLTRVGLDIGKVWVADDGAAVAVWTTPESVEAGAVFAEIGPRMAELSGSRLAAQQQMEGLLAPHRPKEPAWFLATVGVSPDHQGKGLGSAVVLPGVEAAERAGVPAFLETSAPRNLPFYERLGFTVTADVEVPEGPRTWCMTRKPGA

SEQ ID NO: 11987 - protein, 570 aa, Artificial Sequence
  Synthetic Polypeptide
MALPVTALLLPLALLLHAARPFECPAGIYAPICSGGGGSCGGGGSKISHFLKMESLNFIRAHTPYINIYNCEPANPSEKNSPSTQYCYSIQSGGGGSCGGGGSTRGGSGVFTLEDFVGDWRQTAGYNLDQVLEQGGVSSLFQNLGVSVTPIQRIVLSGENGLKIDIHVIIPYEGLSGDQMGQIEKIFKVVYPVDDHHFKVILHYGTLVIDGVTPNMIDYFGRPYEGIAVFDGKKITVTGTLWNGNKIIDERLINPDGSLLFRVTINGVTGWRLCERILALEGGSWSHPQFEKDYKDDDDKGSDYKDDDDKGSDYKDDDDKGSDYKDDDDKAWSHPQFEKHHHHHHHHTSGSGEGRGSLLTCGDVEENPGPHMTEYKPTVRLATRDDVPRAVRTLAAAFADYPATRHTVDPDRHIERVTELQELFLTRVGLDIGKVWVADDGAAVAVWTTPESVEAGAVFAEIGPRMAELSGSRLAAQQQMEGLLAPHRPKEPAWFLATVGVSPDHQGKGLGSAVVLPGVEAAERAGVPAFLETSAPRNLPFYERLGFTVTADVEVPEGPRTWCMTRKPGA

SEQ ID NO: 11988 - protein, 982 aa, Artificial Sequence
  Synthetic Polypeptide
MSLWLLEGVPMRQAAVTSTSLTIKSVFTRSELKFSPQWSHHGKIVTCQLQDADGKFLSNDTVQLNVKHTPKLEIKVTPSDAIVREGDSVTMTCEVSSSNPEYTTVSWLKDGTSLKKQNTFTLNLREVTKDQSGKYCCQVSNDVGPGRSEEVFLQVQYAPEPSTVQILHSPAVEGSQVEFLCMSLANPLPTNYTWYHNGKEMQGRTEEKVHIPKILPWHAGTYSCVAENILGTGQRGPGAELDVQYPPKKVTTVIQNPMPIREGDTVTLSCNYNSSNPSVTRYEWKPHGAWEEPSLGVLKIQNVGWDNTTIACAACNSWCSWASPVALNVQYAPRDVRVRKIKPLSEIHSGNSVSLQCDFSSSHPKEVQFFWEKNGRLLGKESQLNFDSISPEDAGSYSCWVNNSIGQTASKAWTLEVLYAPRRLRVSMSPGDQVMEGKSATLTCESDANPPVSHYTWFDWNNQSLPYHSQKLRLEPVKVQHSGAYWCQGTNSVGKGRSPLSTLTVYYSPETIGRRTRGGSGVFTLEDFVGDWRQTAGYNLDQVLEQGGVSSLFQNLGVSVTPIQRIVLSGENGLKIDIHVIIPYEGLSGDQMGQIEKIFKVVYPVDDHHFKVILHYGTLVIDGVTPNMIDYFGRPYEGIAVFDGKKITVTGTLWNGNKIIDERLINPDGSLLFRVTINGVTGWRLCERILALEGGSWSHPQFEKDYKDDDDKGSDYKDDDDKGSDYKDDDDKGSDYKDDDDKAWSHPQFEKHHHHHHHHTSGSGEGRGSLLTCGDVEENPGPHMTEYKPTVRLATRDDVPRAVRTLAAAFADYPATRHTVDPDRHIERVTELQELFLTRVGLDIGKVWVADDGAAVAVWTTPESVEAGAVFAEIGPRMAELSGSRLAAQQQMEGLLAPHRPKEPAWFLATVGVSPDHQGKGLGSAVVLPGVEAAERAGVPAFLETSAPRNLPFYERLGFTVTADVEVPEGPRTWCMTRKPGA

SEQ ID NO: 11989 - protein, 880 aa, Artificial Sequence
  Synthetic Polypeptide
MRPADLLQLVLLLDLPRDLGGMGCSSPPCECHQEEDFRVTCKDIQRIPSLPPSTQTLKLIETHLRTIPSHAFSNLPNISRIYVSIDVTLQQLESHSFYNLSKVTHIEIRNTRNLTYIDPDALKELPLLKFLGIFNTGLKMFPDLTKVYSTDIFFILEITDNPYMTSIPVNAFQGLCNETLTLKLYNNGFTSVQGYAFNGTKLDAVYLNKNKYLTVIDKDAFGGVYSGPSLLDVSQTSVTALPSKGLEHLKELIARNTWTLKKLPLSLSFLHLTRADLSYPSHCCAFKNQKKIRGILESLMCNESSMQSLRQRKSVNALNSPLHQEYEENLGDSIVGYKEKSKFQDTHNNAHYYVFFEEQEDEIIGFGQELKNPQEETLQAFDSHYDYTICGDSEDMVCTPKSDEFNPCEDIMGTRGGSGVFTLEDFVGDWRQTAGYNLDQVLEQGGVSSLFQNLGVSVTPIQRIVLSGENGLKIDIHVIIPYEGLSGDQMGQIEKIFKVVYPVDDHHFKVILHYGTLVIDGVTPNMIDYFGRPYEGIAVFDGKKITVTGTLWNGNKIIDERLINPDGSLLFRVTINGVTGWRLCERILALEGGSWSHPQFEKDYKDDDDKGSDYKDDDDKGSDYKDDDDKGSDYKDDDDKAWSHPQFEKHHHHHHHHTSGSGEGRGSLLTCGDVEENPGPHMTEYKPTVRLATRDDVPRAVRTLAAAFADYPATRHTVDPDRHIERVTELQELFLTRVGLDIGKVWVADDGAAVAVWTTPESVEAGAVFAEIGPRMAELSGSRLAAQQQMEGLLAPHRPKEPAWFLATVGVSPDHQGKGLGSAVVLPGVEAAERAGVPAFLETSAPRNLPFYERLGFTVTADVEVPEGPRTWCMTRKPGA

SEQ ID NO: 11990 - protein, 828 aa, Artificial Sequence
  Synthetic Polypeptide
MRPSGTAGAALLALLAALCPASRALEEKKGNYVVTDHGSCVRACGADSYEMEEDGVRKCKKCEGPCRKVCNGIGIGEFKDSLSINATNIKHFKNCTSISGDLHILPVAFRGDSFTHTPPLDPQELDILKTVKEITGFLLIQAWPENRTDLHAFENLEIIRGRTKQHGQFSLAVVSLNITSLGLRSLKEISDGDVIISGNKNLCYANTINWKKLFGTSGQKTKIISNRGENSCKATGQVCHALCSPEGCWGPEPRDCVSCRNVSRGRECVDKCNLLEGEPREFVENSECIQCHPECLPQAMNITCTGRGPDNCIQCAHYIDGPHCVKTCPAGVMGENNTLVWKYADAGHVCHLCHPNCTYGCTRGGSGVFTLEDFVGDWRQTAGYNLDQVLEQGGVSSLFQNLGVSVTPIQRIVLSGENGLKIDIHVIIPYEGLSGDQMGQIEKIFKVVYPVDDHHFKVILHYGTLVIDGVTPNMIDYFGRPYEGIAVFDGKKITVTGTLWNGNKIIDERLINPDGSLLFRVTINGVTGWRLCERILALEGGSWSHPQFEKDYKDDDDKGSDYKDDDDKGSDYKDDDDKGSDYKDDDDKAWSHPQFEKHHHHHHHHTSGSGEGRGSLLTCGDVEENPGPHMTEYKPTVRLATRDDVPRAVRTLAAAFADYPATRHTVDPDRHIERVTELQELFLTRVGLDIGKVWVADDGAAVAVWTTPESVEAGAVFAEIGPRMAELSGSRLAAQQQMEGLLAPHRPKEPAWFLATVGVSPDHQGKGLGSAVVLPGVEAAERAGVPAFLETSAPRNLPFYERLGFTVTADVEVPEGPRTWCMTRKPGA

SEQ ID NO: 11991 - protein, 693 aa, Artificial Sequence
  Synthetic Polypeptide
MAGSPTCLTLIYILWQLTGSAASGPVKELVGSVGGAVTFPLKSKVKQVDSIVWTFNTTPLVTIQPEGGTIIVTQNRNRERVDFPDGGYSLKLSKLKKNDSGIYYVGIYSSSLQQPSTQEYVLHVYEHLSKPKVTMGLQSNKNGTCVTNLTCCMEHGEEDVIYTWKALGQAANESHNGSILPISWRWGESDMTFICVARNPVSRNFSSPILARKLCEGAADDPDSSMTRGGSGVFTLEDFVGDWRQTAGYNLDQVLEQGGVSSLFQNLGVSVTPIQRIVLSGENGLKIDIHVIIPYEGLSGDQMGQIEKIFKVVYPVDDHHFKVILHYGTLVIDGVTPNMIDYFGRPYEGIAVFDGKKITVTGTLWNGNKIIDERLINPDGSLLFRVTINGVTGWRLCERILALEGGSWSHPQFEKDYKDDDDKGSDYKDDDDKGSDYKDDDDKGSDYKDDDDKAWSHPQFEKHHHHHHHHTSGSGEGRGSLLTCGDVEENPGPHMTEYKPTVRLATRDDVPRAVRTLAAAFADYPATRHTVDPDRHIERVTELQELFLTRVGLDIGKVWVADDGAAVAVWTTPESVEAGAVFAEIGPRMAELSGSRLAAQQQMEGLLAPHRPKEPAWFLATVGVSPDHQGKGLGSAVVLPGVEAAERAGVPAFLETSAPRNLPFYERLGFTVTADVEVPEGPRTWCMTRKPGA

SEQ ID NO: 11992 - protein, 634 aa, Artificial Sequence
  Synthetic Polypeptide
MQIPQAPWPVVWAVLQLGWRPGWFLDSPDRPWNPPTFSPALLVVTEGDNATFTCSFSNTSESFVLNWYRMSPSNQTDKLAAFPEDRSQPGQDCRFRVTQLPNGRDFHMSVVRARRNDSGTYLCGAISLAPKAQIKESLRAELRVTERRAEVPTAHPSPSPRPAGQFQTRGGSGVFTLEDFVGDWRQTAGYNLDQVLEQGGVSSLFQNLGVSVTPIQRIVLSGENGLKIDIHVIIPYEGLSGDQMGQIEKIFKVVYPVDDHHFKVILHYGTLVIDGVTPNMIDYFGRPYEGIAVFDGKKITVTGTLWNGNKIIDERLINPDGSLLFRVTINGVTGWRLCERILALEGGSWSHPQFEKDYKDDDDKGSDYKDDDDKGSDYKDDDDKGSDYKDDDDKAWSHPQFEKHHHHHHHHTSGSGEGRGSLLTCGDVEENPGPHMTEYKPTVRLATRDDVPRAVRTLAAAFADYPATRHTVDPDRHIERVTELQELFLTRVGLDIGKVWVADDGAAVAVWTTPESVEAGAVFAEIGPRMAELSGSRLAAQQQMEGLLAPHRPKEPAWFLATVGVSPDHQGKGLGSAVVLPGVEAAERAGVPAFLETSAPRNLPFYERLGFTVTADVEVPEGPRTWCMTRKPGA

SEQ ID NO: 11993 - protein, 629 aa, Artificial Sequence
  Synthetic Polypeptide
MACLGFQRHKAQLNLATRTWPCTLLFFLLFIPVFCKAMHVAQPAVVLASSRGIASFVCEYASPGKATEVRVTVLRQADSQVTEVCAATYMMGNELTFLDDSICTGTSSGNQVNLTIQGLRAMDTGLYICKVELMYPPPYYLGIGNGTQIYVIDPEPCPDSDFTRGGSGVFTLEDFVGDWRQTAGYNLDQVLEQGGVSSLFQNLGVSVTPIQRIVLSGENGLKIDIHVIIPYEGLSGDQMGQIEKIFKVVYPVDDHHFKVILHYGTLVIDGVTPNMIDYFGRPYEGIAVFDGKKITVTGTLWNGNKIIDERLINPDGSLLFRVTINGVTGWRLCERILALEGGSWSHPQFEKDYKDDDDKGSDYKDDDDKGSDYKDDDDKGSDYKDDDDKAWSHPQFEKHHHHHHHHTSGSGEGRGSLLTCGDVEENPGPHMTEYKPTVRLATRDDVPRAVRTLAAAFADYPATRHTVDPDRHIERVTELQELFLTRVGLDIGKVWVADDGAAVAVWTTPESVEAGAVFAEIGPRMAELSGSRLAAQQQMEGLLAPHRPKEPAWFLATVGVSPDHQGKGLGSAVVLPGVEAAERAGVPAFLETSAPRNLPFYERLGFTVTADVEVPEGPRTWCMTRKPGA

SEQ ID NO: 11994 - protein, 623 aa, Artificial Sequence
  Synthetic Polypeptide
MALPVTALLLPLALLLHAARPLFNQEVQIPLTESYCGPCPKNWICYKNNCYQFFDESKNWYESQASCMSQNASLLKVYSKEDQDLLKLVKSYHWMGLVHIPTNGSWQWEDGSILSPNLLTIIEMQKGDCALYASSFKGYIENCSTPNTYICMQRTVTRGGSGVFTLEDFVGDWRQTAGYNLDQVLEQGGVSSLFQNLGVSVTPIQRIVLSGENGLKIDIHVIIPYEGLSGDQMGQIEKIFKVVYPVDDHHFKVILHYGTLVIDGVTPNMIDYFGRPYEGIAVFDGKKITVTGTLWNGNKIIDERLINPDGSLLFRVTINGVTGWRLCERILALEGGSWSHPQFEKDYKDDDDKGSDYKDDDDKGSDYKDDDDKGSDYKDDDDKAWSHPQFEKHHHHHHHHTSGSGEGRGSLLTCGDVEENPGPHMTEYKPTVRLATRDDVPRAVRTLAAAFADYPATRHTVDPDRHIERVTELQELFLTRVGLDIGKVWVADDGAAVAVWTTPESVEAGAVFAEIGPRMAELSGSRLAAQQQMEGLLAPHRPKEPAWFLATVGVSPDHQGKGLGSAVVLPGVEAAERAGVPAFLETSAPRNLPFYERLGFTVTADVEVPEGPRTWCMTRKPGA

SEQ ID NO: 11995 - protein, 1197 aa, Artificial Sequence
  Synthetic Polypeptide
MALPVTALLLPLALLLHAARPFEKSSNEATNITPKHNMKAFLDELKAENIKKFLYNFTQIPHLAGTEQNFQLAKQIQSQWKEFGLDSVELAHYDVLLSYPNKTHPNYISIINEDGNEIFNTSLFEPPPPGYENVSDIVPPFSAFSPQGMPEGDLVYVNYARTEDFFKLERDMKINCSGKIVIARYGKVFRGNKVKNAQLAGAKGVILYSDPADYFAPGVKSYPDGWNLPGGGVQRGNILNLNGAGDPLTPGYPANEYAYRRGIAEAVGLPSIPVHPIGYYDAQKLLEKMGGSAPPDSSWRGSLKVPYNVGPGFTGNFSTQKVKMHIHSTNEVTRIYNVIGTLRGAVEPDRYVILGGHRDSWVFGGIDPQSGAAVVHEIVRSFGTLKKEGWRPRRTILFASWDAEEFGLLGSTEWAEENSRLLQERGVAYINADSSIEGNYTLRVDCTPLMYSLVHNLTKELKSPDEGFEGKSLYESWTKKSPSPEFSGMPRISKLGSGNDFEVFFQRLGIASGRARYTKNWETNKFSGYPLYHSVYETYELVEKFYDPMFKYHLTVAQVRGGMVFELANSIVLPFDCRDYAVVLRKYADKIYSISMKHPQEMKTYSVSFDSLFSAVKNFTEIASKFSERLQDFDKSNPIVLRMMNDQLMFLERAFIDPLGLPDRPFYRHVIYAPSSHNKYAGESFPGIYDALFDIESKVDPSKAWGEVKRQIYVAAFTVQAAAETLSEVATRGGSGVFTLEDFVGDWRQTAGYNLDQVLEQGGVSSLFQNLGVSVTPIQRIVLSGENGLKIDIHVIIPYEGLSGDQMGQIEKIFKVVYPVDDHHFKVILHYGTLVIDGVTPNMIDYFGRPYEGIAVFDGKKITVTGTLWNGNKIIDERLINPDGSLLFRVTINGVTGWRLCERILALEGGSWSHPQFEKDYKDDDDKGSDYKDDDDKGSDYKDDDDKGSDYKDDDDKAWSHPQFEKHHHHHHHHTSGSGEGRGSLLTCGDVEENPGPHMTEYKPTVRLATRDDVPRAVRTLAAAFADYPATRHTVDPDRHIERVTELQELFLTRVGLDIGKVWVADDGAAVAVWTTPESVEAGAVFAEIGPRMAELSGSRLAAQQQMEGLLAPHRPKEPAWFLATVGVSPDHQGKGLGSAVVLPGVEAAERAGVPAFLETSAPRNLPFYERLGFTVTADVEVPEGPRTWCMTRKPGA

SEQ ID NO: 11996 - protein, 544 aa, Artificial Sequence
  Synthetic Polypeptide
MALPVTALLLPLALLLHAARPFEMLQMAGQCSQNEYFDSLLHACIPCQLRCSSNTPPLTCQRYCNASVTNSVKGTNATRGGSGVFTLEDFVGDWRQTAGYNLDQVLEQGGVSSLFQNLGVSVTPIQRIVLSGENGLKIDIHVIIPYEGLSGDQMGQIEKIFKVVYPVDDHHFKVILHYGTLVIDGVTPNMIDYFGRPYEGIAVFDGKKITVTGTLWNGNKIIDERLINPDGSLLFRVTINGVTGWRLCERILALEGGSWSHPQFEKDYKDDDDKGSDYKDDDDKGSDYKDDDDKGSDYKDDDDKAWSHPQFEKHHHHHHHHTSGSGEGRGSLLTCGDVEENPGPHMTEYKPTVRLATRDDVPRAVRTLAAAFADYPATRHTVDPDRHIERVTELQELFLTRVGLDIGKVWVADDGAAVAVWTTPESVEAGAVFAEIGPRMAELSGSRLAAQQQMEGLLAPHRPKEPAWFLATVGVSPDHQGKGLGSAVVLPGVEAAERAGVPAFLETSAPRNLPFYERLGFTVTADVEVPEGPRTWCMTRKPGA

SEQ ID NO: 11997 - protein, 544 aa, Artificial Sequence
  Synthetic Polypeptide
MADKNILYGPEPFYPLEDGTAGEQMFDALSRYAAIPGCIALTNAHTKENVLYEEFLKLSCRLAESFKKYGLKQNDTIAVCSENSLQFFLPVIASLYLGIIVAPVNDKYIERELIHSLGIVKPRIVFCSKNTFQKVLNVKSKLKSIETIIILDLNEDLGGYQCLNNFISQNSDSNLDVKKFKPYSFNRDDQVASIMFSSGTTGLPKGVMLTHKNIVARFSIAKDPTFGNAINPTSAILTVIPFHHGFGMMTTLGYFTCGFRVVLMHTFEEKLFLQSLQDYKVESTLLVPTLMAFLAKSALVEKYDLSHLKEIASGGAPLSKEIGEMVKKRFKLNFVRQGYGLTETTSAVLITPKGDAKPGSTGKIVPLHAVKVVDPTTGKILGPNEPGELYFKGPMIMKGYYNNEEATKAIIDNDGWLRSGDIAYYDNDGHFYIVDRLKSLIKYKGYQVAPAEIEGILLQHPYIVDAGVTGIPDEAAGELPAAGVVVQTGKYLNEQIVQDYVASQVSTAKWLRGGVKFLDEIPKGSTGKIDRKVLRQMLEKHTNG

SEQ ID NO: 11998 - protein, 199 aa, Artificial Sequence
  Synthetic Polypeptide
MTEYKPTVRLATRDDVPRAVRTLAAAFADYPATRHTVDPDRHIERVTELQELFLTRVGLDIGKVWVADDGAAVAVWTTPESVEAGAVFAEIGPRMAELSGSRLAAQQQMEGLLAPHRPKEPAWFLATVGVSPDHQGKGLGSAVVLPGVEAAERAGVPAFLETSAPRNLPFYERLGFTVTADVEVPEGPRTWCMTRKPGA

SEQ ID NO: 11999 - protein, 132 aa, Artificial Sequence
  Synthetic Polypeptide
MAKPLSQEESTLIERATATINSIPISEDYSVASAALSSDGRIFTGVNVYHFTGGPCAELVVLGTAAAAAAGNLTCIVAIGNENRGILSPCGRCRQVLLDLHPGIKAIVKDSDGQPTAVGIRELLPSGYVWEG

SEQ ID NO: 12000 - protein, 172 aa, Artificial Sequence
  Synthetic Polypeptide
MGNEASYPLEMCSHFDADEIKRLGKRFKKLDLDNSGSLSVEEFMSLPELQQNPLVQRVIDIFDTDGNGEVDFKEFIEGVSQFSVKGDKEQKLRFAFRIYDMDKDGYISNGELFQVLKMMVGNNTKLADTQLQQIVDKTIINADKDGDGRISFEEFCAVVGGLDIHKKMVVDV

SEQ ID NO: 12001 - protein, 357 aa, Artificial Sequence
  Synthetic Polypeptide
MLLLVTSLLLCELPHPAFLLIPRKVCNGIGIGEFKDSLSINATNIKHFKNCTSISGDLHILPVAFRGDSFTHTPPLDPQELDILKTVKEITGFLLIQAWPENRTDLHAFENLEIIRGRTKQHGQFSLAVVSLNITSLGLRSLKEISDGDVIISGNKNLCYANTINWKKLFGTSGQKTKIISNRGENSCKATGQVCHALCSPEGCWGPEPRDCVSCRNVSRGRECVDKCNLLEGEPREFVENSECIQCHPECLPQAMNITCTGRGPDNCIQCAHYIDGPHCVKTCPAGVMGENNTLVWKYADAGHVCHLCHPNCTYGCTGPGLEGCPTNGPKIPSIATGMVGALLLLLVVALGIGLFM

SEQ ID NO: 12002 - protein, 424 aa, Artificial Sequence
  Synthetic Polypeptide
MRPSGTAGAAFLALLAALCPASRALEEKKGNYVVTDHGSCVRACGADSYEMEEDGVRKCKKCEGPCRKVCNGIGIGEFKDSLSINATNIKHFKNCTSISGDLHILPVAFRGDSFTHTPPLDPQELDILKTVKEITGFLLIQAWPENRTDLHAFENLEIIRGRTKQHGQFSLAVVSLNITSLGLRSLKEISDGDVIISGNKNLCYANTINWKKLFGTSGQKTKIISNRGENSCKATGQVCHALCSPEGCWGPEPRDCVSCRNVSRGRECVDKCNLLEGEPREFVENSECIQCHPECLPQAMNITCTGRGPDNCIQCAHYIDGPHCVKTCPAGVMGENNTLVWKYADAGHVCHLCHPNCTYGCTGPGLEGCPTNGPKIPSIATGMVGALLLLLVVALGIGLFMRRRHIVRKRTLRRLLQERELVEP

SEQ ID NO: 12003 - protein, 333 aa, Artificial Sequence
  Synthetic Polypeptide
MPPPRLLFFLLFLTPMEVRPEEPLVVKVEEGDNAVLQCLKGTSDGPTQQLTWSRESPLKPFLKLSLGLPGLGIHMRPLAIWLFIFNVSQQMGGFYLCQPGPPSEKAWQPGWTVNVEGSGELFRWNVSDLGGLGCGLKNRSSEGPSSPSGKLMSPKLYVWAKDRPEIWEGEPPCLPPRDSLNQSLSQDLTMAPGSTLWLSCGVPPDSVSRGPLSWTHVHPKGPKSLLSLELKDDRPARDMWVMETGLLLPRATAQDAGKYYCHRGNLTMSFHLEITARPVLWHWLLRTGGWKVSAVTLAYLIFCLCSLVGILHLQRALVLRRKRKRMTDPTRRF

SEQ ID NO: 12004 - protein, 105 aa, Artificial Sequence
  Synthetic Polypeptide
MALPVTALLLPLALLLHAARPFEMLQMAGQCSQNEYFDSLLHACIPCQLRCSSNTPPLTCQRYCNASVTNSVKGTNAILWTCLGLSLIISLAVFVLMFLLRKINS

SEQ ID NO: 12005 - protein, 188 aa, Artificial Sequence
  Synthetic Polypeptide
MATYEVLCEVARKLGTDDREVVLFLLNVFIPQPTLAQLIGALRALKEEGRLTFPLLAECLFRAGRRDLLRDLLHLDPRFLERHLAGTMSYFSPYQLTVLHVDGELCARDIRSLIFLSKDTIGSRSTPQTFLHWVYCMENLDLLGPTDVDALMSMLRSLSRVDLQRQVQTLMGLHLSGPSHSQHYRHTP

SEQ ID NO: 12006 - protein, 241 aa, Artificial Sequence
  Synthetic Polypeptide
MSDSKEVPSLPFLRHLLEELDSHEDSLLLFLCHDAAPGCTTVTQALCSLSQQRKLTLAALVEMLYVLQRMDLLKSRFGLSKEGAEQLLGTSFLTRYRKLMVCVGEELDSSELRALRLFACNLNPSLSTALSESSRFVELVLALENVGLVSPSSVSVLADMLRTLRRLDLCQQLVEYEQQEQARYRYCYAASPSLPVRTLRRGHGASEHEQLCMPVQESSDSPELLRTPVQESSSDSPEQTT

SEQ ID NO: 12007 - protein, 188 aa, Artificial Sequence; identical to SEQ ID NO: 12005
  Synthetic Polypeptide

SEQ ID NO: 12008 - protein, 400 aa, Artificial Sequence
  Synthetic Polypeptide
MLEGVQVETISPGDGRTFPKRGQTCVVHYTGMLEDGKKVDSSRDRNKPFKFMLGKQEVIRGWEEGVAQMSVGQRAKLTISPDYAYGATGHPGIIPPHATLVFDVELLKLESGGGSGVDGFGDVGALESLRGNADLAYILSMEPCGHCLIINNVNFCRESGLRTRTGSNIDCEKLRRRFSSLHFMVEVKGDLTAKKMVLALLELAQQDHGALDCCVVVILSHGCQASHLQFPGAVYGTDGCPVSVEKIVNIFNGTSCPSLGGKPKLFFIQACGGEQKDHGFEVASTSPEDESPGSNPEPDATPFQEGLRTFDQLDAISSLPTPSDIFVSYSTFPGFVSWRDPKSGSWYVETLDDIFEQWAHSEDLQSLLLRVANAVSVKGIYKQMPGCFNFLRKKLFFKTS

SEQ ID NO: 12009 - protein, 270 aa, Artificial Sequence
  Synthetic Polypeptide
MDWIWRILFLVGAATGAHSEVQLVESGGGLVQPGGSLRLSCAASGSVFKINVMAWYRQAPGKGRELVAGIISGGSTSYADSVKGRFTISRDNAKNTLYLQMNSLRPEDTAVYYCAFITTESDYDLGRRYWGQGTLVTVSSGGGGSGGGGSGGGGSEVQLVESGGGLVQPGNSLRLSCAASGFTFSSFGMSWVRQAPGKGLEWVSSISGSGSDTLYADSVKGRFTISRDNAKTTLYLQMNSLRPEDTAVYYCTIGGSLSRSSQGTLVTVSS

SEQ ID NO: 12010 - protein, 246 aa, Artificial Sequence
  Synthetic Polypeptide
MALPVTALLLPLALLLHAARPEIVLTQSPATLSLSPGERATLSCRASQSVSSYLAWYQQKPGQAPRLLIYDASNRATGIPARFSGSGSGTDFTLTIEDFAVYYCQQSTFGQGTKVEIKGGGGSGGGGSGGGGSQVYLVESGGGVVQPGRSLRLSCAASGFTFSNYGMHWVRQAPGKGLEWVALIWYDGSNKYYADSVKGRFTISRDNSKNTLYLQMTSLRVEDTAVYYCASNVDHWGQGTLVTVSS

SEQ ID NO: 12011 - protein, 253 aa, Artificial Sequence
  Synthetic Polypeptide
MALPVTALLLPLALLLHAARPEIVLTQSPATLSLSPGERATLSCRASQSVSSYLAWYQQKPGQAPRLLIYDASNRATGIPARFSGSGSGTDFTLTISSLEPEDFAVYYCQQSSNWPRTFGQGTKVEIKGGGGSGGGGSGGGGSQVQLVESGGGWQPGRSLRLDCKASGITFSNSGMHWVRQAPGKGLEWVAVIYDGSKRYYADSVKGRFISRDNSKNTLFLQMNSLRAEDTAVYYCATNDDYWGQGTLVTVSS

SEQ ID NO: 12012 - protein, 263 aa, Artificial Sequence
  Synthetic Polypeptide
MALPVTALLLPLALLLHAARPEIVLTQSPGTLSLSPGERATLSCRASQSVGSSYLAWYQQKPGQAPRLLIYGAFSRATGIPDRFSGSGSGTDFTLTISRLEPEDFAVYYCQQYGSSPWTFGQGTKVEIKRGGGGSGGGGSGGGGSQVQLVESGGGVVQPGRSLRLSCAASGFTFSSYTMHWVRQAPGKGLEWVTFISYDGNNKYYADSVKGRFTISRDNSKNTLYLQMNSLRAEDTAIYYCARTGWLGPFDYWGQGTLVTVSS

SEQ ID NO: 12013 - protein, 376 aa, Artificial Sequence
  Synthetic Polypeptide
MALPVTALLLPLALLLHAARPEIVLTQSPATLSLSPGERATLSCRASQSVSSYLAWYQQKPGQAPRLLIYDASNRATGIPARFSGSGSGTDFTLTIEDFAVYYCQQSTFGQGTKVEIKGGGGSGGGGSGGGGSQVYLVESGGGVVQPGRSLRLSCAASGFTFSNYGMHWVRQAPGKGLEWVALIWYDGSNKYYADSVKGRFTISRDNSKNTLYLQMTSLRVEDTAVYYCASNVDHWGQGTLVTVSSGGGGSGGGGSGGGGSEVQLVESGGGLVQPGNSLRLSCAASGFTFSSFGMSWVRQAPGKGLEWVSSISGSGSDTLYADSVKGRFTISRDNAKTTLYLQMNSLRPEDTAVYYCTIGGSLSRSSQGTLVTVSS

SEQ ID NO: 12014 - protein, 383 aa, Artificial Sequence
  Synthetic Polypeptide
MALPVTALLLPLALLLHAARPEIVLTQSPATLSLSPGERATLSCRASQSVSSYLAWYQQKPGQAPRLLIYDASNRATGIPARFSGSGSGTDFTLTISSLEPEDFAVYYCQQSSNWPRTFGQGTKVEIKGGGGSGGGGSGGGGSQVQLVESGGGWQPGRSLRLDCKASGITFSNSGMHWVRQAPGKGLEWVAVIYDGSKRYYADSVKGRFISRDNSKNTLFLQMNSLRAEDTAVYYCATNDDYWGQGTLVTVSSGGGGSGGGGSGGGGSEVQLVESGGGLVQPGNSLRLSCAASGFTFSSFGMSWVRQAPGKGLEWVSSISGSGSDTLYADSVKGRFTISRDNAKTTLYLQMNSLRPEDTAVYYCTIGGSLSRSSQGTLVTVSS

SEQ ID NO: 12015 - protein, 393 aa, Artificial Sequence
  Synthetic Polypeptide
MALPVTALLLPLALLLHAARPEIVLTQSPGTLSLSPGERATLSCRASQSVGSSYLAWYQQKPGQAPRLLIYGAFSRATGIPDRFSGSGSGTDFTLTISRLEPEDFAVYYCQQYGSSPWTFGQGTKVEIKRGGGGSGGGGSGGGGSQVQLVESGGGVVQPGRSLRLSCAASGFTFSSYTMHWVRQAPGKGLEWVTFISYDGNNKYYADSVKGRFTISRDNSKNTLYLQMNSLRAEDTAIYYCARTGWLGPFDYWGQGTLVTVSSGGGGSGGGGSGGGGSEVQLVESGGGLVQPGNSLRLSCAASGFTFSSFGMSWVRQAPGKGLEWVSSISGSGSDTLYADSVKGRFTISRDNAKTTLYLQMNSLRPEDTAVYYCTIGGSLSRSSQGTLVTVSS

SEQ ID NO: 12016 - protein, 259 aa, Artificial Sequence
  Synthetic Polypeptide
MDWIWRILFLVGAATGAHSEIVLTQSPATLSLSPGERATLSCSASISVSYMYWYQQKPGQAPRLLIYDMSNLASGIPARFSGSGSGTDFTLTISSLEPEDFAVYYCMQWSGYPYTFGGGTKVEIKGGGGSGGGGSGGGGSEVQLVESGGGLVQPGGSLRLSCAASGFTFSPFAMSWVRQAPGKGLEWVAKISPGGSWTYYSDTVTGRFTISRDNAKNSLYLQMNSLRAEDTAVYYCARQLWGYYALDIWGQGTTVTVSS

SEQ ID NO: 12017 - protein, 47 aa, Artificial Sequence
  Synthetic Polypeptide
MDWIWRILFLVGAATGAHSGHRPLDKKREEAPSLRPAPPPISGGGYR

SEQ ID NO: 12018 - protein, 301 aa, Artificial Sequence
  Synthetic Polypeptide
MTRGVQVETISPGDGRTFPKRGQTCVVHYTGMLEDGKKVDSSRDRNKPFKFMLGKQEVIRGWEEGVAQMSVGQRAKLTISPDYAYGATGHPGIIPPHATLVFDVELLKLEGIHMATYEVLCEVARKLGTDDREVVLFLLNVFIPQPTLAQLIGALRALKEEGRLTFPLLAECLFRAGRRDLLRDLLHLDPRFLERHLAGTMSYFSPYQLTVLHVDGELCARDIRSLIFLSKDTIGSRSTPQTFLHWVYCMENLDLLGPTDVDALMSMLRSLSRVDLQRQVQTLMGLHLSGPSHSQHYRHTP

SEQ ID NO: 12019 - protein, 408 aa, Artificial Sequence
  Synthetic Polypeptide
MGVQVETISPGDGRTFPKRGQTCVVHYTGMLEDGKKVDSSRDRNKPFKFMLGKQEVIRGWEEGVAQMSVGQRAKLTISPDYAYGATGHPGIIPPHATLVFDVELLKLGTRGVQVETISPGDGRTFPKRGQTCVVHYTGMLEDGKKVDSSRDRNKPFKFMLGKQEVIRGWEEGVAQMSVGQRAKLTISPDYAYGATGHPGIIPPHATLVFDVELLKLEGIHMATYEVLCEVARKLGTDDREVVLFLLNVFIPQPTLAQLIGALRALKEEGRLTFPLLAECLFRAGRRDLLRDLLHLDPRFLERHLAGTMSYFSPYQLTVLHVDGELCARDIRSLIFLSKDTIGSRSTPQTFLHWVYCMENLDLLGPTDVDALMSMLRSLSRVDLQRQVQTLMGLHLSGPSHSQHYRHTP

SEQ ID NO: 12020 - protein, 979 aa, Artificial Sequence
  Synthetic Polypeptide
MALPVTALLLPLALLLHAARPEVQLVESGGGLVQPGGSLRLSCTFSGGTFSSYTMGWFRQAPGKEREFVAEVRWGGVTTYSNSLKDRFSISEDSVKNAVYLQMNSLKPEDTAVYYCAAVRQMYMTVVPDYWGQGTLVTVSSSGGGGSDIQMTQSPSSLSASVGDRVTITCKASDHINNWLAWYQQKPGKAPKLLIYGATTLETGVPSRFSGSGSGTDFTLTISSLQPEDFATYYCQQSWNTPWTFGQGTKVEIKRLEDLKNVFPPEVAVFEPSEAEISHTQKATLVCLATGFYPDHVELSWWVNGKEVHSGVCTDPQPLKEQPALNDSRYCLSSRLRVSATFWQNPRNHFRCQVQFYGLSENDEWTQDRAKPVTQIVSAEAWGRADCGFTSESYQQGVLSATILYEILLGKATLYAVLVSALVLMAMVKRKDSRGRAKRSGSGATNFSLLKQAGDVEENPGPTSMDWIWRILFLVGAATGAHSFEEVQLVESGGGLVQPGGSLRLSCAASGYAFSSYWVNWVRQAPGKGLEWVAQIYPGDGDTNYNGKFKGRFTISRDNSKNTLYLQMNSLRAEDTAVYYCARSITTVVGCAMDYWGQGTLVTVSSIQNPDPAVYQLRDSKSSDKSVCLFTDFDSQTNVSQSKDSDVYITDKCVLDMRSMDFKSNSAVAWSNKSDFACANAFNNSIIPEDTFFPSPESSCDVKLVEKSFETDTNLNFQNLSVIGFRILLLKVAGFNLLMTLRLWSSRAKRSGSGVKQTLNFDLLKLAGDVESNPGPSRGHMTEYKPTVRLATRDDVPRAVRTLAAAFADYPATRHTVDPDRHIERVTELQELFLTRVGLDIGKVWVADDGAAVAVWTTPESVEAGAVFAEIGPRMAELSGSRLAAQQQMEGLLAPHRPKEPAWFLATVGVSPDHQGKGLGSAVVLPGVEAAERAGVPAFLETSAPRNLPFYERLGFTVTADVEVPEGPRTWCMTRKPGA

SEQ ID NO: 12021 - protein, 588 aa, Artificial Sequence
  Synthetic Polypeptide
MALPVTALLLPLALLLHAARPDIQMTQSPSSLSASVGDRVTITCKASDHINNWLAWYQQKPGQAPKLLIYGATTLETGVPSRFSGSGSGTDYTLTISSLQPEDFATYYCQQSWNTPWTFGQGTKLEIKRLEAEISHTQKATLVCLATGFYPDHVELSWWVNGKEVHSGVCTDPQPLKEQPALNDSRYCLSSRLRVSATFWQNPRNHFRCQVQFYGLSENDEWTQDRAKPVTQIVSAEAWGRADCGFTSESYQQGVLSATILYEILLGKATLYAVLVSALVLMAMVKRKDSRGRAKRSGSGATNFSLLKQAGDVEENPGPTSMDWIWRILFLVGAATGAHSFEQVQLQQPGAELVKPGASVKMSCKASGYAFSSYWINWMKQKPGQGLEWIGQIYPGDGDTNYNGKFKGRATLTADTSSSTAYMQLSSLTSEDSAVYFCARSITTVVGCAMDYWGQGTSVTVSSTRDKSVCLFTDFDSQTNVSQSKDSDVYITDKCVLDMRSMDFKSNSAVAWSNKSDFACANAFNNSIIPEDTFFPSPESSCDVKLVEKSFETDTNLNFQNLSVIGFRILLLKVAGFNLLMTLRLWSS

SEQ ID NO: 12022 - protein, 861 aa, Artificial Sequence
  Synthetic Polypeptide
MALPVTALLLPLALLLHAARPEVQVLESGGGLVQPGGSLRLSCAASGFTFSNFAMSWVRQAPGKGLEWVSTISGSAGTTDYADSVKGRFTISRDNSKKTLYLQMNSLRVEDTAVYYCADGRGPFFDYRGQGTLVTVSSGTGGGGSGGGGSGGGGSEFDIQMTQSPSSLSASVGDRVTITCKASDHINNWLAWYQQKPGQAPKLLIYGATTLETGVPSRFSGSGSGTDYTLTISSLQPEDFATYYCQQSWNTPWTFGQGTKLEIKRLEAEISHTQKATLVCLATGFYPDHVELSWWVNGKEVHSGVCTDPQPLKEQPALNDSRYCLSSRLRVSATFWQNPRNHFRCQVQFYGLSENDEWTQDRAKPVTQIVSAEAWGRADCGFTSESYQQGVLSATILYEILLGKATLYAVLVSALVLMAMVKRKDSRGRAKRSGSGATNFSLLKQAGDVEENPGPTSMDWIWRILFLVGAATGAHSGPEVQLVESGGGLVQAGGSLRLSCAASGRTFSMGWFRQAPGKEREFVAAITYSGGSPYYADSVKGRFTISRDNAKNTVYLQMNSLKPEDTAVYYCAANPTYGSDWNAENWGQGTQVTVSSGSGGGGSGGGGSGGGGSFEQVQLQQPGAELVKPGASVKMSCKASGYAFSSYWINWMKQKPGQGLEWIGQIYPGDGDTNYNGKFKGRATLTADTSSSTAYMQLSSLTSEDSAVYFCARSITTVVGCAMDYWGQGTSVTVSSTRDKSVCLFTDFDSQTNVSQSKDSDVYITDKCVLDMRSMDFKSNSAVAWSNKSDFACANAFNNSIIPEDTFFPSPESSCDVKLVEKSFETDTNLNFQNLSVIGFRILLLKVAGFNLLMTLRLWSS

SEQ ID NO: 12023 - protein, 329 aa, Artificial Sequence
  Synthetic Polypeptide
MALPVTALLLPLALLLHAARPDVQMIQTPDSLAVSLGQRATISCRASESVDNYGISFMHWYQQKPGQSPKLLIYRASNLESGIPARFSGSGSRTDFTLTINPVETDDVATYYCQQNNKDPPTFGGGTKLEIKGGGGSGGGGSGGGGSGGGGSQVQLQQSGAELVKPGASVKISCKASGYAFSSYWMNWVKQRPGKGLEWIGQIYPGDGDTTYNGKFKGKATLTADKSSSTVYMQLNSLTSEDSAVYFCVRYYYGSSGYFDYWGQGTTLTVSSTRGGGSMDPDLEIEAAFLERENTALETRVAELRQRVQRLRNRVSQYRTRYGPLGGGK

SEQ ID NO: 12024 - protein, 320 aa, Artificial Sequence
  Synthetic Polypeptide
MALPVTALLLPLALLLHAARPDVQMIQTPSSLSASLGDRVTISCRASQDIGNYLNWYQQKPDGTVKLLIYYTSRLHSGVPSRFSGSGSGTEYSLTISNLEQEDIATYFCQQGSALPPTFGGGTKLEINGGGGSGGGGSGGGGSALQLQQSGAELVRPGASVTLSCKASGYTFTDYEMHWVKQTPVHGLEWIGAIDPETGGTAYNQKFEGKAILTADKSSSTAYMELRSLTSEDSPVYYCARRRYYGSSSFDYWGQGTTLTVSSTRGGGSMDPDLEIEAAFLERENTALETRVAELRQRVQRLRNRVSQYRTRYGPLGGGK

SEQ ID NO: 12025 - protein, 322 aa, Artificial Sequence
  Synthetic Polypeptide
MALPVTALLLPLALLLHAARPDIVLTQSPATLSLSPGDRATISCRASESVTILGSHLIYWYQQKPGQPPRLLIQLASNVQTGVPARFSGSGSRTDFTLTISSVEPEDFAVYYCLQSRTIPRTFGQGTKLEIKRGGGGSGGGGSGGGGSQVQLVQSGPEVKKPGESVKISCKASGYTFRHYSMNWVKQAPGQGLKWMGRINTESGVPIYADDFKGRFSFTVDTSASTAYLEISSLTSEDTAVYFCSNDYLYSLDFWGQGTTLTVSSTRGGGSMDPDLEIEAAFLERENTALETRVAELRQRVQRLRNRVSQYRTRYGPLGGGK

SEQ ID NO: 12026 - protein, 322 aa, Artificial Sequence
  Synthetic Polypeptide
MALPVTALLLPLALLLHAARPDIQMTQSPSSLSASVGDRVTITCSASQDISNYLNWYQQKPGKAPKLLIYYTSNLHSGVPSRFSGSGSGTDFTLTISSLQPEDFATYYCQQYRKLPWTFGQGTKLEIKRGGGGSGGGGSGGGGSQVQLVQSGAEVKKPGSSVKVSCKASGGTFSNYWMHWVRQAPGQGLEWMGATYRGHSDTYYNQKFKGRVTITADKSTSTAYMELSSLRSEDTAVYYCARGAIYDGYDVLDNWGQGTLVTVSSTRGGGSMDPDLEIEAAFLERENTALETRVAELRQRVQRLRNRVSQYRTRYGPLGGGK

SEQ ID NO: 12027 - protein, 327 aa, Artificial Sequence
  Synthetic Polypeptide
MALPVTALLLPLALLLHAARPDIVMTQSPDSLAVSLGERATINCESSQSLLNSGNQKNYLTWYQQKPGQPPKPLIYWASTRESGVPDRFSGSGSGTDFTLTISSLQAEDVAVYYCQNDYSYPYTFGQGTKLEIKRGGGGSGGGGSGGGGSEVQLVQSGAEVKKPGESLKISCKGSGYSFTDYYMKWARQMPGKGLEWMGDIIPSNGATFYNQKFKGQVTISADKSISTTYLQWSSLKASDTAMYYCARSHLLRASWFAYWGQGTMVTVSSTRGGGSMDPDLEIEAAFLERENTALETRVAELRQRVQRLRNRVSQYRTRYGPLGGGK

SEQ ID NO: 12028 - protein, 322 aa, Artificial Sequence
  Synthetic Polypeptide
MALPVTALLLPLALLLHAARPDIQMTQSTSSLSASLGDRVTISCSASQGINNYLNWYQQKPDGTVELLIYYTSTLQSGVPSRFSGSGSGTDYSLTISNLEPEDIGTYYCQQYSKLPRTFGGGTKLEIKGGGGSGGGGSGGGGSQVQLQQSGSELMMPGASVKISCKATGYTFSNYWIEWVKQRPGHGLEWIGEILPGTGRTIYNEKFKGKATFTADISSNTVQMQLSSLTSEDSAVYYCARRDYYGNFYYAMDYWGQGTSVTVSSTRGGGSMDPDLEIEAAFLERENTALETRVAELRQRVQRLRNRVSQYRTRYGPLGGGK

SEQ ID NO: 12029 - protein, 317 aa, Artificial Sequence
  Synthetic Polypeptide
MALPVTALLLPLALLLHAARPDIQMTQSPASLSVSVGETVTITCRASENIYSNLAWYQQKQGKSPQLLVYAATNLADGVPSRFSGSGSGTQYSLKINSLQSEDFGSYYCQHFWGTWTFGGGTTLEIKGGGGSGGGGSGGGGSEVQLQQSGPELVKPGASVKMSCKASGYTFTDYYMKWMKQSHGKSLEWIGDINPNNGGTTYNQKFKGKATLTVDKSSSTAYMQLNSLTSEDSAVYYCARDYGYGYFDYWGQGTTLTVSSTRGGGSMDPDLEIEAAFLERENTALETRVAELRQRVQRLRNRVSQYRTRYGPLGGGK

SEQ ID NO: 12030 - protein, 321 aa, Artificial Sequence
  Synthetic Polypeptide
MALPVTALLLPLALLLHAARPDEIVLTQSPATLSLSPGERATLSCSASSSVSYMHWYQQKPGQAPRLLIYDTSKLASGIPARFSGSGSGTDFTLTISSLEPEDVAVYYCFQGSVYPFTFGQGTKLEIKRGGGGSGGGGSGGGGSQVQLQESGPGLVKPSQTLSLTCTVSGGSISTSGMGVGWIRQHPGKGLEWIGHIWWDDDKRYNPALKSRVTISVDTSKNQFSLKLSSVTAADTAVYYCARMELWSYYFDYWGQGTLVTVSSTRGGGSMDPDLEIEAAFLERENTALETRVAELRQRVQRLRNRVSQYRTRYGPLGGGK

SEQ ID NO: 12031 - protein, 320 aa, Artificial Sequence
  Synthetic Polypeptide
MALPVTALLLPLALLLHAARPDIQMTQTTSSLSASLGDRVTISCRASQDISKYLNWYQQKPDGTVKLLIYHTSRLHSGVPSRFSGSGSGTDYSLTISNLEQEDIATYFCQQGNTLPYTFGGGTKLEITGGGGSGGGGSGGGGSEVKLQESGPGLVAPSQSLSVTCTVSGVSLPDYGVSWIRQPPRKGLEWLGVIWGSETTYYNSALKSRLTIIKDNSKSQVFLKMNSLQTDDTAIYYCAKHYYYGGSYAMDYWGQGTSVTVSSTRGGGSMDPDLEIEAAFLERENTALETRVAELRQRVQRLRNRVSQYRTRYGPLGGGK

SEQ ID NO: 12032 - protein, 320 aa, Artificial Sequence
  Synthetic Polypeptide
MALPVTALLLPLALLLHAARPEIVMTQSPATLSLSPGERATLSCRASQDISKYLNWYQQKPGQAPRLLIYHTSRLHSGIPARFSGSGSGTDYTLTISSLQPEDFAVYFCQQGNTLPYTFGQGTKLEIKGGGGSGGGGSGGGGSQVQLQESGPGLVKPSETLSLTCTVSGVSLPDYGVSWIRQPPGKGLEWIGVIWGSETTYYNSSLKSRVTISKDNSKNQVSLKLSSVTAADTAVYYCAKHYYYGGSYAMDYWGQGTLVTVSSTRGGGSMDPDLEIEAAFLERENTALETRVAELRQRVQRLRNRVSQYRTRYGPLGGGK

SEQ ID NO: 12033 - protein, 322 aa, Artificial Sequence
  Synthetic Polypeptide
MALPVTALLLPLALLLHAARPEIVLTQSPATLSLSPGERATLSCRASQSVSSYLAWYQQKPGQAPRLLIYDASNRATGIPARFSGSGSGTDFTLTISSLEPEDFAVYYCQQRSNWPITFGQGTRLEIKGGGGSGGGGSGGGGSEVQLVESGGGLVQPGRSLRLSCAASGFTFNDYAMHWVRQAPGKGLEWVSTISWNSGSIGYADSVKGRFTISRDNAKKSLYLQMNSLRAEDTALYYCAKDIQYGNYYYGMDVWGQGTTVTVSSTRGGGSMDPDLEIEAAFLERENTALETRVAELRQRVQRLRNRVSQYRTRYGPLGGGK

SEQ ID NO: 12034 - protein, 325 aa, Artificial Sequence
  Synthetic Polypeptide
MALPVTALLLPLALLLHAARPDIVMTQTPLSLPVTPGEPASISCRSSKSLLHSNGITYLYWYLQKPGQSPQLLIYQMSNLVSGVPDRFSGSGSGTDFTLKISRVEAEDVGVYYCAQNLELPYTFGGGTKVEIKRGGGGSGGGGSGGGGSQVQLVQSGAEVKKPGSSVKVSCKASGYAFSYSWINWVRQAPGQGLEWMGRIFPGDGDTDYNGKFKGRVTITADKSTSTAYMELSSLRSEDTAVYYCARNVFDGYWLVYWGQGTLVTVSSTRGGGSMDPDLEIEAAFLERENTALETRVAELRQRVQRLRNRVSQYRTRYGPLGGGK

SEQ ID NO: 12035 - protein, 326 aa, Artificial Sequence
  Synthetic Polypeptide
MALPVTALLLPLALLLHAARPDIQMTQSPSSLSASVGDRVTITCRSSQSIVHSVGNTFLEWYQQKPGKAPKLLIYKVSNRFSGVPSRFSGSGSGTDFTLTISSLQPEDFATYYCFQGSQFPYTFGQGTKVEIKRGGGGSGGGGSGGGGSEVQLVESGGGLVQPGGSLRLSCAASGYEFSRSWMNWVRQAPGKGLEWVGRIYPGDGDTNYSGKFKGRFTISADTSKNTAYLQMNSLRAEDTAVYYCARDGSSWDWYFDVWGQGTLVTVSSTRGGGSMDPDLEIEAAFLERENTALETRVAELRQRVQRLRNRVSQYRTRYGPLGGGK

SEQ ID NO: 12036 - protein, 320 aa, Artificial Sequence
  Synthetic Polypeptide
MALPVTALLLPLALLLHAARPEIVLTQSPGTLSLSPGERATLSCRASQSVGGYLAWYQQKPGQAPRLLIYDASNRATGIPARFSGSGSGTDFTLTISSLEPEDFAVYYCQQRNNWPPMYTFGQGTKLEIKRGGGGSGGGGSGGGGSQVQLVQSGAEVKKPGSSVKVSCKASGGTFSSYAISWVRQAPGQGLEWMGGIIPILGTANYAQKFQGRVTITADESTSTAYMELSSLRSEDTAVYYCARWGGGAFDIWGQGTMVTVSSTRGGGSMDPDLEIEAAFLERENTALETRVAELRQRVQRLRNRVSQYRTRYGPLGGGK

SEQ ID NO: 12037 - protein, 317 aa, Artificial Sequence
  Synthetic Polypeptide
MALPVTALLLPLALLLHAARPDIQMTQSPATIENTSLSASVGDRVTITCRASQGISSWLTWYQQKPEKAPKSLIYAASSLQSGVPSRFSGSGSGTDFTLTISSLQPEDFATYYCQQYDSYPITFGQGTRLEIKGGGGSGGGGSGGGGSQVQLQQWGAGLLKPSETLSLTCAVYGGSFSAYYWSWIRQPPGKGLEWIGDINHGGGTNYNPSLKSRVTISVDTSKNQFSLKLNSVTAADTAVYYCASLTAYWGQGSLVTVSSTRGGGSMDPDLEIEAAFLERENTALETRVAELRQRVQRLRNRVSQYRTRYGPLGGGK

SEQ ID NO: 12038 - protein, 321 aa, Artificial Sequence
  Synthetic Polypeptide
MALPVTALLLPLALLLHAARPEIVLTQSPDSLAVSLGERATINCKASQSVDFDGDSYLNWYQQKPGQPPKVLIYAASTLQSGVPSRFSGSGSGTDFTLTINSLEAEDAATYYCQQSNEDPWTFGGGTKVEIKGGGGSGGGGSGGGGSQVQLVQSGAEVKKPGASVKVSCKVSGYTFTDYYITWVRQAPGQALEWMGWIYPGSGNTKYSQKFQGRFVFSVDTSASTAYLQLSSLKAEDTAVYYCANYGNYWFAYWGQGTLVTVSSTRGGGSMDPDLEIEAAFLERENTALETRVAELRQRVQRLRNRVSQYRTRYGPLGGGK

SEQ ID NO: 12039 - protein, 319 aa, Artificial Sequence
  Synthetic Polypeptide
MALPVTALLLPLALLLHAARPDIQMTQSPSSLSASVGDRVTITCRASQGISSWLAWYQQKPEKAPKSLIYAASSLQSGVPSRFSGSGSGTDFTLTISSLQPEDFATYYCQQYNSYPPTFGGGTKVEIKGGGGSGGGGSGGGGSEVQLVQSGGGLVHPGGSLRLSCAGSGFAFSSSTMHWIRQAPGKGLEWISLIGSGGGIYYGDSVKGRFTISRDNAKNSLYLQMNSLRAEDMAVYYCVRGYFDWVDYFDYWGQGTLVTVSSTRGGGSMDPDLEIEAAFLERENTALETRVAELRQRVQRLRNRVSQYRTRYGPLGGGK

SEQ ID NO: 12040 - protein, 325 aa, Artificial Sequence
  Synthetic Polypeptide
MALPVTALLLPLALLLHAARPDVVMTQSPLSLPVTLGQPASISCRSSQSIVHSDGNTYLEWYQQRPGQSPRRLIYKVSNRFSGVPDRFSGSGSGTDFTLKISRVEAEDVGVYYCFQGSHAPWTFGGGTKVEIKGGGGSGGGGSGGGGSEVQLVESGGGLVQPGGSLRLSCAASGFTFSSYGMHWVRQAPGKGLEWVAYITTRSSTIYYADSVKGRFTISRDNAKNSLYLQMNSLRAEDTAVYYCTREPLTGYYAMDYWGQGTSVTVSSTRGGGSMDPDLEIEAAFLERENTALETRVAELRQRVQRLRNRVSQYRTRYGPLGGGK

SEQ ID NO: 12041 - protein, 315 aa, Artificial Sequence
  Synthetic Polypeptide
MALPVTALLLPLALLLHAARPQIVLTQSPALMSASPGEKVTMTCSASSSVRYMYWYQQKPRSSPKPWIHLTSNLASGVPARFSGSGSGTSYSLTISSMEAEDAATYYCQQWSSHPFTFGSGTKLEIKGGGGSGGGGSGGGGSDVQLQESGPGLVKPSQSLSLTCTVTGFSITSDYSWNWIRQFPGNKLEWMGYISYSGHTSYNPSLESRISITRDTSKNQFFLQLNSVTTEDTATYYCTRGNWDVVYWGQGTLVTVSATRGGGSMDPDLEIEAAFLERENTALETRVAELRQRVQRLRNRVSQYRTRYGPLGGGK

SEQ ID NO: 12042 - protein, 324 aa, Artificial Sequence
  Synthetic Polypeptide
MALPVTALLLPLALLLHAARPEIVLTQSPGSLAVSPGERVTMSCKSSQSVFFSSSQKNYLAWYQQIPGQSPRLLIYWASTRESGVPDRFTGSGSGTDFTLTISSVQPEDLAIYYCHQYLSSRTFGQGTKLEIKRGGGGSGGGGSGGGGSQVQLQQPGAEVVKPGASVKMSCKASGYTFTSYYIHWIKQTPGQGLEWVGVIYPGNDDISYNQKFQGKATLTADKSSTTAYMQLSSLTSEDSAVYYCAREVRLRYFDVWGQGTTVTVSSTRGGGSMDPDLEIEAAFLERENTALETRVAELRQRVQRLRNRVSQYRTRYGPLGGGK

SEQ ID NO: 12043 - protein, 328 aa, Artificial Sequence
  Synthetic Polypeptide
MALPVTALLLPLALLLHAARPDIVMTQSPDSLTVSLGERTTINCKSSQSVLDSSKNKNSLAWYQQKPGQPPKLLLSWASTRESGIPDRFSGSGSGTDFTLTIDSLQPEDSATYYCQQSAHFPITFGQGTRLEIKGGGGSGGGGSGGGGSQVQLVQSGAEVKKPGASVKVSCKASGYTFTNYGMNWVKQAPGQGLKWMGWINTYTGEPTYADDFKGRVTMTSDTSTSTAYLELHNLRSDDTAVYYCARWSWSDGYYVYFDYWGQGTTVTVSSTRGGGSMDPDLEIEAAFLERENTALETRVAELRQRVQRLRNRVSQYRTRYGPLGGGK

SEQ ID NO: 12044 - protein, 328 aa, Artificial Sequence
  Synthetic Polypeptide
MALPVTALLLPLALLLHAARPDVLLTQSPLSLPVTLGQPASISCRSSQTIVHSNGNTYLEWFQQRPGQSPRLLIYQVSNRFSGVPDRFSGSGSGTDFTLKISRVEAEDVGVYYCFQGSHVPRTFGGGTKVEIKRGGGGSGGGGSGGGGSQIQLVQSGSELKKPGASVKVSCKASGYTFTNYGMNWVRQAPGQGLKWMGWINTNTGEPKYAEEFKGRFALSLDTSVSTAYLQINSLKAEDTAVYFCARGYGNYARGAWLAYWGQGTLVTVSSTRGGGSMDPDLEIEAAFLERENTALETRVAELRQRVQRLRNRVSQYRTRYGPLGGGK

SEQ ID NO: 12045 - protein, 323 aa, Artificial Sequence
  Synthetic Polypeptide
MALPVTALLLPLALLLHAARPDHIVLTQSPSSLSASLGDRVTISCRASQDISTYLNWYQQKPDGTVKLLIFYTSRLHAGVPSRFSGSGSGTHHSLTISNLEQEDIATYFCQQGNSLPFTFGSGTKLEIKRGGGGSGGGGSGGGGSQVQLKESGPELEKPGASVKISCKASGYSFTAYSMNWVKQNNGMSLEWIGSIDPYYGDTKYAQKFKGKATLTVDKASSTAYLQLKSLTSEDSAVYYCARRMITTGDWYFDVWGAGTTVTVSSTRGGGSMDPDLEIEAAFLERENTALETRVAELRQRVQRLRNRVSQYRTRYGPLGGGK

SEQ ID NO: 12046 - protein, 323 aa, Artificial Sequence; identical to SEQ ID NO: 12045
  Synthetic Polypeptide

SEQ ID NO: 12047 - protein, 323 aa, Artificial Sequence
  Synthetic Polypeptide
MALPVTALLLPLALLLHAARPDIVMTQSPDSLAVSLGERATINCRASKSVSTSGYSFMHWYQQKPGQPPKLLIYLASNLESGVPDRFSGSGSGTDFTLTISSLQAEDVAVYYCQHSREVPWTFGQGTKVEIKRGGGGSGGGGSGGGGSQVQLVQSGAEVKKPGASVKVSCKASGYTFTNYGMNWVRQAPGQGLEWMGWINTYTGEPTYADAFKGRFAFSLDTSTSTAYLQINSLRSDDTAVYYCARDYGDYGMDYWGQGTTVTVSSTRGGGSMDPDLEIEAAFLERENTALETRVAELRQRVQRLRNRVSQYRTRYGPLGGGK

SEQ ID NO: 12048 - protein, 319 aa, Artificial Sequence
  Synthetic Polypeptide
MALPVTALLLPLALLLHAARPDIVMTQTPLTLSVTIGQPASISCKSSQSLLDSDGKTYLNWLLQRPGQSPERLIYLVSKLDSGVPDRFTGSGSGTDFTLKISRVEAEDLGVYCCWQGTHFPYTFGGGTKVEIKGGGGGSGGGGSGGGGSQVQLQQPGAELVRPGASVKLSCKASGYTFTSYWMNWVKQRPGQGLEWIGMIDPSDSETHYNHIFKDKATLTVDKSSSTAYLQLSSLTSEDSAVYYCARNLYLWGQGTSVTVSSTRGGGSMDPDLEIEAAFLERENTALETRVAELRQRVQRLRNRVSQYRTRYGPLGGGK

SEQ ID NO: 12049 - protein, 322 aa, Artificial Sequence
  Synthetic Polypeptide
MALPVTALLLPLALLLHAARPDIQLTQSPSSLSASVGDRVTITCKASQSVDYEGDSFLNWYQQKPGKAPKLLIYAASNLESGVPSRFSGSGSGTDFTLTISSLQPEDFATYYCQQSNEDPLTFGQGTKVEIKRGGGGSGGGGSGGGGSEVQLVESGGGLVQPGGSLRLSCAASGYTFSSYWIEWVRQAPGKGLEWIGEILPGGGDTNYNEIFKGRATFSADTSKNTAYLQMNSLRAEDTAVYYCTRRVPIRLDYWGQGTLVTVSSTRGGGSMDPDLEIEAAFLERENTALETRVAELRQRVQRLRNRVSQYRTRYGPLGGGK

SEQ ID NO: 12050 - protein, 330 aa, Artificial Sequence
  Synthetic Polypeptide
MALPVTALLLPLALLLHAARPDIVMSQSPSSLAVSVGEKVTMSCKSSQSLLHSSNQKNYLAWYQQKPGQSPKVLIYWASTRESGVPDRFTGSGSGTDFTLTITSVKSEDLAVYYCQQYYSYPWTFGGGTRLEIKRGGGGSGGGGSGGGGSEVQLQQSVAELVKPGASVKMSCKVSGYTLTDHTIHWMKQRPEQGLEWIGYIYPRDGITGYNEKFKGKATLTADTSSSTAYMQLNSLTSEDSAVYFCARWGYSYRNYAYYYDYWGQGTTLTVSSTRGGGSMDPDLEIEAAFLERENTALETRVAELRQRVQRLRNRVSQYRTRYGPLGGGK

SEQ ID NO: 12051 - protein, 327 aa, Artificial Sequence
  Synthetic Polypeptide
MALPVTALLLPLALLLHAARPEIVLTQSPGTLSLSPGERATLSCRASQSVSSSYLAWYQQKPGQAPRLLIYGTSSRATGIPDRFSGSGSGTDFTLTISRLEPEDFAVYYCQQYGSSPFTFGGGTKVEIKRGGGGSGGGGSGGGGSQVQLQESGPGLAKPSETLSLTCTVSGDSITSYYWSWIRQPPGKGLEWIGYIYYSGSTNYNPSLKSRVTISVDTSKNQFSLKLSSVTAADTAVYYCARDQRRIAAAGTHFYGMDVWGQGTTVTVSSTRGGGSMDPDLEIEAAFLERENTALETRVAELRQRVQRLRNRVSQYRTRYGPLGGGK

SEQ ID NO: 12052 - protein, 317 aa, Artificial Sequence
  Synthetic Polypeptide
MALPVTALLLPLALLLHAARPDIQMTQSPSSLSASVGDRVTITCRASQSISLWLNWYQQKPGKAPKLLIYAASTLQSGVPSRFSGSGSGTDFTLTISSLQPEDFATYYCQQYYTSPYTFGQGTKVEIKRGGGGSGGGGSGGGGSQVQLLESGGGLVQPGGSLRLSCAASGFTFSSYAMSWVRQAPGKGLEWVSVIRSSGSSTYYADSVKGRFTISRDNSKNTLYLQMNSLRAEDTAVYYCARGGGYFDYWGQGTLVTVSSTRGGGSMDPDLEIEAAFLERENTALETRVAELRQRVQRLRNRVSQYRTRYGPLGGGK

SEQ ID NO: 12053 - protein, 320 aa, Artificial Sequence
  Synthetic Polypeptide
MALPVTALLLPLALLLHAARPDIQMTQSPSSLSASVGDRVTITCRASQSISSYLNWYQQKPGKAPKLLIYAVSTLQSGVPSRFSGSGSGTDFTLTISSLQPEDFATYYCQQSGTFPPTTFGQGTKVEIKRGGGGSGGGGSGGGGSQVQLLESGGGLVQPGGSLRLSCAASGFTFSSHGMHWVRQAPGKGLEWVSVISGSGSNTGYADSVKGRFTISRDNSKNTLYLQMNSLRAEDTAVYYCARQWGSYAFDSWGQGTLVTVSSTRGGGSMDPDLEIEAAFLERENTALETRVAELRQRVQRLRNRVSQYRTRYGPLGGGK

SEQ ID NO: 12054 - protein, 312 aa, Artificial Sequence
  Synthetic Polypeptide
MALPVTALLLPLALLLHAARPMTQSPKFLLVSAGDRVTLTCKASQSVNNDVYWYQQEPGQSPKLLIYWASTRESGVPDRFTGSGSGTDFTLTISSVQAEDLAVYYCKQSYNLYTFGGGTKLEIKRGGGGSGGGGSGGGGSESGRGLVQPGGSRKLSCAASGFTFSTSGMHWVRQAPEKGLEWVAYISSGSTTIYHADTVKGRFTISRDNPKNTLFLQMTSLRSEDTAMYYCCARSGQFGNYFDYWGQGTTLTVSSTRGGGSMDPDLEIEAAFLERENTALETRVAELRQRVQRLRNRVSQYRTRYGPLGGGK

SEQ ID NO: 12055 - protein, 317 aa, Artificial Sequence
  Synthetic Polypeptide
MALPVTALLLPLALLLHAARPQSPSSLAVSAGEKVTMSCKSSQSLLNSRTRKNYLAWYQQKPGQSPKLLIYWASTRESGVPDRFTGSGSGTDFTLTISSVQAEDLAVYYCKQSNLYTFGGGTKLEIKGGGGSGGGGSGGGGSQVQLEESGPELVKPGASVKLSCKASGYTFTEYIIHWVKQRSGQGLEWIGWFYPGSGSIKYNEKFKDKATLTADKSSSTVYMELSGLTSEDSAVYFCARHDGYSYFDYWGQGTTLTVSSTRGGGSMDPDLEIEAAFLERENTALETRVAELRQRVQRLRNRVSQYRTRYGPLGGGK

SEQ ID NO: 12056 - protein, 320 aa, Artificial Sequence
  Synthetic Polypeptide
MALPVTALLLPLALLLHAARPDIQMTQSPSSLSASLGERVSLTCRATQELSGYLSWLQQKPDGTIKRLIYAASTLDSGVPKRFSGNRSGSDYSLTISSLESEDFADYYCLQYAIYPYTFGGGTKLEIKGGGGSGGGGSGGGGSEVQLQQSGPELVKPGASVKMSCKASGYTFTSYFIHWVKQKPGQGLEWIGFINPYNDGSKYNEKFKGKATLTSDKSSSTAYMELSSLTSEDSAVYYCTRDDGYYGYAMDYWGQGTSVTVSSTRGGGSMDPDLEIEAAFLERENTALETRVAELRQRVQRLRNRVSQYRTRYGPLGGGK

SEQ ID NO: 12057 - protein, 325 aa, Artificial Sequence
  Synthetic Polypeptide
MALPVTALLLPLALLLHAARPDTIVLTQSPASLAVSLGQRATISCRASESVDSYGNSFMHWYQQKPGQPPKLLIYLASNLESGVPARFSGSGSRTDFTLTIDPVEADDAATYYCQQNNYDPWTFGGGTKLEIKGGGGSGGGGSGGGGSEVQLQQSGPELVKPGASVKMSCKASGYTFTSYVMHWVKQKPGQGLEWIGYINPYNDGTKYNEKFKGKATLTSDTSSSTAYMELNSLTSEDSAVYFCARPIYFDNDYFDYWGQGTTLKVSSTRGGGSMDPDLEIEAAFLERENTALETRVAELRQRVQRLRNRVSQYRTRYGPLGGGK

SEQ ID NO: 12058 - protein, 319 aa, Artificial Sequence
  Synthetic Polypeptide
MALPVTALLLPLALLLHAARPDIQMTQSPSSLSASVGDRVTITCKASQDVGIAVAWYQQKPGKVPKLLIYWASTRHTGVPDRFSGSGSGTDFTLTISSLQPEDVATYYCQQYSSYPYTFGQGTKVEIKGGGGSGGGGSGGGGSEVQLVESGGGLVQPGGSLRLSCAASGFDFSRYWMSWVRQAPGKGLEWIGEINPDSSTINYAPSLKDKFIISRDNAKNSLYLQMNSLRAEDTAVYYCARPDGNYWYFDVWGQGTLVTVSSTRGGGSMDPDLEIEAAFLERENTALETRVAELRQRVQRLRNRVSQYRTRYGPLGGGK

SEQ ID NO: 12059 - protein, 320 aa, Artificial Sequence
  Synthetic Polypeptide
MALPVTALLLPLALLLHAARPDIVMTQSQKSMSTSVGDRVSITCKASQDVITGVAWYQQKPGQSPKLLIYSASYRYTGVPDRFTGSGSGTDFTFTISNVQAEDLAVYYCQQHYSTPLTFGAGTKLELKGGGGSGGGGSGGGGSQVQLQQPGAELVRPGASVKLSCKASGYSFTTYWMNWVKQRPGQGLEWIGMIHPSDSETRLNQKFKDKATLTVDKSSSTAYMQLSSPTSEDSAVYYCARSTMIATRAMDYWGQGTSVTVSSTRGGGSMDPDLEIEAAFLERENTALETRVAELRQRVQRLRNRVSQYRTRYGPLGGGK

SEQ ID NO: 12060 - protein, 326 aa, Artificial Sequence
  Synthetic Polypeptide
MALPVTALLLPLALLLHAARPQSVLTQPPSVSGAPGQRVTISCTGSGSNIGAPYDVSWYQQLPGTAPKLLIYHNNKRPSGVPDRFSGSKSGTSASLAITGLQAEDEADYYCATVEAGLSGSVFGGGTKLTVLGAGGGGSGGGGSGGGGSQVQLVQSGAEVKKPGASVKVSCKVSGYTLTELSIHWVRQAPGKGLEWMGGFDPEENEIVYAQRFQGRVTMTEDTSTDTAYMELSSLRSEDTAVYYCAIVGSFSPLTLGLWGQGTMVTVSSTRGGGSMDPDLEIEAAFLERENTALETRVAELRQRVQRLRNRVSQYRTRYGPLGGGK

SEQ ID NO: 12061 - protein, 326 aa, Artificial Sequence
  Synthetic Polypeptide
MALPVTALLLPLALLLHAARPQSVLTQPPSVSGAPGQRVTISCTGSGSNIGAPYDVSWYQQLPGTAPKLLIYHNNKRPSGVPDRFSGSKSGTSASLAITGLQAEDEADYYCQSYDSSSISTIFGGGTKLTVLGAGGGGSGGGGSGGGGSQVQLVQSGAEVKKPGASVKVSCKVSGYTLTELSIHWVRQAPGKGLEWMGGFDPEENEIVYAQRFQGRVTMTEDTSTDTAYMELSSLRSEDTAVYYCAIVGSFSGIAYRPWGQGTMVTVSSTRGGGSMDPDLEIEAAFLERENTALETRVAELRQRVQRLRNRVSQYRTRYGPLGGGK

SEQ ID NO: 12062 - protein, 324 aa, Artificial Sequence
  Synthetic Polypeptide
MALPVTALLLPLALLLHAARPDIQMTQSPSSLSASVGDRVTITCSASSSVSYMYWYQQKPGKAPKLLIYLTSNLASGVPSRFSGSGSGTDFTLTISSLQPEDFATYYCQQWRSNPFTFGQGTKLEIKRGGGGSGGGGSGGGGSQITLKESGPTLVKPTQTLTLTCTFSGFSLSTSGMGVGWIRQPPGKALEWLAHIWWDDVKRYSPSLKSRLTITKDTSKNQVVLTMTNMDPVDTATYYCARIVSFDNDVVSAMDYWGQGTLVTVSSTRGGGSMDPDLEIEAAFLERENTALETRVAELRQRVQRLRNRVSQYRTRYGPLGGGK

SEQ ID NO: 12063 - protein, 319 aa, Artificial Sequence
  Synthetic Polypeptide
MALPVTALLLPLALLLHAARPEIVMTQSPATLSVSPGERATLSCKASQSVSNDVVWYQQKPGQAPRLLIYYASNRYTGIPARFSGSGSGTEFTLTISSLQSEDFAVYYCQQDYTSPWTFGQGTKLEIKRGGGGSGGGGSGGGGSQVQLVQSGAEVKKPGASVKVSCKASGYTFTNYGMNWVRQAPGQGLEWMGWINTYTGEPTYADDFKGRVTMTTDTSTSTAYMELRSLRSDDTAVYYCARIGDSSPSDYWGQGTLVTVSSTRGGGSMDPDLEIEAAFLERENTALETRVAELRQRVQRLRNRVSQYRTRYGPLGGGK

SEQ ID NO: 12064 - protein, 319 aa, Artificial Sequence
  Synthetic Polypeptide
MALPVTALLLPLALLLHAARPDILLTQSPVILSVSPGERVSFSCRASQSIGTNIHWYQQRTNGSPRLLIKYASESISGIPSRFSGSGSGTDFTLSINSVESEDIADYYCQQNNNWPTTFGAGTKLELKGGGGSGGGGSGGGGSQVQLKQSGPGLVQPSQSLSITCTVSGFSLTNYGVHWVRQSPGKGLEWLGVIWSGGNTDYNTPFTSRLSINKDNSKSQVFFKMNSLQSNDTAIYYCARALTYYDYEFAYWGQGTLVTVSATRGGGSMDPDLEIEAAFLERENTALETRVAELRQRVQRLRNRVSQYRTRYGPLGGGK

SEQ ID NO: 12065 - protein, 319 aa, Artificial Sequence
  Synthetic Polypeptide
MALPVTALLLPLALLLHAARPEIQLVQSGAEVKKPGESLRISCKGSGFNIEDYYIHWVRQMPGKGLEWMGRIDPENDETKYGPIFQGHVTISADTSINTVYLQWSSLKASDTAMYYCAFRGGVYWGQGTTVTVSSGGGGSGGGGSGGGGSDVVMTQSPDSLAVSLGERATINCKSSQSLLDSDGKTYLNWLQQKPGQPPKRLISLVSKLDSGVPDRFSGSGSGTDFTLTISSLQAEDVAVYYCWQGTHFPGTFGGGTKVEIKTRGGGSMDPDLEIEAAFLERENTALETRVAELRQRVQRLRNRVSQYRTRYGPLGGGK

SEQ ID NO: 12066 - protein, 327 aa, Artificial Sequence
  Synthetic Polypeptide
MALPVTALLLPLALLLHAARPELQMTQSPSSLSASVGDRVTITCRASQSISSYLNWYQQKPGQPPKLLIYWASTRESGVPDRFSGSESGTNYTLTISSLQPEDFATYFCQQSDSLPITFGQGTRLDIQGGGGSGGGGSGGGGSEVQLLESGGGVVQPGRSLRLSCAASGFTFSSYGMHWVRQAPGKGLEWVAVISYDGSNKYYADSVKGRFTISRDNSKNTLYLQMNSLRAEDTAVYYCAKDMGWGSGWRPYYYYGMDVWGQGTTVTVSSTRGGGSMDPDLEIEAAFLERENTALETRVAELRQRVQRLRNRVSQYRTRYGPLGGGK

SEQ ID NO: 12067 - protein, 326 aa, Artificial Sequence
  Synthetic Polypeptide
MALPVTALLLPLALLLHAARPELVMTQSPSSLTVTAGEKVTMSCKSSQSLLNSGNQKNYLTWYQQKPGQPPKLLIYWASTRESGVPDRFTGSGSGTDFTLTISSVQAEDLAVYYCQNDYSYPLTFGAGTKLEIKGGGGSGGGGSGGGGSEVQLLEQSGAELVRPGTSVKISCKASGYAFTNYWLGWVKQRPGHGLEWIGDIFPGSGNIHYNEKFKGKATLTADKSSSTAYMQLSSLTFEDSAVYFCARLRNWDEPMDYWGQGTTVTVSSTRGGGSMDPDLEIEAAFLERENTALETRVAELRQRVQRLRNRVSQYRTRYGPLGGGK

SEQ ID NO: 12068 - protein, 324 aa, Artificial Sequence
  Synthetic Polypeptide
MALPVTALLLPLALLLHAARPDIQMTQSPSSLSASVGDRVTITCRASQSISSYLNWYQQKPGKAPKLLIYAASSLQSGVPSRFSGSGSGTDFTLTISSLQPEDLATYYCQQSYSTPFTFGPGTKVDIKGGGGSGGGGSGGGGSVHEVQLVQSGAEVKKPGSSVKVSCKASGGTFSSYAISWVRQAPGQGLEWMGGIIPIFGTANYAQKFQGRVTITADKSTSTAYMELSSLRSEDTAVYYCATFALFGFREQAFDIWGQGTTVTVSSTRGGGSMDPDLEIEAAFLERENTALETRVAELRQRVQRLRNRVSQYRTRYGPLGGGK

SEQ ID NO: 12069 - protein, 318 aa, Artificial Sequence
  Synthetic Polypeptide
MALPVTALLLPLALLLHAARPYIHVTQSPSSLSVSIGDRVTINCQTSQGVGSDLHWYQHKPGRAPKLLIHHASSVEDGVPSRFSGTGFHTSFNLTINDLQADDIGTYYCQVLQSFGRGSRLDTKGGGGSGGGGSGGGGSRAHLVQSGTAMKKPGASVRVSCQTSGYTFTAHILFWFRQAPGRGLEWVGWIKPQYGAVNFGGGFRDRVTLTRDVYREIAYMDIRGLKPDDTAVYYCARDRSYGDSSWALDAWGQGTTVVVSATRGGGSMDPDLEIEAAFLERENTALETRVAELRQRVQRLRNRVSQYRTRYGPLGGGK

SEQ ID NO: 12070 - protein, 323 aa, Artificial Sequence
  Synthetic Polypeptide
MALPVTALLLPLALLLHAARPDIVLTQSPLSLAVSLGQPAIISCKASQSVSFAGTSLMHWYHQKPGQQPRLLIYRASNLEAGVPDRFSGSGSKTDFTLTISPVEAEDAATYYCQQSREYPYTFGGGTKLEIKRGGGGSGGGGSGGGGSQVQLVQSGAEVVKPGASVKISCKASGYTFTGYFMNWVKQSPGQSLEWIGRIHPYDGDTFYNQKFQGKATLTVDKSSNTAHMELLSLTSEDFAVYYCTRYDGSRAMDYWGQGTTVTVSSTRGGGSMDPDLEIEAAFLERENTALETRVAELRQRVQRLRNRVSQYRTRYGPLGGGK

SEQ ID NO: 12071 - protein, 319 aa, Artificial Sequence
  Synthetic Polypeptide
MALPVTALLLPLALLLHAARPDVVMTQTPLSLPVTPGEPASISCRSSQSLVHRNGNTYLHWYLQKPGQSPKLLIHKVSNRFSGVPDRFSGSGSGTDFTLKISRVEAEDLGVYFCSQSTHVPPLTFGAGTKLELKGGGGSGGGGSGGGGSEVQLVQSGAEVEKPGASVKISCKASGSSFTGYNMNWVRQNIGKSLEWIGAIDPYYGGTSYNQKFKGRATLTVDKSTSTAYMHLKSLRSEDTAVYYCVSGMEYWGQGTSVTVSSTRGGGSMDPDLEIEAAFLERENTALETRVAELRQRVQRLRNRVSQYRTRYGPLGGGK

SEQ ID NO: 12072 - protein, 317 aa, Artificial Sequence
  Synthetic Polypeptide
MALPVTALLLPLALLLHAARPEIVMTQTPATLSVSAGERVTITCKASQSVSNDVTWYQQKPGQAPRLLIYSASNRYSGVPARFSGSGYGTEFTFTISSVQSEDFAVYFCQQDYSSFGQGTKLEIKRGGGGSGGGGSGGGGSQVQLVESGPGVVQPGRSLRISCAVSGFSVTNYGVHWVRQPPGKGLEWLGVIWAGGITNYNSAFMSRLTISKDNSKNTVYLQMNSLRAEDTAMYYCASRGGHYGYALDYWGQGTLVTVSSTRGGGSMDPDLEIEAAFLERENTALETRVAELRQRVQRLRNRVSQYRTRYGPLGGGK

SEQ ID NO: 12073 - protein, 320 aa, Artificial Sequence
  Synthetic Polypeptide
MALPVTALLLPLALLLHAARPDIQMTQTASSLPASLGDRVTISCSASQDISNYLNWYQQKPDGTVKLLIFYSSNLHSGVPSRFSGGGSGTDYSLTISNLEPEDIATYFCHQYSKLPWTFGGGTKLEIKRGGGGSGGGGSGGGGSEVTLVESGGDFVKPGGSLKVSCAASGFAFSHYAMSWVRQTPAKRLEWVAYISSGGSGTYYSDSVKGRFTISRDNAKNTLYLQMRSLRSEDSAMYFCTRVKLGTYYFDSWGQGTTLTVSSTRGGGSMDPDLEIEAAFLERENTALETRVAELRQRVQRLRNRVSQYRTRYGPLGGGK

SEQ ID NO: 12074 - protein, 322 aa, Artificial Sequence
  Synthetic Polypeptide
MALPVTALLLPLALLLHAARPQFVLTQSPSASAALGASAKLTCTLSSAHKTYTIDWYQQQKGKAPRYLIQVKSDGTYTKATGVPDRFSGSSSGADRYLIIPSVQADDEADYYCGTDYTGGYVFGGGTQLTVTGGGGSGGGGSGGGGSEQLKESGGGLFKPTDTLTLTCTVSGFSLSYYGVNWVRQAPGNGLEWIGTIGGSGDTYYASWAKSRSTIIRNTNENTVTLKMTSLTAADTATYFCVRYANIGYEYFNVWGPGTLVTVSSTRGGGSMDPDLEIEAAFLERENTALETRVAELRQRVQRLRNRVSQYRTRYGPLGGGK

SEQ ID NO: 12075 - protein, 321 aa, Artificial Sequence
  Synthetic Polypeptide
MALPVTALLLPLALLLHAARPDIQMTQSPSSLSASVGDRVTITCRASQGISSWLAWYQQKPEKAPKSLIYAASSLQSGVPSRFSGSGSGTDFTLTISSLQPEDFATYYCQQYNSYPPTFGGGTKVEIKGGGGSGGGGSGGGGSEVQLVESGGGLVQPGESLRLSCVASGFTFSRYKMNWVRQAPGKGLEWVSYISRSGRDIYYADSVKGRFTISRDNAKNSLYLQMNSLRDEDTAVYYCAGTVTTYYYFGMDVWGHGTTVTVSSTRGGGSMDPDLEIEAAFLERENTALETRVAELRQRVQRLRNRVSQYRTRYGPLGGGK

SEQ ID NO: 12076 - protein, 320 aa, Artificial Sequence
  Synthetic Polypeptide
MALPVTALLLPLALLLHAARPQSVVTQPPSMSAAPGQQVTISCSGGNSNIERNYVSWYLQLPGTAPKLVIFDNDRRPSGIPDRFSGSKSGTSATLGITGLQTGDEADYYCGTWDSSLRGWVFGGGTKLTVLGGGGGSGGGGSGGGGSEVQLVESGGGLIQPGGSLRLSCAASGFTFSNYAMNWVRQAPGKGLEWVSTINGRGSSTIYADSVKGRFTISRDNSKNTLYLQMNSLRAEDTATYYCARYISRGLGDSWGQGTLVTVTRGGGSMDPDLEIEAAFLERENTALETRVAELRQRVQRLRNRVSQYRTRYGPLGGGK

SEQ ID NO: 12077 - protein, 321 aa, Artificial Sequence
  Synthetic Polypeptide
MALPVTALLLPLALLLHAARPQSVLTQPPSASGTPGQRVTISCSGSRSNVGGNYVFWYQQVPGATPKLLIYRSNQRPSGVPDRFAGSKSGSSASLAISGLRSEDEADYYCATWDDSLSGFVFGTGTKVTVLGGGGGSGGGGSGGGGSEVQLVESGGGLVKPGGSLRLSCAASGFTFSDYYMSWIRQAPGKGLEWVSYISSSGSTIYYADSVKGRFTISRDNAKNSLYLQMNSLRAEDTAVYYCARGYGKAYDQWGQGTLVTVSSTRGGGSMDPDLEIEAAFLERENTALETRVAELRQRVQRLRNRVSQYRTRYGPLGGGK

SEQ ID NO: 12078 - protein, 320 aa, Artificial Sequence
  Synthetic Polypeptide
MALPVTALLLPLALLLHAARPDIQMTQSPSSLSASVGDRVTITCRASQDVNTAVAWYQQKPGKAPKLLIYSASFLESGVPSRFSGSRSGTDFTLTISSLQPEDFATYYCQQHYTTPPTFGQTKVEIKRGGGGSGGGGSGGGGSEVQLVESGGGLVQPGGSLRLSCAASGFNIKDTYIHWVRQAPGKGLEWVARIYPTNGYTRYADSVKGRFTISADTSKNTAYLQMNSLRAEDTAVYYCSRWGGDGFYAMDVWGQGTLVTVSSTRGGGSMDPDLEIEAAFLERENTALETRVAELRQRVQRLRNRVSQYRTRYGPLGGGK

SEQ ID NO: 12079 - protein, 333 aa, Artificial Sequence
  Synthetic Polypeptide
MALPVTALLLPLALLLHAARPQSALTQPPSASGSPGQSITISCTGTSNNFVSWYQQHAGKAPKLVIYDVNKRPSGVPDRFSGSKSGNTASLTVSGLQTDDEAVYYCGSLVGNWDVIFGGGTKLTVLGGGGSGGGGSGGGGSQPQLQESGPTLVEASETLSLTCAVSGDSTAACNSFWGWVRQPPGKGLEWVGSLSHCASYWNRGWTYHNPSLKSRLTLALDTPKNLVFLKLNSVTAADTATYYCARFGGEVLRYTDWPKPAWVDLWGRGTLVTVSSTRGGGSMDPDLEIEAAFLERENTALETRVAELRQRVQRLRNRVSQYRTRYGPLGGGK

SEQ ID NO: 12080 - protein, 328 aa, Artificial Sequence
  Synthetic Polypeptide
MALPVTALLLPLALLLHAARPELVLTQSPGTLSLSAGERATLSCRASQSVSSGSLAWYQQKPGQAPRLLIYGASTRATGIPDRFSGSGSGTDFTLTIGRLEPEDLAVYYCQQYGTSPYTFGQGTKLEIGGGGSGGGGSGGGGSLEQSGAEVKKPGSSVQVSCKASGGTFSMYGFNWVRQAPGHGLEWMGGIIPIFGTSNYAQKFRGRVTFTADQATSTAYMELTNLRSDDTAVYYCARDFGPDWEDGDSYDGSGRGFFDFWGQGTLVTVSSTRGGGSMDPDLEIEAAFLERENTALETRVAELRQRVQRLRNRVSQYRTRYGPLGGGK

SEQ ID NO: 12081 - protein, 308 aa, Artificial Sequence
  Synthetic Polypeptide
MALPVTALLLPLALLLHAARPDIQMTQSPSSLSASVGDRVTITCQASQDINNYLNWYQQKPGKAPKLLIYDASNLQTGVPSRFSGSGSGTDFTFTIEDIATYYCQQYTFGPGTKVDIKGGGGSGGGGSGGGGSEVQLLESGGGLVQPGGSLRLSCAASGFTFSWYSMTWVRQAPGKGLEWVSSIVPWGDFTQYADSVKGRFTISRDNSKNTLYLQMNSLRAEDTAVYYCAKGPGWGSFDLWGRGTLVTVSSTRGGGSMDPDLEIEAAFLERENTALETRVAELRQRVQRLRNRVSQYRTRYGPLGGGK

SEQ ID NO: 12082 - protein, 318 aa, Artificial Sequence
  Synthetic Polypeptide
MALPVTALLLPLALLLHAARPDIQMTQSPSSLSASVGDRVTITCTASLSVSSTYLHWYQQKPGSSPKLWIYSTSNLASGVPSRFSGSGSGTSYTLTISSLQPEDFATYYCHQYHRSPLTFGGGTKVEIKRGGGGSGGGGSGGGGSEVQLVESGGGLVQPGGSLRLSCAASGFSLTKYGVHWVRQAPGKGLEWVGVKWAGGSTDYNSALMSRFTISKDNAKNSLYLQMNSLRAEDTAVYYCARDHRDAMDYWGQGTLVTVSSTRGGGSMDPDLEIEAAFLERENTALETRVAELRQRVQRLRNRVSQYRTRYGPLGGGK

SEQ ID NO: 12083 - protein, 322 aa, Artificial Sequence
  Synthetic Polypeptide
MALPVTALLLPLALLLHAARPDIQMTQSPSSLSASVGDRVTITCKASQDVGTAVAWYQQKPGKAPKLLIYSASYRSTGVPSRFSGSGSGTDFTLTISSLQPEDFATYYCQHHYSAPWTFGGGTKVEIKGGGGSGGGGSGGGGSEVQLVESGGGLVQPGGSLRLSCAASGFTFSRNGMSWVRQAPGKGLEWVATVSSGGSYIYYADSVKGRFTISRDNAKNSLYLQMNSLRAEDTAVYYCARQGTTALATRFFDVWGQGTLVTVSSTRGGGSMDPDLEIEAAFLERENTALETRVAELRQRVQRLRNRVSQYRTRYGPLGGGK

SEQ ID NO: 12084 - protein, 318 aa, Artificial Sequence
  Synthetic Polypeptide
MALPVTALLLPLALLLHAARPDIQMTQSFSSLSASVGDRVTITCRASQDISNYLNWYQQKPGKAPKLLIYYTSRLHSGVPSRFSGSGSGTDYTLTISSLQPEDFATYFCQQGNTLPWTFGGGTKLEIKRGGGGSGGGGSGGGGSEVQLVQSGGGLVQSGGSLRLSCRASGYTFTRYWMLWVRQRPGKGLEWVAEINPRNDRTNYNEKFKTRFTISVDRSKNTLYLQMDSLRAEDTAVYFCALGGGYAMDYWGQGTLVTVSSTRGGGSMDPDLEIEAAFLERENTALETRVAELRQRVQRLRNRVSQYRTRYGPLGGGK

SEQ ID NO: 12085 - protein, 318 aa, Artificial Sequence
  Synthetic Polypeptide
MALPVTALLLPLALLLHAARPDIQMTQSPPSLSASVGGKVTITCKASQDIDRYMAWYQDKPGKGPKLLIHDTSTLQPGIPSRFSGSGSGRDYSFSISNLEPEDIATYYCLQYDNLWTFGGGTKLEIKRGGGGSGGGGSGGGGSQVQLVQSGAELVKPGASVKMSCKASGYIFTNYNIHWVKKSPGQGLEWIGAIYPGNGDAPYSQKFQDRATLTADTSSSTTYMELSSLTSEDSAVYYCVRANWDVAFAYWGQGTLVSVSSTRGGGSMDPDLEIEAAFLERENTALETRVAELRQRVQRLRNRVSQYRTRYGPLGGGK

SEQ ID NO: 12086 - protein, 319 aa, Artificial Sequence
  Synthetic Polypeptide
MALPVTALLLPLALLLHAARPDIQMTQSPASLSASVGETVTITCRVSGNIHNYLAWYQQKQGKSPQLLVYNAKTLADGVPSRFSGSGSGTQYSLKINSLQPEDFGSYYCQHFWSNPYTFGGGTKLEIKGGGGSGGGGSGGGGSQVQLQQSGASVKVSCKASELVRPGTGYAFTNYLIEWVKQRPGQGLEWIGVINPGSGGTNYNEKFKGKATLTADKSSSTAYMQLSSLTSDDSAVYFCARYRSYDWYFDVWGAGTTVTVSSTRGGGSMDPDLEIEAAFLERENTALETRVAELRQRVQRLRNRVSQYRTRYGPLGGGK

SEQ ID NO: 12087 - protein, 319 aa, Artificial Sequence
  Synthetic Polypeptide
MALPVTALLLPLALLLHAARPDIQMTQSPASLSASVGETVTIICRASVNIYSYLAWYQQKQGKSPQLLVYNAKILAEGVPSRFSGSGSGTQFSLKINSLQPEDFGSYYCQHHYGTFTFGSGTKLEIKRGGGGSGGGGSGGGGSQVQLKESGPGLVAPSQSLSITCTISGFSLTSYGVHWVRQPPGKGLEWLVVIWSDGSTTYNSALKSRLSISKDNSKSQVFLKMNSLQTDDTAIYYCASHYGSTLAFASWGHGTLVTVSAATRGGGSMDPDLEIEAAFLERENTALETRVAELRQRVQRLRNRVSQYRTRYGPLGGGK

SEQ ID NO: 12088 - protein, 327 aa, Artificial Sequence
  Synthetic Polypeptide
MALPVTALLLPLALLLHAARPDIVMTQSHKFMSTSVGDRVSVTCKASQNVGNNVAWYQQKPGQSPKVLIYSASYRYSGVPDRFTGSGSGTDFTLTISNVQSEDLAEYFCQQYNTYPFTFGSGTKLEIKGGGGSGGGGSGGGGSEVQLEESGGGLVQPGGSMKLSCVASGFTFSNYWMNWVRQSPEKGLEWVAEIRFKSHNYATHFAESVKGRFTISRDDSKSSVYLQMNNLRAEDTGIYYCTRRIGNSDYDWWYFDVWGAGTSVTVSSASTRGGGSMDPDLEIEAAFLERENTALETRVAELRQRVQRLRNRVSQYRTRYGPLGGGK

SEQ ID NO: 12089 - protein, 319 aa, Artificial Sequence
  Synthetic Polypeptide
MALPVTALLLPLALLLHAARPDIQMTQSSSSFSVSLGDRVTITCKASEDIYIRLAWYQQKPGNAPRLLISAATSLETGIPSRFSGSGSGEDYTLTITSLQTEDVATYYCQQYWTTPWTFGGGTKLEIKRGGGGSGGGGSGGGGSDVQLQESGPGLVKPSQSLSLTCTVTGYSITIDYTWNWIRQFPGNKLEWMGYITYSGSTDYNPSLKSRSSITRDTSMNQFFLQLNSVTTEDTATYYCARLGRRYALDYWGQGTSVTVSSTRGGGSMDPDLEIEAAFLERENTALETRVAELRQRVQRLRNRVSQYRTRYGPLGGGK

SEQ ID NO: 12090 - protein, 318 aa, Artificial Sequence
  Synthetic Polypeptide
MALPVTALLLPLALLLHAARPDVQLQESGPGLVKPSQSLSLTCTVTGYSITSDYTWNWIRQFPGNKLEWMGYITYSGSTSYNPSLKSRNSITRDTSKNQFFLQLNSVTTEDTATYYCARLGRRYTMDYWGQGTSVTVSSGGGGSGGGGSGGGGSDIQMTQSSSSFSVSLGDRVTITCMASEDIYIRLAWYQQKPGNAPRLLISAATSLETGVPSRFSGSGSGKDYTLSITSLQTEDVGTYYCQQYWSSPWTFGGGTKLEINTRGGGSMDPDLEIEAAFLERENTALETRVAELRQRVQRLRNRVSQYRTRYGPLGGGK

SEQ ID NO: 12091 - protein, 318 aa, Artificial Sequence
  Synthetic Polypeptide
MALPVTALLLPLALLLHAARPDIQMTQSSSSFSVSLGDRVTITCMASEDIYIRLAWYQQKPGNAPRLLISAATSLETGVPSRFSGSGSGKDYTLSITSLQTEDVGTYYCQQYWSSPWTFGGGTKLEINGGGGSGGGGSGGGGSDVQLQESGPGLVKPSQSLSLTCTVTGYSITSDYTWNWIRQFPGNKLEWMGYITYSGSTSYNPSLKSRNSITRDTSKNQFFLQLNSVTTEDTATYYCARLGRRYTMDYWGQGTSVTVSSTRGGGSMDPDLEIEAAFLERENTALETRVAELRQRVQRLRNRVSQYRTRYGPLGGGK

SEQ ID NO: 12092 - protein, 320 aa, Artificial Sequence
  Synthetic Polypeptide
MALPVTALLLPLALLLHAARPDQIVLTQSPAIMSASPGEKVTISCSASSSVSYMYWYQQKPGSSPKPWIYRTSNLASGVPARFSGSGSGTSYSLTISNMEAEDAAAYYCQQYHSYPTTFGGGTKLEVKGGGGSGGGGSGGGGSEVQLVESGGGLVQPKGSLKLSCAASGFSFNTYAMNWVRQAPGKGLEWIAHIRSKSNNFATYYADSVKDRFSISRDASENILFLQMNNLKTEDTAMYYCVRQGGDFPMDYWGQGTSVTVSSTRGGGSMDPDLEIEAAFLERENTALETRVAELRQRVQRLRNRVSQYRTRYGPLGGGK

SEQ ID NO: 12093 - protein, 321 aa, Artificial Sequence
  Synthetic Polypeptide
MALPVTALLLPLALLLHAARPDIQMTQSPSSLSASVGDRVTITCRASQSISSYLNWYQQKPGKAPKLLIYDASNLETGVPSRFSGSGSGTDFTFTISSLQPEDIATYYCQQYDNLPLTFGGGTKVDIKRGGGGSGGGGSGGGGSQVQLVESGGGVVQPGRSLRLSCAASGFTFSSYAMHWVRQAPGKGLEWVAVISYDGSNKYYADSVKGRFTISRDNSKNTLYLQMNSLRAEDTAVYYCARAHNSSSWSFDYWGQGTLVTVSSTRGGGSMDPDLEIEAAFLERENTALETRVAELRQRVQRLRNRVSQYRTRYGPLGGGK

SEQ ID NO: 12094 - protein, 330 aa, Artificial Sequence
  Synthetic Polypeptide
MALPVTALLLPLALLLHAARPDVVMTQSPLSLPVSLGDQASISCRSSQRLVHSNGNTYLHWYLQKPGQSPKLLIYRVSNRFPGVPDRFSGSGSGTDFTLKISRVEAEDLGIYFCSQSTHVPYTFGGGTKLEIKRGGGGSGGGGSGGGGSEVRLQQSGPDLIKPGASVKMSCKASGYTFTGYVMHWVKQRPGQGLEWIGFINPYNDDIQSNERFRGKATLTSDKSSTTAYMELSSLTSEDSAVYYCARGAGYNFDGAYRFFDFWGQGTTLTVSSTRGGGSMDPDLEIEAAFLERENTALETRVAELRQRVQRLRNRVSQYRTRYGPLGGGK

SEQ ID NO: 12095 - protein, 321 aa, Artificial Sequence
  Synthetic Polypeptide
MALPVTALLLPLALLLHAARPSYELTQPPSVSVSPGQTATISCSGDQLGGKYGHWYQKKPGQSPVLVLYQDRKRPAGIPERFSGSSSGNTITLTISGTQAVDEADYYCQAWDTNLGGVFGGGTKVTVLGQGGGGSGGGGSGGGGSQVQLVESGAEVKKPGASVKVSCKASGYTFTGYYMHWVRQAPGQGLEWMGRINPNSGGTNYAQKFQGRVTMTRDTSISTAYMELSRLRSDDTAVYYCASPRGRGSAFDIWGQGTLVTVSSTRGGGSMDPDLEIEAAFLERENTALETRVAELRQRVQRLRNRVSQYRTRYGPLGGGK

SEQ ID NO: 12096 - protein, 324 aa, Artificial Sequence
  Synthetic Polypeptide
MALPVTALLLPLALLLHAARPNFMLTQPHSVSESPGKTVTISCTRSSGSIASKYVQWYQQRPGSSPTTVIYEDNQRPSGVPDRFSGSIDTSSNSASLTISGLRTEDEADYYCHSYDSNNHSVFGGGTKVTVLGQGGGGSGGGGSGGGGSEVQLVESGGGVVQPGGSLRLSCAASGFTFSSYAMSWVRQAPGKGLEWVSAISGSGGSTYYADSVKGRFSISRDNSKNTLYLQMNSLRAEDTAVYYCARTRSSGAFDIWGQGTLVTVSSTRGGGSMDPDLEIEAAFLERENTALETRVAELRQRVQRLRNRVSQYRTRYGPLGGGK

SEQ ID NO: 12097 - protein, 320 aa, Artificial Sequence
  Synthetic Polypeptide
MALPVTALLLPLALLLHAARPDIQMNQSPSSLSASLGDTITITCHASQNINVWLSWYQQKPGNIPKLLIYKASNLHTGVPSRFSGSGSGTGFTITISSLQPEDIATYYCQQGQSYPWTFGGGTKLEIKRGGGGSGGGGSGGGGSEVQLQQSGPELVKPGASVKISCKASGYSFTGYFMNWVKQSHGKSLEYIGRFNPYNGETLYNQKFKGKATLTVDKSSSTVHMELLSVTSEDSAVYYCGRSGNDDAMDYWGQGTSVTVSSATRGGGSMDPDLEIEAAFLERENTALETRVAELRQRVQRLRNRVSQYRTRYGPLGGGK

SEQ ID NO: 12098 - protein, 317 aa, Artificial Sequence
  Synthetic Polypeptide
MALPVTALLLPLALLLHAARPDILLTQSPAILSVSPGERVSFSCRASQNIGTSIHWYQQRTNGSPRLLIKYASESVSGIPSRFSGSGSGTDFTLSINSVESEDIADYYCQHTNSWPTTFGGGTKLEIKRGGGGSGGGGSGGGGSQVQLQQSDAELVKPGASVKISCKASGYTFTDHAIHWVKQKPEQGLEWIGYFSPGNGDIKYNEKFKGKATLTADKSSSTAYMQLNSLTSEDSAVYFCKRSYGNYDYWGQGTTLTVSSTRGGGSMDPDLEIEAAFLERENTALETRVAELRQRVQRLRNRVSQYRTRYGPLGGGK

SEQ ID NO: 12099 - protein, 322 aa, Artificial Sequence
  Synthetic Polypeptide
MALPVTALLLPLALLLHAARPDIVMTQSPDSLAVSLGERATINCKSSQSLLNSGDQKNYLTWYQQKPGQPPKLLIYWASTRESGVPDRFSGSGSGTDFTLTISSLQAEDVAVYYCQNDYSYPLTFGQGTKVEIKGGGGSGGGGSGGGGSQVQLVQSGAEVKKTGSSVKVSCKASGYTFTDHAIHVWRQAPGQALEWMGHFSPGNTDIKYNDKFKGRVTLTVDRSMSTAYMELSSLRSEDTAMYYCKTSTFFFDYWGQGTMVTVSSTRGGGSMDPDLEIEAAFLERENTALETRVAELRQRVQRLRNRVSQYRTRYGPLGGGK

SEQ ID NO: 12100 - protein, 321 aa, Artificial Sequence
  Synthetic Polypeptide
MALPVTALLLPLALLLHAARPDIQMTQSPSSLSASVGDRVTITCKASQDVSIAVAWYQQKPGKAPKVLIYSASYRYTGVPDRFSGSGSGTDFTFTISSLQPEDIAVYYCQQHYITPLTFGGGTKVEIKGGGGSGGGGSGGGGSQIQLVQSGHEVKKPGASVKVSCKASGYTFTNYGMNWVRQAPGQGLEWMGWINTKTGEPTYAEEFKGRFVFSLETSASTAYLQISSLKAEDTAMYFCGRGGYGSSYWYFDVWGQGTTVTVSSTRGGGSMDPDLEIEAAFLERENTALETRVAELRQRVQRLRNRVSQYRTRYGPLGGGK

SEQ ID NO: 12101 - protein, 324 aa, Artificial Sequence
  Synthetic Polypeptide
MALPVTALLLPLALLLHAARPQAVVTQPPSASGTPGQRVTISCSGSSSNIGSNTVNWYQQVPGTAPKLLIYSNNQRPSGVPDRFSGSKSGTSASLAISGLQSEDEADYYCAAWDDSLNGWVFGGGTKLTVLGGGGSGGGGSGGGGSQMQLVQSGAEVKEPGESLRISCKGSGYSFTNFWISWVRQMPGKGLEWMGRVDPGYSYSTYSPSFQGHVTISADKSTSTAYLQWNSLKASDTAMYYCARVQYSGYYDWFDPWGQGTLVTVSSTRGGGSMDPDLEIEAAFLERENTALETRVAELRQRVQRLRNRVSQYRTRYGPLGGGK

SEQ ID NO: 12102 - protein, 318 aa, Artificial Sequence
  Synthetic Polypeptide
MALPVTALLLPLALLLHAARPDIQMTQSPSTLSASVGDRVTITCRASQNINKWLAWYQQRPGKAPQLLIYKASSLESGVPSRFSGSGSGTEYTLTISSLQPDDFATYYCQQYNSYATFGQGTKVEIKRGGGGSGGGGSGGGGSQVQLVQSGAEVKKPGESLKISCKGSGYNFSNKWIGWVRQLPGRGLEWIAIIYPGYSDITYSPSFQGRVTISADTSINTAYLHWHSLKASDTAMYYCVRHTALAGFDYWGLGTLVTVSSTRGGGSMDPDLEIEAAFLERENTALETRVAELRQRVQRLRNRVSQYRTRYGPLGGGK

SEQ ID NO: 12103 - protein, 323 aa, Artificial Sequence
  Synthetic Polypeptide
MALPVTALLLPLALLLHAARPQSVVTQPPSVSVAPGKTARITCGRNNIGSKSVHWYQQKPGQAPVLVVYDDSDRPSGIPERFSGSNSGNTATLTISRVEAGDEADYYCQVWDSSSDHVVFGGGTKLTVLGGGGGSGGGGSGGGGSEVQLVQSGGGVVRPGGSLRLSCAASGFTFDDYGMSWVRQAPGKGLEWVSGINWNGGSTGYADSVRGRFTISRDNAKNSLYLQMNSLRAEDTALYYCARERGYGYHDPHDYWGQGTLVTVSSTRGGGSMDPDLEIEAAFLERENTALETRVAELRQRVQRLRNRVSQYRTRYGPLGGGK

SEQ ID NO: 12104 - protein, 322 aa, Artificial Sequence
  Synthetic Polypeptide
MALPVTALLLPLALLLHAARPDIVLTQSPASLAVSLGQRATISCRASESVDNYGNTFMHWYQQKPGQPPKLLIYRASNLESGIPARFSGSGSRTDFTLTINPVEADDVATYYCQQSNEDPPTFGAGTKLELKGGGGSGGGGSGGGGSQIQLVQSGPELKKPGETVKISCKASGYIFTNYGMNWVKQAPGKSFKWMGWINTYTGESTYSADFKGRFAFSLETSASTAYLHINDLKNEDTATYFCARSGGYDPMDYWGQGTSVTVSSTRGGGSMDPDLEIEAAFLERENTALETRVAELRQRVQRLRNRVSQYRTRYGPLGGGK

SEQ ID NO: 12105 - protein, 320 aa, Artificial Sequence
  Synthetic Polypeptide
MALPVTALLLPLALLLHAARPEIVLTQSPGTLSLSPGERATLSCRASQSVSNTYLAWYHQRPGQAPRLLIYGASSRATGIPDRFSGSGSGTDFALTISSLEPEDFAVYYCQQYSNSWTFGQGTKVEIKRGGGGSGGGGSGGGGSQVQLVESGGGVVQPGRSLRLSCAASGFTFSSYDMHWVRQAPGKGLEWVAVISYDGTNEYYADSVKGRFTISRDTSKNTLYLQMNSLRAEDTAVYYCARERYFDWSFDYWGQGTLVSVSSTRGGGSMDPDLEIEAAFLERENTALETRVAELRQRVQRLRNRVSQYRTRYGPLGGGK

SEQ ID NO: 12106 - protein, 319 aa, Artificial Sequence
  Synthetic Polypeptide
MALPVTALLLPLALLLHAARPELTQDPAVSVALGQTVRITCQGDSLRSNYANWYQQKPGQAPVLVIYGQNNRPSGIPDRFSGSSSGNTASLTITGAQAADEADYYCDSRVSTGNHVVFGGGTKLTVLGQGGGGSGGGGSGGGGSEVQLVQSGAEVKKPGASVKVSCKASGYTFTSYAMHWVRQAPGQRLEWMGWINAGNGNTKYSQKFQGRVTITRDTSASTAYMELSSLRSEDTAVYYCARDISYGSFDYWGQGTLVTVSSTRGGGSMDPDLEIEAAFLERENTALETRVAELRQRVQRLRNRVSQYRTRYGPLGGGK

SEQ ID NO: 12107 - protein, 315 aa, Artificial Sequence
  Synthetic Polypeptide
MALPVTALLLPLALLLHAARPDIQMTQSPSSLSASVGDRVTITCSATSSISYMHWYQQKPGKAPKGWIYDTSKLAHGVPSRFSGSGSGTDFTLTISSLQPEDFATYYCHQRRSYPFTFGQGTKVEIKGGGGSGGGGSGGGGSEVQLVQSGAEVKKPGASVKVSCKASGYTFTNFWIHWVRQAPGQGLEWIGEIDPSDSYTNYNQKFKGRVTITRDTSTSTAYLELSSLRSEDTAVYYCAREITTVDYWGQGTLVTVSSTRGGGSMDPDLEIEAAFLERENTALETRVAELRQRVQRLRNRVSQYRTRYGPLGGGK

SEQ ID NO: 12108 - protein, 322 aa, Artificial Sequence
  Synthetic Polypeptide
MALPVTALLLPLALLLHAARPDIQMTQSPSSLSASVGDRVTITCKASQGFNKYVAWYQQKPGKAPKLLIYYTSTLQPGVPSRFSGSGSGRDYTLTISSLQPEDFATYYCLQYGNLLYAFGQGTKVEIKRGGGGSGGGGSGGGGSEVQLVQSGAEVKKPGASVKVSCKASGYTFTSYWIGWVRQAPGQGLEWIGDIYPGGGYTNYNEKFKGRVTITRDTSTSTAYLELSSLRSEDTAVYYCARLDGSSYRGAMDSWGQGTLVTVSSTRGGGSMDPDLEIEAAFLERENTALETRVAELRQRVQRLRNRVSQYRTRYGPLGGGK

SEQ ID NO: 12109 - protein, 318 aa, Artificial Sequence
  Synthetic Polypeptide
MALPVTALLLPLALLLHAARPDIQMTQSPSSLSASVGDRVTITCRASQDIRYYLNWYQQKPGKAPKLLIYVASSLQSGVPSRFSGSGSGTEFTLTVSSLQPEDFATYYCLQVYSTPRTFGQGTKVEIKGGGGSGGGGSGGGGSEVQLVESGGGLAKPGGSLRLSCAASGFRFTFNNYYMDWVRQAPGQGLEWVSRISSSGDPTWYADSVKGRFTISRENAKNTLFLQMNSLRAEDTAVYYCASLTTGSDSWGQGVLVTVSSTRGGGSMDPDLEIEAAFLERENTALETRVAELRQRVQRLRNRVSQYRTRYGPLGGGK

SEQ ID NO: 12110 - protein, 319 aa, Artificial Sequence
  Synthetic Polypeptide
MALPVTALLLPLALLLHAARPEIVMTQSPATLSVSPGERATLSCRASQSVSRNLAWYQQKPGQAPRLLIYGASTRATGIPARFSGSGSGTEFTLTIGSLQSEDFAVYYCQQYKTWPRTFGQGTNVEIKGGGGSGGGGSGGGGSQVQLQQWGAGLLKPSETLSLTCAVFGGSFSGYYWSWIRQPPGKGLEWIGEINHRGNTNDNPSLKSRVTISVDTSKNQFALKLSSVTAADTAVYYCARERGYTYGNFDHWGQGTLVTVSSTRGGGSMDPDLEIEAAFLERENTALETRVAELRQRVQRLRNRVSQYRTRYGPLGGGK

SEQ ID NO: 12111 - protein, 325 aa, Artificial Sequence
  Synthetic Polypeptide
MALPVTALLLPLALLLHAARPDIQMTQSPSSLSASVGDRVTITCKASKNIRSYLAWYQQKPGKAPKLLIYSGSTLHSGVPSRFSGSGSGTDFTLTISSLQPEDFATYYCQQHHEYPLTFGQGTKVEIKRGGGGSGGGGSGGGGSQVQLQESGPGLVKPSETLSLTCTVSGYTITSGYDWSWIRQPPGKGLEWIGYINYGGSTNYKPSLGSRVTISVDTSKNQFSLKLSSVTAADTAVYYCARYNEYKSYIYDWYFDFWGQGTLVTVSSTRGGGSMDPDLEIEAAFLERENTALETRVAELRQRVQRLRNRVSQYRTRYGPLGGGK

SEQ ID NO: 12112 - protein, 327 aa, Artificial Sequence
  Synthetic Polypeptide
MALPVTALLLPLALLLHAARPQSVVTQPPSVSAAPGQKVTISCSGSSSNIGNNYVSWYQQLPGTAPKLLIYDNNKRPSGIPDRFSGSKSGTSATLGITGLQTGDEADYYCGTWDGSLYTMLFGGGTKLTVLGGGGSGGGGSGGGGSEVQLVESGGGLVKPGGSLRLSCAASGFTFSNAWMSWVRQAPGKGLEWVGFIRSKAYGGTTEYAASVKGRFTISRDDSKSIAYLQMNNLKTEDTAVYYCARDGLYSSSWYDSDYWGQGTLVTVSSTRGGGSMDPDLEIEAAFLERENTALETRVAELRQRVQRLRNRVSQYRTRYGPLGGGK

SEQ ID NO: 12113 - protein, 332 aa, Artificial Sequence
  Synthetic Polypeptide
MALPVTALLLPLALLLHAARPQSVLTQPPSVSGAPGQRVTISCTGSSSNIGAGYDVHWYQQLPGTAPKLLIFGNSNRPSGVPDRFSGFKSGTSASLAITGLQAEDEADYFCQSYDSSLSGSGVFGTGTKVTVLGGGGGSGGGGSGGGGSQMQLVQSGGGLVQPGRSLRLSCAASGFTFDDYAMHWVRQAPGKGLEWVSGISWNSGSIGYADSVKGRFTISRDNAKNSLYLQMNSLRAEDTALYYCAKDIHSGSYYGLLYYAMDVWGQGTTVTVSSTRGGGSMDPDLEIEAAFLERENTALETRVAELRQRVQRLRNRVSQYRTRYGPLGGGK

SEQ ID NO: 12114 - protein, 332 aa, Artificial Sequence
  Synthetic Polypeptide
MALPVTALLLPLALLLHAARPLPVLTQPPSASGTPGQRVTISCSGRSSNIGSNSVNWYRQLPGAAPKLLIYSNNQRPPGVPVRFSGSKSGTSASLAISGLQSEDEATYYCATWDDNLNVHYVFGTGTKVTVLGSRGGGGSGGGGSGGGGSLEMAQVQLVQSGAEVKKPGSSVKVSCKASGGTFSSYAISWVRQAPGQGLEWMGRIIPILGIANYAQKFQGRVTITADKSTSTAYMELSSLRSEDTAVYYCARGGYYSHDMWSEDWGQGTLVTVSSTRGGGSMDPDLEIEAAFLERENTALETRVAELRQRVQRLRNRVSQYRTRYGPLGGGK

SEQ ID NO: 12115 - protein, 321 aa, Artificial Sequence
  Synthetic Polypeptide
MALPVTALLLPLALLLHAARPDIVLTQSPASLAVSLGERATINCRASESVSVIGAHLIHWYQQKPGQPPKLLIYLASNLETGVPARFSGSGSGTDFTLTISSLQAEDAAIYYCLQSRIFPRTFGQGTKLEIKGGGGSGGGGSGGGGSQVQLVQSGSELKKPGESVKISCKASGYTFTDYSINWVKQAPGQGLKWMGWINTETREPAYAYDFRGRFVFSLDTSASTAYLQISSLKAEDTAVYFCALDYSYAMDYWGQGTLVTVSSTRGGGSMDPDLEIEAAFLERENTALETRVAELRQRVQRLRNRVSQYRTRYGPLGGGK

SEQ ID NO: 12116 - protein, 322 aa, Artificial Sequence
  Synthetic Polypeptide
MALPVTALLLPLALLLHAARPDIVLTQSPATLSLSPGDRATLSCRASESVTILGSHLIYWYQQKPGQAPRLLIQLASNVQTGIPARFSGSGSRTDFTLTISSLEPEDFAVYYCLQSRTIPRTFGQGTKLEIKRGGGGSGGGGSGGGGSQVQLVQSGSELKKPGESVKISCKASGYTFTHYSMNWVRQAPGQGLEWMGRINTETGEPLYADDFKGRFVFSLDTSASTAYLQISSLKAEDTAVYYCSNDYLYSLDYWGQGTLVTVSSTRGGGSMDPDLEIEAAFLERENTALETRVAELRQRVQRLRNRVSQYRTRYGPLGGGK

SEQ ID NO: 12117 - protein, 326 aa, Artificial Sequence
  Synthetic Polypeptide
MALPVTALLLPLALLLHAARPDFVMTQSPDSLAVSLGERVTMSCKSSQSLLNSGNQKNYLTWYQQKPGQPPKLLIYWASTRESGVPDRFSGSGSGTDFTLTISSLQAEDVAVYYCQNDYSYPYTFGQGTKLEIKGGGGSGGGGSGGGGSEVQLVQSGAELKKPGASVKVSCKASGYTFTDYYMKWVRQAPGQGLEWIGDIIPSNGATFYNQKFKGRVTITVDKSTSTAYMELSSLRSEDTAVYYCARSHLLRASWFAYWGQGTLVTVSSTRGGGSMDPDLEIEAAFLERENTALETRVAELRQRVQRLRNRVSQYRTRYGPLGGGK

SEQ ID NO: 12118 - protein, 326 aa, Artificial Sequence
  Synthetic Polypeptide
MALPVTALLLPLALLLHAARPDFVMTQSPDSLAVSLGERVTMSCKSSQSLLNSGNQKNYLTWYQQKPGQPPKLLIYWASTRESGVPDRFSGSGSGTDFTLTISSLQAEDVAVYYCQNDYSYPYTFGQGTKLEIKGGGGSGGGGSGGGGSQVQLVQSGAELKKPGASVKVSCKASGYTFTDYYMKWVRQAPGQGLEWIGDIIPSNGATFYNQKFKGRVTITVDKSTSTAYMELSSLRSEDTAVYYCARSHLLRASWFAYWGQGTLVTVSSTRGGGSMDPDLEIEAAFLERENTALETRVAELRQRVQRLRNRVSQYRTRYGPLGGGK

SEQ ID NO: 12119 - protein, 316 aa, Artificial Sequence
  Synthetic Polypeptide
MALPVTALLLPLALLLHAARPDVQITQSPSYLAASPGETITINCRASKSISKDLAWYQEKPGKTNKLLIYSGSTLQSGIPSRFSGSGSGTDFTLTISSLEPEDFAMYYCQQHNKYPYTFGGGTKLEIKRGGGGSGGGGSGGGGSQVQLQQPGAELVRPGASVKLSCKASGYTFTSYWMNWVKQRPDQGLEWIGRIDPYDSETHYNQKFKDKAILTVDKSSSTAYMQLSSLTSEDSAVYYCARGNWDDYWGQGTTLTVSSTRGGGSMDPDLEIEAAFLERENTALETRVAELRQRVQRLRNRVSQYRTRYGPLGGGK

SEQ ID NO: 12120 - protein, 318 aa, Artificial Sequence
  Synthetic Polypeptide
MALPVTALLLPLALLLHAARPEIVLTQSPTSMTASPGEQVTITCRASSSINYMHWYQQKPGASPRPWIYETSKLASGVPDRFSGSASGTSYSLTINNMEAEDAATYYCQQWNYPSWTFGGGTKLELKGGGGSGGGGSGGGGSEVQLVESGGGLVQPGRSLKLSCAASGFTFSDYNMAWVRQAPKKGLEWVATILYDGGRTYYRGSVKGRFTISRDNAKSTLYLRMDSLRSEDTATYYCATHSRGTDYFDYWGQGVMVTVSSTRGGGSMDPDLEIEAAFLERENTALETRVAELRQRVQRLRNRVSQYRTRYGPLGGGK

SEQ ID NO: 12121 - protein, 327 aa, Artificial Sequence
  Synthetic Polypeptide
MALPVTALLLPLALLLHAARPDIVMTQSPSSLAVSEGETVTINCKSSQSFLSSGDGKNYVAWYQYKPGQSPKLLIYWASTRQSGVPDRFIGSGSGTDFTLTISTVQAEDLAIYYCQQYYDTPLTFGSGTKLEIKGGGGSGGGGSGGGGSEVKLQESGPSLVQSSQTLSLTCTVSGFSLTSYHIHWVRQTPGKGLEWMGVMWSDGDTSYNSALKSRLSISRDTSQSQVFLKMNSLQTEDTATYYCARGYYSSYLYLWFAYWGQGTLVTVSSTRGGGSMDPDLEIEAAFLERENTALETRVAELRQRVQRLRNRVSQYRTRYGPLGGGK

SEQ ID NO: 12122 - protein, 331 aa, Artificial Sequence
  Synthetic Polypeptide
MALPVTALLLPLALLLHAARPDVLMTQTPVSLPVSLGGQVSISCRSSQSLVHSDGDTYLHWYLQKPGQSPQLLIYRVSNRFSGVPDRFSGSGSGTDFTLKISRVEPEDLGLYYCLQTTHFPPWTFGGGTKLEMKGGGGSGGGGSGGGGSQVQLQQSGPELRRPGSSVRLSCKASGYRIKDFLIHWIKNRPEHGLEWIGWIDPEDGETKYAQKFQTKATLTADTSSNTAYMQLSSLTSEDTATYFCARWGDVYYGLMRGHVMDAWGQGTSVTVSSTRGGGSMDPDLEIEAAFLERENTALETRVAELRQRVQRLRNRVSQYRTRYGPLGGGK

SEQ ID NO: 12123 - protein, 327 aa, Artificial Sequence
  Synthetic Polypeptide
MALPVTALLLPLALLLHAARPDIVMTQAAPSIPVTPGESVSISCRSSKSLLNSNGNTYLYWFLQRPGQSPQLLIYRMSNLASGVPDRFSGSGSGTAFTLRISRVEAEDVGVYYCMQHLEYPFTFGAGTKLELKRGGGGSGGGGSGGGGSEVQLQQSGPELIKPGASVKMSCKASGYTFTSYVMHWVKQKPGQGLEWIGYINPYNDGTKYNEKFKGKATLTSDKSSSTAYMELSSLTSEDSAVYYCARGTYYYGSRVFDYWGQGTTLTVSSTRGGGSMDPDLEIEAAFLERENTALETRVAELRQRVQRLRNRVSQYRTRYGPLGGGK

SEQ ID NO: 12124 - protein, 327 aa, Artificial Sequence; identical to SEQ ID NO: 12123
  Synthetic Polypeptide

SEQ ID NO: 12125 - protein, 345 aa, Artificial Sequence
  Synthetic Polypeptide
MALPVTALLLPLALLLHAARPINIYNAEPANPSEKNSPEFDIVMTQSPATLSLSPGERATLSCRSSKSLQNVNGNTYLYWFQQKPGQSPQLLIYRMSNLNSGVPDRFSGSGSGTEFTLTISSLEPEDFAVYYCMQHLEYPITFGAGTKLEIKGGGGSGGGGSGGGGSEVQLVESGGGLVKPGGSLKLSCAASGYTFTSYVMHWVRQAPGKGLEWIGYINPYNDGTKYNEKFQGRVTISSDKSISTAYMELSSLRSEDTAMYYCARGTYYYGTRVFDYWGQGTLVTVSSTRGGGSMDPDLEIEAAFLERENTALETRVAELRQRVQRLRNRVSQYRTRYGPLGGGK

SEQ ID NO: 12126 - protein, 322 aa, Artificial Sequence
  Synthetic Polypeptide
MALPVTALLLPLALLLHAARPDIQMTQSPSSLSASVGDRVTITCKASDHINNWLAWYQQKPGQAPKLLIYGATTLETGVPSRFSGSGSGTDYTLTISSLQPEDFATYYCQQSWNTPWTFGQGTKLEIKRGGGGSGGGGSGGGGSQVQLQQPGAELVKPGASVKMSCKASGYAFSSYWINWMKQKPGQGLEWIGQIYPGDGDTNYNGKFKGRATLTADTSSSTAYMQLSSLTSEDSAVYFCARSITTVVGCAMDYWGQGTSVTVSSTRGGGSMDPDLEIEAAFLERENTALETRVAELRQRVQRLRNRVSQYRTRYGPLGGGK

SEQ ID NO: 12127 - protein, 324 aa, Artificial Sequence
  Synthetic Polypeptide
MALPVTALLLPLALLLHAARPQIVLSQSPAILSASPGEKVTMTCRASSSVSYMHWYQQKPGSSPKPWIYATSNLASGVPARFSGSGSGTSYSFTISRVEAEDAATYYCQQWTFNPPTFGGGTRLEIKRTVAAGGGGSGGGGSGGGGSQAYLQQSGAELVRPGASVKMSCKASGYTFTSYNMHWVKQTPRQGLEWIGGIYPGNGDTSYNQKFKGKATLTVGKSSSTAYMQLSSLTSEDSAVYFCARYDYNYAMDYWGQGTSVTVSSASTRGGGSMDPDLEIEAAFLERENTALETRVAELRQRVQRLRNRVSQYRTRYGPLGGGK

SEQ ID NO: 12128 - protein, 323 aa, Artificial Sequence
  Synthetic Polypeptide
MALPVTALLLPLALLLHAARPDEIVLTQSPATLSLSPGERATLSCRASQSVSSYLAWYQQKPGQAPRLLIYDASNRATGIPARFSGSGSGTDFTLTISSLEPEDFAVYYCQQRSNWPITFGQGTRLEIKGGGGSGGGGSGGGGSEVQLVESGGGLVQPDRSLRLSCAASGFTFHDYAMHWVRQAPGKGLEWVSTISWNSGTIGYADSVKGRFTISRDNAKNSLYLQMNSLRAEDTALYYCAKDIQYGNYYYGMDVWGQGTTVTVSSTRGGGSMDPDLEIEAAFLERENTALETRVAELRQRVQRLRNRVSQYRTRYGPLGGGK

SEQ ID NO: 12129 - protein, 317 aa, Artificial Sequence
  Synthetic Polypeptide
MALPVTALLLPLALLLHAARPDIQMTQSPSSLSASVGDRVTINCKASQDINSYLSWFQQKPGKAPKTLIYRANRLVDGVPSRFSGSGSGQDYTLTISSLQPEDFATYYCLQYDEFPLTFGGGTKVEIKGGGGSGGGGSGGGGSQVQLVQSGAEVKKPGASVKVSCKASGYTFTNYDINWVRQAPGQGLEWIGWIYPGDGSTKYNEKFKAKATLTADTSTSTAYMELRSLRSDDTAVYYCASGYEDAMDYWGQGTTVTVSSTRGGGSMDPDLEIEAAFLERENTALETRVAELRQRVQRLRNRVSQYRTRYGPLGGGK

SEQ ID NO: 12130 - protein, 319 aa, Artificial Sequence
  Synthetic Polypeptide
MALPVTALLLPLALLLHAARPDIVMTQTPLSLSVTPGQPASISCKSSQSLLDGDGKTYLNWLLQKPGQSPQRLIYLVSKLDSGVPDRFSGSGSGTDFTLKISRVEAEDVGVYYCWQGTHFPRTFGQGTKLEIKGGGGSGGGGSGGGGSQVQLVQSGAEVKKPGASVKVSCKASGYTFKDTYIHWVRQAPGQGLEWMGRIDPANGNTKYDPKFQGRVTMTRDTSISTAYMELSRLRSDDTAVYYCARRGGVDWGQGTLVTVSSTRGGGSMDPDLEIEAAFLERENTALETRVAELRQRVQRLRNRVSQYRTRYGPLGGGK

SEQ ID NO: 12131 - protein, 320 aa, Artificial Sequence
  Synthetic Polypeptide
MALPVTALLLPLALLLHAARPDIQMTQSPSSLSASVGDRVTITCKASQDVSTAVAWFQQKPGKAPKLLIYSPSYRYTGVPSRFSGSGSGTDFTLTISSLQPEDFTYYCQQLYSTPYTFGQGTKVEIKGGGGSGGGGSGGGGSEVQLVQSGAEVKKPGASVKVSCKASGYTFTDYYLDVVVRQAPGQGLEWIGRVNPYNGGTIYNQKFKGRVTLTRDTSTSTAYLELSSLRSEDTAVYYCARDHYRYDPLLDYWGQGTLVTVSSTRGGGSMDPDLEIEAAFLERENTALETRVAELRQRVQRLRNRVSQYRTRYGPLGGGK

SEQ ID NO: 12132 - protein, 326 aa, Artificial Sequence
  Synthetic Polypeptide
MALPVTALLLPLALLLHAARPDIQMTQSPSSLSASVGDRVTITCRASQSVSTSSYNYMHWYQQKPGKPPKLLIKYASNLESGVPSRFSGSGSGTDFTLTISSLQPEDFATYYCQHSWEIPLTFGQGTKVEIKGGGGSGGGGSGGGGSEVQLVQSGAEVKKPGASVKVSCKASGYSFTDYYMHWVRQAPGQGLEWIGRINPYNGAAFYSQNFKDRVTLTVDTSTSTAYLELSSLRSEDTAVYYCAIERGADLEGYAMDYWGQGTLVTVSSTRGGGSMDPDLEIEAAFLERENTALETRVAELRQRVQRLRNRVSQYRTRYGPLGGGK

SEQ ID NO: 12133 - protein, 324 aa, Artificial Sequence
  Synthetic Polypeptide
MALPVTALLLPLALLLHAARPEIVLTQSPATLSASPGERVTLTCRASSNVISSYVHWYQQKPGSSPRLFLYSTSNLASGVPSRFSGSGSGTDFTFTISSLEAEDAATYYCQQYSGYPLTFGQGTRLEIKGGGGSGGGGSGGGGSQVQLQESGPGLVKPSETLSLTCAVSGYSITSAYYWNWIRQPPGKGLEWIGYISYDGRNNYNPSLKNRITINPDTSKNQFSLQLNSVTPEDTAVYYCAREGDYDVGNYYAMDYWGQGTLVTVSSTRGGGSMDPDLEIEAAFLERENTALETRVAELRQRVQRLRNRVSQYRTRYGPLGGGK

SEQ ID NO: 12134 - protein, 324 aa, Artificial Sequence
  Synthetic Polypeptide
MALPVTALLLPLALLLHAARPEIVLTQSPATLSLSPGERATLSCRASSNVISSYVHWYQQKPGQAPRLLIYSTSNLASGIPARFSGSGSGTDFTLTISSLEPEDFAVYYCQQYSGYPLTFGQGTRLEIKGGGGSGGGGSGGGGSEVQLVESGGGLVQPGRSLRLSCAASGYSITSAYYWNWVRQAPGKGLEWVSYISYDGRNNYNPSLKNRFTISRDNAKKSLYLQMNSLRAEDTALYYCAKEGDYDVGNYYAMDYWGQGTTVTVSSTRGGGSMDPDLEIEAAFLERENTALETRVAELRQRVQRLRNRVSQYRTRYGPLGGGK

SEQ ID NO: 12135 - protein, 333 aa, Artificial Sequence
  Synthetic Polypeptide
MALPVTALLLPLALLLHAARPDVVMTQTPLSLPVSLGDQASISCRSSQSLVHSNGNTYLRWYLQKPGQSPKVLIYKVSNRVSGVPDRFSGSGSGTDFTLKINRVEAEDLGVYFCSQSTHVPWTFGGGTKLEIKSSADDAKKDAAKKDDAKKDDAKKDGGVKLDETGGGLVQPGGAMKLSCVTSGFTFGHYWMNWVRQSPEKGLEWVAQFRNKPYNYETYYSDSVKGRFTISRDDSKSSVYLQMNNLRVEDTGIYYCTGASYGMEYLGQGTSVTVSTTRGGGSMDPDLEIEAAFLERENTALETRVAELRQRVQRLRNRVSQYRTRYGPLGGGK

SEQ ID NO: 12136 - protein, 329 aa, Artificial Sequence
  Synthetic Polypeptide
MALPVTALLLPLALLLHAARPQVQLVESGGNLVQPGGSLRLSCAASGFTFGSFSMSWVRQAPGGGLEWVAGLSARSSLTHYADSVKGRFTISRDNAKNSVYLQMNSLRVEDTAVYYCARRSYDSSGYWGHFYSYMDVWGQGTLVTVSGGGGSGGGGSGGGGSSVLTQPSSVSAAPGQKVTISCSGSTSNIGNNYVSWYQQHPGKAPKLMIYDVSKRPSGVPDRFSGSKSGNSASLDISGLQSEDEADYYCAAWDDSLSEFLFGTGTKLTVLGTRGGGSMDPDLEIEAAFLERENTALETRVAELRQRVQRLRNRVSQYRTRYGPLGGGK

SEQ ID NO: 12137 - protein, 320 aa, Artificial Sequence
  Synthetic Polypeptide
MALPVTALLLPLALLLHAARPQSVVTQPPSVSGAPGQRVTISCTGSSSNIGAGYDVHWYQQLPGTAPKLLIYGNSNRPSGVPDRFSGSKSGTSASLAITGLQAEDEADYYCQSYDSSLSGSYVFGTGTKLTVLGGGGGSGGGGSGGGGSEVQLVETGGNLVQPGASLRLSCAASGFSFSGTAMHWVRQAPGKGLEWVSTISSTGRSTYYRDSVKGRFTISRDNSKNTLYLQMNSLRGEDTAVYYCARVSFDYWGQGTLVTVSSTRGGGSMDPDLEIEAAFLERENTALETRVAELRQRVQRLRNRVSQYRTRYGPLGGGK

SEQ ID NO: 12138 - protein, 322 aa, Artificial Sequence
  Synthetic Polypeptide
MALPVTALLLPLALLLHAARPQSVVTQPASVSGSPGQSITISCTGTSSDVGGYNYVSWYQQHPGKAPKLMIYDVSKRPSGVSNRFSGSKSGNTASLTISGLQAEDEADYYCSSYTSSSTLVFGGGTKLTVLGGGGGSGGGGSGGGGSEVQLVESGGAFVQPGGSLRLSCAASGFTFSSYAMTWVRQAPGKGLEWVSTISGRGRSTFYADSVKGRFTISRDNSKNTLYLQMNSLRAEDTAVYYCARYYHAGAFDLWGQGTLVTVSSTRGGGSMDPDLEIEAAFLERENTALETRVAELRQRVQRLRNRVSQYRTRYGPLGGGK

SEQ ID NO: 12139 - protein, 324 aa, Artificial Sequence
  Synthetic Polypeptide
MALPVTALLLPLALLLHAARPDVVMTQSPSSLSASVGDRVTITCQSSLDISHYLNWYQQKPGKAPKLLIYDASNLETGVPSRFSGSGSGTHFTFTISSLQPEDFATYYCQQYDNLPLTFGGGTKLEIKRGGGGSGGGGSGGGGSQVQLVQSGGGVVQPGGSLRVSCAASGVTLSDYGMHWVRQAPGKGLEWVAFIRNDGSDKYYADSVKGRFTISRDNSEKTVSLQMSSLRAEDTAVYYCAKNGESGPLDYWYLDLWGRGTLVTVSSTRGGGSMDPDLEIEAAFLERENTALETRVAELRQRVQRLRNRVSQYRTRYGPLGGGK

SEQ ID NO: 12140 - protein, 331 aa, Artificial Sequence
  Synthetic Polypeptide
MALPVTALLLPLALLLHAARPDVMLTQTPLSLPVSLGDQASISCRSSQSILHSTGDTYLEWYLQKPGQSPKLLINKVSNRLSGVPDRFSGSGSGTDFTLKISRVEAEDLGVYYCFQGSHVPWTFGGGTKLEIKRADAAPTVSIFPGGGGSGGGGSGGGGSQVKLQQSGPSLVKPGASVKMSCKASGYTFTDFYMKWVKQSHGKSLEWIGDINPNIGDTFYNQKFKGKATLTVDKSSSTAYMQLNSLTSEDSAVYFCSVGYFDVWGAGTTVTVSSTRGGGSMDPDLEIEAAFLERENTALETRVAELRQRVQRLRNRVSQYRTRYGPLGGGK

SEQ ID NO: 12141 - protein, 331 aa, Artificial Sequence
  Synthetic Polypeptide
MALPVTALLLPLALLLHAARPLPVLTQPPSVSVAPGKTARITCGGNNIGSKSVHWYQQKPGQAPVLVVYDDSDRPSGIPERFSGSNSGNTATLTISRVEAGDEADYYCQVWDSSSDYVVFGGGTKLTVLGGGGSGGGGSGGGGSEVQLVQSGAEVKKPGESLKISCKGSGYSFTSYWIGWVRQMPGKGLEWMGIIYPGDSDTRYSPSFQGQVTISADKSISTAYLQWSSLKASDTAMYYCARQVWGWQGGMYPRSNWWYNLDSWGQGTLVTVSSTRGGGSMDPDLEIEAAFLERENTALETRVAELRQRVQRLRNRVSQYRTRYGPLGGGK

SEQ ID NO: 12142 - protein, 324 aa, Artificial Sequence
  Synthetic Polypeptide
MALPVTALLLPLALLLHAARPELVMTQSPASLAVSLGQRATISCRASESVDSYGKSFMHWYQLKPGQPPKLLIYRASNLESGVPARFSGSGSRTDFTLTIDPVEADDAATYYCQQNNEDPWTFGGGTKLEIKGGGGSGGGGSGGGGSEVQLEQSGPELVKPGASVKMSCKASGYTFTNYYMKWVKQSHGKSLEWIGDLNPNNGDTFYNQKFKGKATLTVDKSSNTAYMQLNSLTSEDSAVYYCARTGRYEENAMDYWGQGTSVTVSSTRGGGSMDPDLEIEAAFLERENTALETRVAELRQRVQRLRNRVSQYRTRYGPLGGGK

SEQ ID NO: 12143 - protein, 322 aa, Artificial Sequence; identical to SEQ ID NO: 12116
  Synthetic Polypeptide

SEQ ID NO: 12144 - protein, 322 aa, Artificial Sequence; identical to SEQ ID NO: 12025
  Synthetic Polypeptide

SEQ ID NO: 12145 - protein, 318 aa, Artificial Sequence
  Synthetic Polypeptide
MALPVTALLLPLALLLHAARPDVVMTQSPSSLSASVGDRVTITCMASEDIYIRLAWYQQKPGNAPKLLIYAATSLETGVPSRFSGSGSGTDFTLTISSLQPEDFATYYCQQYWSSPWTFGGGTKVEIKGGGGSGGGGSGGGGSQVQLQESGPGLVKPSQTLSLTCTVSGYSITSDYTWNWIRQPPGNGLEWIGYITYSGSTSYNPSLKSRVLISVDTSKNQVSLKLSSVTAADTAVYYCARLGRRYTMDYWGQGTTVTVSSTRGGGSMDPDLEIEAAFLERENTALETRVAELRQRVQRLRNRVSQYRTRYGPLGGGK

SEQ ID NO: 12146 - protein, 323 aa, Artificial Sequence
  Synthetic Polypeptide
MALPVTALLLPLALLLHAARPEVQLVESGGGLVQPGRSLRLSCAASGFTFDDYAMHWVRQAPGKGLEWVSGISWNSGSIGYADSVKGRFTISRDNAKNSLYLQMNSLRAEDTALYYCAKDKGGGYYDFWSGSDYWGQGTLVTVSSGGGGSGGGGSGGGGSSSELTQDPAVSVALGQTVRITCQGDSLRSYYASWYQQKPGQAPVLVIYGKNNRPSGIPDRFSGSSSGNTASLTITGAQAEDEADYYCNSRDSSGWVFGGGTKLTVLTRGGGSMDPDLEIEAAFLERENTALETRVAELRQRVQRLRNRVSQYRTRYGPLGGGK

SEQ ID NO: 12147 - protein, 332 aa, Artificial Sequence
  Synthetic Polypeptide
MALPVTALLLPLALLLHAARPEVQLQQSGPGLVKPSQTLSLTCAISGDSVLSNSDTWNWIRQSPSRGLEWLGRTYHRSTWYDDYASSVRGRVSINVDTSKNQYSLQLNAVTPEDTGVYYCARDRLQDGNSWSDAFDVWGQGTMVTVSSGGGGSGGGGSGGGGSQSALTQPASVSGSPGQSITISCTGTSSDVGGYNYVSWYQQHPGKAPKLMIYDVSNRPSGVSNRFSGSKSGNTASLTISGLQAEDEADYYCSSYTSSSTLVYVFGTGTKVTVLTRGGGSMDPDLEIEAAFLERENTALETRVAELRQRVQRLRNRVSQYRTRYGPLGGGK

SEQ ID NO: 12148 - protein, 330 aa, Artificial Sequence
  Synthetic Polypeptide
MALPVTALLLPLALLLHAARPQVQLVQSGAEVKKPGASVKVSCKASGYTFTSYDINWVRQATGQGLEWMGWMNPNSGNTGYAQKFQGRVTMTRNTSISTAYMELSSLRSEDTAVYYCARGDSNYWSYYGMDVWGQGTLVTVSSGGGGSGGGGSGGGGSGGGGSQSVLTQPRSVSGSPGQSVTISCTGTSSDVGGYNYVSWYQQHPGEAPKLIIYDADKRPSGISNRFSSGKSGNTASLTISGLQVEDEADYYCCSYAGGSTWVFGGGTKVTVLTRGGGSMDPDLEIEAAFLERENTALETRVAELRQRVQRLRNRVSQYRTRYGPLGGGK

SEQ ID NO: 12149 - protein, 332 aa, Artificial Sequence
  Synthetic Polypeptide
MALPVTALLLPLALLLHAARPEVQLQQSGPGLVKPSQTLSLTCAISGDSVSSNSAAWNWIRQSPSRGLEWLGRTYYRSKWYSDYAVSVKSRITINPDTSKNQFSLQLNSVTPEDTAVYYCARDPYDFWSGYPDAFDIWGQGTMVTVSSGGGGSGGGGSGGGGSQSALTQPASVSGSPGQSITISCTGTSSDVGGYNYVSWYQQHPGKAPKVIISEVNNRPSGVSHRFSGSKSGNTASLTISGLQAEDEADYFCSSYTSGRTLYVFGTGSKVTVLGTRGGGSMDPDLEIEAAFLERENTALETRVAELRQRVQRLRNRVSQYRTRYGPLGGGK

SEQ ID NO: 12150 - protein, 331 aa, Artificial Sequence
  Synthetic Polypeptide
MALPVTALLLPLALLLHAARPEVQLQQSGPGLVKPSQTLSLTCAISGDSMLSNSDTWNWIRQSPSRGLEWLGRTYHRSTWYDDYASSVRGRVSINVDTSKNQYSLQLNAVTPEDTGVYYCARVRLQDGNSWSDAFDVWGQGTMVTVSSGGGGSGGGGSGGGGSQSALTQPASASGSPGQSVTISCTGTSSDVGGYNYVSWYQQHPGKAPKLMIYDVSNRPSGVSNRFSGSKSGNTASLTISGLQAEDEADYYCSSYTSSSTLYVFGTGTQLTVLTRGGGSMDPDLEIEAAFLERENTALETRVAELRQRVQRLRNRVSQYRTRYGPLGGGK

SEQ ID NO: 12151 - protein, 322 aa, Artificial Sequence
  Synthetic Polypeptide
MALPVTALLLPLALLLHAARPEIVLTQSPATLSLSPGERATLSCSASSSVSYMYWYQQKPGQAPRLLIYRTSNLASGIPARFSGSGSGTDFTLTISSLEPEDFAVYYCQQYHSYPTTFGQGTKVEIKRTVGGGGSGGGGSGGGGSEVQLVESGGGLVQPGGSLRLSCAASGFSFNTYAMNWVRQAPGKGLEWVSHIRSKSNNFATYYADSVKDRFTISRDNAKNSLYLQMNSLRAEDTAVYYCARQGGDFPMDYWGQGTLVTVSSTRGGGSMDPDLEIEAAFLERENTALETRVAELRQRVQRLRNRVSQYRTRYGPLGGGK

SEQ ID NO: 12152 - protein, 318 aa, Artificial Sequence
  Synthetic Polypeptide
MALPVTALLLPLALLLHAARPDVVMTQSPSSLSASVGDRVTITCKASEDIYIRLAWYQQKPGKAPKLLIYAATSLETGVPSRFSGSGSGTDFTLTISSLQPEDFATYYCQQYWTTPWTFGGGTKVEIKGGGGSGGGGSGGGGSQVQLQESGPGLVKPSQTLSLTCTVSGYSITIDYTWNWIRQPPGKGLEWIGYITYSGSTDYNPSLKSRVLISVDTSKNQVSLKLSSVTAADTAVYYCARLGRRYALDYWGQGTTVTVSSTRGGGSMDPDLEIEAAFLERENTALETRVAELRQRVQRLRNRVSQYRTRYGPLGGGK

SEQ ID NO: 12153 - protein, 323 aa, Artificial Sequence
  Synthetic Polypeptide
MALPVTALLLPLALLLHAARPDIQLTQSPSFLSASVGDRVTITCRASQGISTDLNWYQQKPGKAPKLLIYAASNLESGVPSRFSGSGSGTEFTLTISSLQPEDFATYYCQQSYNWPYTFGGGTKVEIKRGGGGSGGGGSGGGGSEVQLVESGGGLVKPGGSLRLSCAASGFTFSNFEMNWVRQAPGKGLEWVSGISSNGRYINYADSVKGRFTISRDNAKNSLYLQMNSLRAEDTAVYYCARVVDFDQDYNGFDYWGQGTLVTVSSTRGGGSMDPDLEIEAAFLERENTALETRVAELRQRVQRLRNRVSQYRTRYGPLGGGK

SEQ ID NO: 12154 - protein, 321 aa, Artificial Sequence
  Synthetic Polypeptide
MALPVTALLLPLALLLHAARPDIQLTQSPSFLSASVGDRVTITCSLSLGISTWRDWFPPRLGRGLEPLTYAASTLQSGVPSRFSGSGSGTEFTLTISSLQPEDFATYYCQQLNSYPLTFGGGTKVEIKRGGGGSGGGGSGGGGSEVQLVESGGGLVKPGGSLRLSCAASGFTFSTYGMSWVRQAPGKGLEWVAYINNGSGYIYYADSVKGRFTISRDNAKNSLYLQMNSLRAEDTAVYYCARGQWWSGGDFDYWGQGTLVTVSSTRGGGSMDPDLEIEAAFLERENTALETRVAELRQRVQRLRNRVSQYRTRYGPLGGGK

SEQ ID NO: 12155 - protein, 323 aa, Artificial Sequence
  Synthetic Polypeptide
MALPVTALLLPLALLLHAARPDIQMTQTTSSLSASLGDRVTISCRASQDISNYLNWYQQKPDGTVKLLIYYTSILHSGVPSRFSGSGSGTDYSLTISNLEQEDFATYFCQQGNTLPWTFGGGTKLEIKAGGGGSGGGGSGGGGSEVQLVESGGGLVKPGGSLKLSCAASGFAFSIYDMSWVRQTPEKRLEWVAYISSGGGTYYPDTVKGRFTISRDNAKNTLYLQMSSLKSEDTAMYYCARHSGYGTHWGVLFAYWGQGTLVTVSATRGGGSMDPDLEIEAAFLERENTALETRVAELRQRVQRLRNRVSQYRTRYGPLGGGK

SEQ ID NO: 12156 - protein, 333 aa, Artificial Sequence
  Synthetic Polypeptide
MALPVTALLLPLALLLHAARPDIVMTQSPDSLAVSLGERATINCKSSQSLLYRSNQKNYLAWYQQKPGQPPKLLIYWASTRESGVPDRFSGSGSGTDFTLTISSLQAEDVAVYYCQQYYNYPRTFGQGTKVEIKRTVGGGGSGGGGSGGGGSEVQLLESGGGLVQPGGSLRLSCAASGYSITSDYAWNWVRQAPGKGLEWVSYISNSGSTSYNPSLKSRFTISRDNSKNTLYLQMNSLRAEDTAVYYCAKERNYDYDDYYYAMDYWGQGTLVTVSSTRGGGSMDPDLEIEAAFLERENTALETRVAELRQRVQRLRNRVSQYRTRYGPLGGGK

SEQ ID NO: 12157 - protein, 326 aa, Artificial Sequence
  Synthetic Polypeptide
MALPVTALLLPLALLLHAARPDVVMTQSPLSLPVTLGQPASISCRSSQSLLHSSGNTYLEWYQQRPGQSPRPLIYKISTRFSGVPDRFSGSGSGTDFTLKISRVEAEDVGVYYCFQGSHVPYTFGGGTKVEIKRGGGGSGGGGSGGGGSQVQLVQSGAEVKKPGASVKVSCKASGLTIEDYYMHWVRQAPGQGLEWMGWIDPENGDTEYGPKFQGRVTMTRDTSINTAYMELSRLRSDDTAVYYCAVHNAHYGTWFAYWGQGTLVTVSSTRGGGSMDPDLEIEAAFLERENTALETRVAELRQRVQRLRNRVSQYRTRYGPLGGGK

SEQ ID NO: 12158 - protein, 318 aa, Artificial Sequence
  Synthetic Polypeptide
MALPVTALLLPLALLLHAARPDIQMTQSPSSLSASVGDRVTITCRASENIYSNLAWYQQKPGKAPKLLIYAATNLADGVPSRFSGSGSGTDFTLTISSLQPEDFATYYCQHFWGTPTFGQGTKVEIKRTVGGGGSGGGGSGGGGSEVQLVESGGGLVQPGGSLRLSCAASGFSLTNYGVHWVRQAPGKGLEWVSVIWSGGSTDYNAAFISRFTISADTSKNTAYLQMNSLRAEDTAVYYCARELIHAMDNWGQGTLVTVSSTRGGGSMDPDLEIEAAFLERENTALETRVAELRQRVQRLRNRVSQYRTRYGPLGGGK

SEQ ID NO: 12159 - protein, 325 aa, Artificial Sequence
  Synthetic Polypeptide
MALPVTALLLPLALLLHAARPDFVMTQSPLSLPVTPGEPASISCRSSQSIVHSNGNTYLEWYLQKPGQSPQLLIYKVSNRFSGVPDRFSGSGSGTDFTLKISRVEAEDVGVYYCFQGSHVPLTFGQGTKLEIKRGGGGSGGGGSGGGGSEVQLVESGAEVKKPGASVKVSCKASGYTFTSYWIHWVRQAPGQGLEWMGENDPSNGRTNYNEKFKNRVTLTVDTSISTAYMELSRLRSDDTAVYYCARGPNYFYSMDYWGQGTMVTVSSTRGGGSMDPDLEIEAAFLERENTALETRVAELRQRVQRLRNRVSQYRTRYGPLGGGK

SEQ ID NO: 12160 - protein, 318 aa, Artificial Sequence
  Synthetic Polypeptide
MALPVTALLLPLALLLHAARPDIQLTQSPSFLSASVGDRVTITCSARSSISFMYWYQQKPGKAPKLLIYDTSNLASGVPSRFSGSGSGTEFTLTISSLEAEDAATYYCQQWSSYPLTFGQGTKLEIKGGGGSGGGGSGGGGSQVQLVQSGAEVKKPGASVKVSCKASGYTFTGSWMNWVRQAPGQGLEWIGRIYPGDGETNYNGKFKDRVTITADKSTSTAYMELSSLRSEDTAVYYCARIYGNNVYFDVWGQGTTVTVSSTRGGGSMDPDLEIEAAFLERENTALETRVAELRQRVQRLRNRVSQYRTRYGPLGGGK

SEQ ID NO: 12161 - protein, 326 aa, Artificial Sequence
  Synthetic Polypeptide
MALPVTALLLPLALLLHAARPQLVLTQSPSASASLGSSVKLTCTLSSGHKTDTIDWYQQQPGKAPRYLMKLEGSGSYNKGSGVPDRFSGSSSGADWYLTISSLQSEDEADYYCGTDYPGNYLFGGGTQLTVLGGGGGSGGGGSGGGGSQEQLVESGGGLVQPGGSLRLSCAASGFTFSDYYMSWIRQAPGKGLEWVATIYPSSGKTYYADSAKGRLTISSDNAKDSLYLQMNSLRAEDTAVYYCTRDSYADDAALFDIWGQGTTVTVSSTRGGGSMDPDLEIEAAFLERENTALETRVAELRQRVQRLRNRVSQYRTRYGPLGGGK

SEQ ID NO: 12162 - protein, 321 aa, Artificial Sequence
  Synthetic Polypeptide
MALPVTALLLPLALLLHAARPDIVLTQSPPSLAMSLGKRATISCRASESVTILGSHLIHWYQQKPGQPPTLLIQLASNVQTGVPARFSGSGSRTDFTLTIDPVEEDDVAVYYCLQSRTIPRTFGGGTKLEIKGGGGSGGGGSGGGGSQIQLVQSGPELKKPGETVKISCKASGYTFTDYSINWVKRAPGKGLKWMGWINTETREPAYAYDFRGRFAFSLETSASTAYLQINNLKYEDTATYFCALDYSYAMDYWGQGTSVTVSSTRGGGSMDPDLEIEAAFLERENTALETRVAELRQRVQRLRNRVSQYRTRYGPLGGGK

SEQ ID NO: 12163 - protein, 325 aa, Artificial Sequence
  Synthetic Polypeptide
MALPVTALLLPLALLLHAARPQVQLQESGPGLVKPSQTLSLTCTVSGGSISSGGFYWSWIRQHPGKGLEWIGYIHHSGSTHYNPSLKSRVTISIDTSKNLFSLRLSSVTAADTAVYYCASLVYCGGDCYSGFDYWGQGTLVTVSSGGGGSGGGGSGGGGSDIQLTQSPSSLSASVGDRVSFTCQASQDINNFLNWYQQKPGKAPKLLIYDASNLETGVPSRFSGSGSGTDFTFTISSLQPEDIATYYCQQYGNLPFTFGGGTKVEIKRTRGGGSMDPDLEIEAAFLERENTALETRVAELRQRVQRLRNRVSQYRTRYGPLGGGK

SEQ ID NO: 12164 - protein, 323 aa, Artificial Sequence
  Synthetic Polypeptide
MALPVTALLLPLALLLHAARPQVQLQESGPGLVKPSETLSLTCTVSGGSISSYYWSWIRQPPGKGLEWIGYIYYSGSTNYNPSLKSRVTISVDTSKNQFSLKLSSVTAADTAVYYCVSLVYCGGDCYSGFDYWGQGTLVTVSSGGGGSGGGGSGGGGSDIQLTQSPSSLSASVGDRVSFTCQASQDINNFLNWYQQKPGKAPKLLIYDASNLETGVPSRFSGSGSGTDFTFTISSLQPEDIATYYCQQYGNLPFTFGGGTKVEIKRTRGGGSMDPDLEIEAAFLERENTALETRVAELRQRVQRLRNRVSQYRTRYGPLGGGK

SEQ ID NO: 12165 - protein, 328 aa, Artificial Sequence
  Synthetic Polypeptide
MALPVTALLLPLALLLHAARPQVTLKESGPVLVKPTETLTLTCTVSGFSLINARMGVSWIRQPPGKALEWLAHIFSNAEKSYRTSLKSRLTISKDTSKSQVVLTMTNMDPVDTATYYCARIPGYGGNGDYHYYGMDVWGQGTTVTVSSGGGGSGGGGSGGGGSDIQMTQSPSSLSASLGDRVTITCRASQGIRNDLGWYQQKPGKAPKRLIYASSTLQSGVPSRFSGSGSGTEFTLTISSLQPEDFATYYCLQHNNFPWTFGQGTKVEIKRTRGGGSMDPDLEIEAAFLERENTALETRVAELRQRVQRLRNRVSQYRTRYGPLGGGK

SEQ ID NO: 12166 - protein, 322 aa, Artificial Sequence
  Synthetic Polypeptide
MALPVTALLLPLALLLHAARPQIQLVESGGGVVQPGRSLRLSCVASGFTFKNYGMHWVRQAPGKGLEWVAVIWYDGSNEYYGDPVKGRFTISRDNSKNMLYLQMNSLRADDTAVYYCARSGIAVAGAFDYWGQGTLVTVSSGGGGSGGGGSGGGGSEIVLTQSPDTLSLSPGEKATLSCRASQSVSSSFLAWYQQKPGQAPSLLIYVASRRAAGIPDRFSGSGSGTDFTLTISRLEPEDFGMFYCQHYGRTPFTFGPGTKVDIKRTRGGGSMDPDLEIEAAFLERENTALETRVAELRQRVQRLRNRVSQYRTRYGPLGGGK

SEQ ID NO: 12167 - protein, 323 aa, Artificial Sequence
  Synthetic Polypeptide
MALPVTALLLPLALLLHAARPDIQLTQSPSFLSASVGDRVTITCRASQGISSYLAWYQQKPGKAPKLLIYAASTLQSGVPSRFSGSGSGTEFTLTISSLQPEDFATYYCQQVNSYPLTFGGGTKVEIKRGGGGSGGGGSGGGGSQLQLQESGPGLVKPSETLSLTCTVSGGSISSSTYYWGWIRQPPGKGLEWIGSIYFTGSTDYNPSLKSRVSISVDTSKNQFSLKLSSVTAADTAVYYCAKEDDSSGYYSFDYWGQGNLVTVSSTRGGGSMDPDLEIEAAFLERENTALETRVAELRQRVQRLRNRVSQYRTRYGPLGGGK

SEQ ID NO: 12168 - protein, 326 aa, Artificial Sequence
  Synthetic Polypeptide
MALPVTALLLPLALLLHAARPQSALTQPRSVSGSPGHSVTISCTGTSSDVGDYNYVSWYQQRPGKVPKLLIYDVSKRPSGVPDRFSGSKSGNTASLTISGLQAEDEAIYFCASYAGNYNVVFGGGTKLTVLGQGGGGSGGGGSGGGGSQVQLVQSGSELKKPGASVKVSCKASGYTFNTYAMNWVRQAPGQGLEWMGWINTNTGNPTYAQGFTGRFVFSLDTSVSTAYLQISSLKAEDTAVYYCARRYFDWLLGAFDIWGQGTMVTVSSTRGGGSMDPDLEIEAAFLERENTALETRVAELRQRVQRLRNRVSQYRTRYGPLGGGK

SEQ ID NO: 12169 - protein, 318 aa, Artificial Sequence
  Synthetic Polypeptide
MALPVTALLLPLALLLHAARPDIQMTQSPSSLSASVGDRVTITCSASQGINNYLNWYQQKPGKAPKLLIHYTSGLHAGVPSRFSGSGSGTDYTLTISSLQPEDVATYYCQQYSILPWTFGGGTKVEIKRGGGGSGGGGSGGGGSQVQLVQSGAEVKKPGSSVKVSCKASGYAFSSSWMNWVRQAPGQGLEWMGRIYPGDGNTHYAQKFQGRVTLTADKSTSTAYMELSSLRSEDTAVYYCGEGYLDPMDYWGQGTLVTVSSTRGGGSMDPDLEIEAAFLERENTALETRVAELRQRVQRLRNRVSQYRTRYGPLGGGK

SEQ ID NO: 12170 - protein, 321 aa, Artificial Sequence
  Synthetic Polypeptide
MALPVTALLLPLALLLHAARPEVQLVESGGGLVQPGGSLRLSCAASGYTFTTYWMHWVRQAPGKGLEWVGYIRPSTGYTEYNQKFKDRFTISADTSKNTAYLQMNSLRAEDTAVYYCARSRWLLDYWGQGTLVTVSGGGGSGGGGSGGGGSDIQMTQSPSSLSASVGDRVTITCKSSQSVLYSSNQKNYLAWFQQKPGKAPKLLIYWASTRESGVPSRFSGSGSGTDFTLTISSLQPEDFATYFCHQYLSSYTFGQGTKVEIKRTRGGGSMDPDLEIEAAFLERENTALETRVAELRQRVQRLRNRVSQYRTRYGPLGGGK

SEQ ID NO: 12171 - protein, 318 aa, Artificial Sequence
  Synthetic Polypeptide
MALPVTALLLPLALLLHAARPDIQMTQSPSSLSASVGDRVTITCRASQDISNYLNWYQQKPGKAPKLLIYYTSRLHSGVPSRFSGSGSGTDFTLTISSLQPEDFATYYCQQGNTLPYTFGQGTKVEIKRGGGGSGGGGSGGGGSEVQLVESGGGLVQPGGSLRLSCAASGFTFSDYFMSWVRQAPGKGLEWVATISNGGTYTYYPDSVKGRFTISRDNSKNTLYLQMNSLRAEDTAVYYCARFDGYIFDYWGQGTLVTVSSTRGGGSMDPDLEIEAAFLERENTALETRVAELRQRVQRLRNRVSQYRTRYGPLGGGK

SEQ ID NO: 12172 - protein, 325 aa, Artificial Sequence
  Synthetic Polypeptide
MALPVTALLLPLALLLHAARPDIQMTQSPSSLSASVGDRVTITCTASSRVSSSYLHWFQQKPGKAPKLLIYSTSNLASGVPSRFSGSGSGTDFTLTISSLQPEDFATYYCHQYHRSPYTFGQGTKVEIKRGGGGSGGGGSGGGGSEVQLVESGGGLVQPGGSLRLSCAASGYAFSNSWINWVRQAPGKGLEWVGQIYPGDYDTNYNGKFKGRFTISRDKSKNTAYLQMNSLRAEDTAVYYCARGGSIYYGNLGFFDVWGQGTLVTVSSTRGGGSMDPDLEIEAAFLERENTALETRVAELRQRVQRLRNRVSQYRTRYGPLGGGK

SEQ ID NO: 12173 - protein, 315 aa, Artificial Sequence
  Synthetic Polypeptide
MALPVTALLLPLALLLHAARPDIQMTQSPSSLSASVGDRVTITCSASSSVTYMYWYQQKPGKAPKLLIYDTSNLASGVPSRFSGSGSGTDYTLTISSLQPEDFATYYCQQWSNYPLTFGQGTKVEIKGGGGSGGGGSGGGGSQVQLVQSGAEVKKPGASVKVSCKASGYSFIEYTINWVRQAPGQGLEWIGNIDPYYGTTYYNQMFTGRATLTVDTSISTAYMELSRLRSDDTAVYYCARGSAWFPYWGQGTLVTVSSTRGGGSMDPDLEIEAAFLERENTALETRVAELRQRVQRLRNRVSQYRTRYGPLGGGK

SEQ ID NO: 12174 - protein, 315 aa, Artificial Sequence
  Synthetic Polypeptide
MALPVTALLLPLALLLHAARPEIVLTQSPSSLSASVGDRVTITCRASENIYSYLAWYQQKPGKAPKLLIYNTKTLGEGVPSRFSGSGSGTDFTLTISSLQPEDFATYYCQHHYGTPFTFGPGTKVDIKGGGGSGGGGSGGGGSQVQLVQSGAEVKKPGASVKVSCKASGYTFSDYWVHWVRQAPGQGLEWMGAIDGSDTFNDYSQKFKGRVTMTRDTSISTAYMELSRLRSDDTAVYYCARGGLLQYWGQGTLVTVSSTRGGGSMDPDLEIEAAFLERENTALETRVAELRQRVQRLRNRVSQYRTRYGPLGGGK

SEQ ID NO: 12175 - protein, 319 aa, Artificial Sequence
  Synthetic Polypeptide
MALPVTALLLPLALLLHAARPQVQLQQSGPELVKPGASVKISCKASGYAFSSSWMNWVKQRPGKGLEWIGRIYPGDEDTNYSGKFKDKATLTADKSSTTAYMQLSSLTSEDSAVYFCARSLLYGDYLDYWGQGTTLTVSSGGGGSGGGGSGGGGSQIVLTQSPAIMSASPGEKVTMTCSASSSVSYMHWYQQKSGTSPKRWIYDTSKLASGVPDRFSGSGSGTSYFLTINNMEAEDAATYYCQQWNINPLTFGAGTKLELKRTRGGGSMDPDLEIEAAFLERENTALETRVAELRQRVQRLRNRVSQYRTRYGPLGGGK

SEQ ID NO: 12176 - protein, 322 aa, Artificial Sequence
  Synthetic Polypeptide
MALPVTALLLPLALLLHAARPDIQMTQSSAYLSVSLGGRVTITCKASDHINNWLAWYQHKPGNAPRLLISGATTLETGVPSRFSGSGSGKDYTLSITSLQTEDVATYYCQQSWNTPWTFGGGTKLEIKRGGGGSGGGGSGGGGSQVQLQQSGAELVRPGSSVKISCKASGYAFSSYWVNWMKQRPGQGLEWIGQIYPGDGDTNYNGKFKGRATVTADKSSSTSYMQFSSLTSEDSAVYFCARSITTVVGCAMDYWGQGTSVTVSSTRGGGSMDPDLEIEAAFLERENTALETRVAELRQRVQRLRNRVSQYRTRYGPLGGGK

SEQ ID NO: 12177 - protein, 321 aa, Artificial Sequence
  Synthetic Polypeptide
MALPVTALLLPLALLLHAARPEVQLLESGGGLVQPGGSLRLSCAASGFTFSSYAMSWVRQAPGKGLEWVSVISGSGGRPNYADSVKGRFTISRDNSKNTLYLQMNSLRDEDTAVYYCAKVDYSNYLFFDYWGQGTLVTVSSGGGGSGGGGSGGGGSEIVLTQSPGTLSLSPGEGATLSCRAGQSVRSSYLGWYQQKPGQAPRLLIYGASSRATGIPDRFSGSGSGTDFTLTISRLEPEDFAVYYCQQYGYSPPTFGGGTKLEIKTRGGGSMDPDLEIEAAFLERENTALETRVAELRQRVQRLRNRVSQYRTRYGPLGGGK

SEQ ID NO: 12178 - protein, 324 aa, Artificial Sequence
  Synthetic Polypeptide
MALPVTALLLPLALLLHAARPDIVLTQSPPSLAMSLGKRATISCRASESVTILGSHLIHWYQQKPGQPPTLLIQLASNVQTGVPARFSGSGSRTDFTLTIDPVEEDDVAVYYCLQSRTIPRTFGGGTKLEIKGSTSGSGKPGSGEGSTKGQIQLVQSGPELKKPGETVKISCKASGYTFTDYSINWVKRAPGKGLKWMGWINTETREPAYAYDFRGRFAFSLETSASTAYLQINNLKYEDTATYFCALDYSYAMDYWGQGTSVTVSSTRGGGSMDPDLEIEAAFLERENTALETRVAELRQRVQRLRNRVSQYRTRYGPLGGGK

SEQ ID NO: 12179 - protein, 324 aa, Artificial Sequence
  Synthetic Polypeptide
MALPVTALLLPLALLLHAARPDIQMTQSPSSLSASVGDRVTITCRASSSVSYMHWYQQKPGKAPKLLIYATSNLASGVPSRFSGSGSGTDFTLTISSLQPEDFATYYCQQWTFNPPTFGQGTKLEIKRTVAAGGGGSGGGGSGGGGSQVQLVQSGAEVKKPGASVKVSCKASGYTFTSYNMHWVRQAPGQRLEWMGGIYPGNGDTSYNQKFKGRVTITRDTSASTAYMELSSLRSEDTAVYYCARYDYNYAMDYWGQGTLVTVSSASTRGGGSMDPDLEIEAAFLERENTALETRVAELRQRVQRLRNRVSQYRTRYGPLGGGK

SEQ ID NO: 12180 - protein, 319 aa, Artificial Sequence
  Synthetic Polypeptide
MALPVTALLLPLALLLHAARPEIVLTQSPGTLSLSPGERATLSCRASQSVSSSYLAWYQQKPGQAPRLLIYGASSRATGIPDRFSGSGSGTDFTLTISRLEPEDFAVYYCQQYHHSPLTFGGGTKVEIKRGGGGSGGGGSGGGGSEVQLVESGGGLVQPGGSLRLSCAASGFTFSGRSMNWVRQAPGKGLEWVSYISSDSRTIYYADSVKGRFTISRDNAKNSLYLQMNSLRAEDTAVYYCARGGHGYFDLWGRGTLVTVSSTRGGGSMDPDLEIEAAFLERENTALETRVAELRQRVQRLRNRVSQYRTRYGPLGGGK

SEQ ID NO: 12181 - protein, 322 aa, Artificial Sequence
  Synthetic Polypeptide
MALPVTALLLPLALLLHAARPEIVLTQSPGTLSLSPGERATLSCRASQSVSSDYLAWYQQKPGQAPRLLIYGASRRATGIPDRFSGSGSGTDFTLTISRLEPEDFAVYYCQQYVSYWTFGGGTKVEIKRGGGGSGGGGSGGGGSQVQLVESGGGVVQPGRSLRLSCAASGFTFSSYGMHWVRQAPGKGLEWVAGIWWDGSNEKYADSVKGRFTISRDNSKNTLYLQMNSLRAEDTAVYYCAKEAPYYAKDYMDVWGKGTTVTVSSTRGGGSMDPDLEIEAAFLERENTALETRVAELRQRVQRLRNRVSQYRTRYGPLGGGK

SEQ ID NO: 12182 - protein, 322 aa, Artificial Sequence
  Synthetic Polypeptide
MALPVTALLLPLALLLHAARPDIQMTQSPSSLSASVGDRVTITCRASQDVNTAVAWYQQKPGKAPKLLIYSASFLYSGVPSRFSGSRSGTDFTLTISSLQPEDFATYYCQQHYTTPPTFGQGTKVEIKRTGGGGSGGGGSGGGGSEVQLVESGGGLVQPGGSLRLSCAASGFNIKDTYIHWVRQAPGKGLEWVARIYPTNGYTRYADSVKGRFTISADTSKNTAYLQMNSLRAEDTAVYYCSRWGGWGFYAMDYWGQGTLVTVSSTRGGGSMDPDLEIEAAFLERENTALETRVAELRQRVQRLRNRVSQYRTRYGPLGGGK

SEQ ID NO: 12183 - protein, 317 aa, Artificial Sequence
  Synthetic Polypeptide
MALPVTALLLPLALLLHAARPQVQLVESGGGLVKPGGSLRLSCAASGFTFSDYYMTWIRQAPGKGLEWISYISSSGSTIYYADSVKGRFTISRDNAKNSLYLQMNSLRAEDTAVYYCARDRNSHFDYWGQGTLVTVSSGGGGSGGGGSGGGGSDIQMTQSPSSVSASVGDRVTITCRASQGITRWLAWYQQKPGKAPKLLIYAASVLQSGVPSRFSGSGSGTDFTLTISSLQPEDFATYYCQQSNSFPRTFGQGTKVEIKTRGGGSMDPDLEIEAAFLERENTALETRVAELRQRVQRLRNRVSQYRTRYGPLGGGK

SEQ ID NO: 12184 - protein, 317 aa, Artificial Sequence
  Synthetic Polypeptide
MALPVTALLLPLALLLHAARPQVQLVESGGGLVKPGGSLRLSCAASGFTFSDHYMSWIRQAPGKGLEWFSYISSSGGIIYYADSVKGRFTISRDNAKNSLYLQMNSLRAEDTAVYYCARDVGSHFDYWGQGTLVTVSSGGGGSGGGGSGGGGSDIQMTQSPSSVSASVGDRVTITCRASQDISRWLAWYQQKPGKAPKLLISAASRLQSGVPSRFSGSGSGTDFTLTISSLQPEDFAIYYCQQAKSFPRTFGQGTKVEIKTRGGGSMDPDLEIEAAFLERENTALETRVAELRQRVQRLRNRVSQYRTRYGPLGGGK

SEQ ID NO: 12185 - protein, 329 aa, Artificial Sequence
  Synthetic Polypeptide
MALPVTALLLPLALLLHAARPQVQLVESGGGVVQSGRSLRLSCAASGFTFRNYGMHWVRQAPGKGLEWVAVIWYDGSDKYYADSVRGRFTISRDNSKNTLYLQMNSLRAEDTAVYYCARDGYDILTGNPRDFDYWGQGTLVTVSSGGGGSGGGGSGGGGSDTVMTQTPLSSHVTLGQPASISCRSSQSLVHSDGNTYLSWLQQRPGQPPRLLIYRISRRFSGVPDRFSGSGAGTDFTLEISRVEAEDVGVYYCMQSTHVPRTFGQGTKVEIKTRGGGSMDPDLEIEAAFLERENTALETRVAELRQRVQRLRNRVSQYRTRYGPLGGGK

SEQ ID NO: 12186 - protein, 322 aa, Artificial Sequence
  Synthetic Polypeptide
MALPVTALLLPLALLLHAARPEVQLVESGGGLVQPGGSLRLSCAASGFPFSSYDMHWVRQATGKGLEWVSAIGTAGATYYPGSVKGRFTISRENAKNSLYLQMNSLRAGDTAVYYCARGDYVWGTYRPLFDYWGQGTLVTVSSGGGGSGGGGSGGGGSDIQLTQSPSFLSASVGDRVTITCWASQGINNYLAWYQQKPGKAPKLLIYAASTLQTGVPSRFSGSGSGTEFTLTISSLQPEDFATYYCQQLNSYPLTFGGGTKVEIKTRGGGSMDPDLEIEAAFLERENTALETRVAELRQRVQRLRNRVSQYRTRYGPLGGGK

SEQ ID NO: 12187 - protein, 319 aa, Artificial Sequence
  Synthetic Polypeptide
MALPVTALLLPLALLLHAARPQVQLQESGPGLVKPSETLSLTCTVSGASISSFYWSWIRQPPGKGLEWIGYIYYSGTTNYNPSLKSRVTISVDTSKNQFSLKLSSVTAADTAVYYCARIAVAGFFFDYWGQGTLVTVSSGGGGSGGGGSGGGGSEIVLTQSPGTLSLSPGERATLSCRASQSVNKNYLAWYQQKPGQAPRLLIYGASSRATGIPDRFSGSGSGTDFTLTISRLEPEDFAVYYCQQYDRSPLTFGGGTKVEIKTRGGGSMDPDLEIEAAFLERENTALETRVAELRQRVQRLRNRVSQYRTRYGPLGGGK

SEQ ID NO: 12188 - protein, 328 aa, Artificial Sequence
  Synthetic Polypeptide
MALPVTALLLPLALLLHAARPQVQLVQSGAEVKKPGASVKVSCKASGYTFTNYYMHWVRQAPGLGLEWMGIINPSDGSTSYAQKFQGRVTMTRDTSTNTVYMDLSSLRSEDTAVYYCARGGNSAFYSYYDMDVWGQGTTVTVSSGGGGSGGGGSGGGGSDVVMTQTPLSLPVTLGQPASISCRSSQSLVYRDGNTYLSWFQQRPGQSPRRLIYKVSNWQSGVPDRFSGGGSGTDFTLKISRVEAEDVGVYYCMQGTHWPPTFGQGTKVEIKTRGGGSMDPDLEIEAAFLERENTALETRVAELRQRVQRLRNRVSQYRTRYGPLGGGK

SEQ ID NO: 12189 - protein, 315 aa, Artificial Sequence
  Synthetic Polypeptide
MALPVTALLLPLALLLHAARPQVQLQQSGPELVKPGASVRISCKASGYTFTTYYIHWVKQRPGQGLEWIGWIYPGNVNTNYNEKFKGKATLTADKSSSTAYMQLTSLTSEDSAVYFCARGVYYFDYWGQGTILTVSSGGGGSGGGGSGGGGSIVMTQTPKFLLVSAGDRVTITCKASQSVNNDVSWFQQKPGQSPTLLIYYASNRYTGVPDRFTGSGYGTDFTFTISTVQAEDLAVYFCQQDYSSPYTFGGGTKLEIKTRGGGSMDPDLEIEAAFLERENTALETRVAELRQRVQRLRNRVSQYRTRYGPLGGGK

SEQ ID NO: 12190 - protein, 318 aa, Artificial Sequence
  Synthetic Polypeptide
MALPVTALLLPLALLLHAARPQVQLQESGPGLVKPSQTLSLTCTVSGGSINNNNYYWTWIRQHPGKGLEWIGYIYYSGSTFYNPSLKSRVTISVDTSKTQFSLKLSSVTAADTAVYYCAREDTMTGLDVWGQGTTVTVSSGGGGSGGGGSGGGGSDIQMTQSPSSLSASVGDRVTITCRASQSINNYLNWYQQKPGKAPTLLIYAASSLQSGVPSRFSGSRSGTDFTLTISSLQPEDFAAYFCQQTYSNPTFGQGTKVEVKTRGGGSMDPDLEIEAAFLERENTALETRVAELRQRVQRLRNRVSQYRTRYGPLGGGK

SEQ ID NO: 12191 - protein, 323 aa, Artificial Sequence
  Synthetic Polypeptide
MALPVTALLLPLALLLHAARPSYELTQPPSVSVSPGQTASITCSGDKLGDKYASWYQQKPGQSPVLVIYQDNRRPSGIPERFSGSNSGNTATLTISGTQAMDEADYYCQAWDSDTYVFGTGTKVTVLGQGGGGSGGGGSGGGGSEVQLVQSGAEVKKPGASVKVSCKASGDTFKRYYVHWVRQAPGQGLEWMGIINPSGVSTTYAQKFQGRVTMTRDTSTSTVYMELSSLRSEDTAVYYCAEVRGSGFNYFGMDVWGQGTLVTVSSTRGGGSMDPDLEIEAAFLERENTALETRVAELRQRVQRLRNRVSQYRTRYGPLGGGK

SEQ ID NO: 12192 - protein, 322 aa, Artificial Sequence
  Synthetic Polypeptide
MALPVTALLLPLALLLHAARPEVQLLESGGGLVQPGGSLRLSCAASGFTFSSYAMSWVRQAPGKGLEVVVSAISGGGGRTYYADSVKGRFTISRDNSKNTLYLQMNSLRAEDTAVYYCAREEMAFRAYRFDIWGQGTLVTVSSGGGGSGGGGSGGGGSDIQMTQSPSSLSASVGDRVTITCRASQSISSYLNWYQQKPGKAPKLLIYAASSLQSGVPSRFSGSGSGTDFTLTISSLQPEDFATYYCQQSYITPLTFGGGTKVEIKTRGGGSMDPDLEIEAAFLERENTALETRVAELRQRVQRLRNRVSQYRTRYGPLGGGK

SEQ ID NO: 12193 - protein, 330 aa, Artificial Sequence
  Synthetic Polypeptide
MALPVTALLLPLALLLHAARPDIVLTQSPASLAVSLGQGATISCRASKSVSTSGYTYMHWYQQKPGQPPKLLIYLASNLESGVPARFSGSGSGTDFTLNIHPVEEEDAATYYCQHSGELPPSFGGGTKLEIKRAGGGGSGGGGSGGGGSEVQLVESGGDLVKPGGSLKLSCAVSGFTFSSYGMSWVRQTPDKRLEWVATVSSGGTYTYYPDSVKGRFTISRDNAKNTLYLQMSSLKSEDSAMYYCARHRGNYYATYYYAMDYWGQGTSVTVSSTRGGGSMDPDLEIEAAFLERENTALETRVAELRQRVQRLRNRVSQYRTRYGPLGGGK

SEQ ID NO: 12194 - protein, 324 aa, Artificial Sequence
  Synthetic Polypeptide
MALPVTALLLPLALLLHAARPDIQMTQSPSSLSASVGDRVTITCSASQGIRNYLNWYQQKPGKVPKLLIYYTSRLHSGVPSRFSGSGSGTDFTLTISSLQPEDVATYYCQQYGKLPYTFGQGTKLEIKRTVAAGGGGSGGGGSGGGGSEVQLVESGGGLVQPGGSLRLSCAASGFTFSDAWMDWVRQAPGKGLEWVGEIRSKVNNHETYYAESVKGRFTISRDDSKNSLYLQMNSLKTEDTAVYYCARNDYFDYWGQGTTVTVSSASTRGGGSMDPDLEIEAAFLERENTALETRVAELRQRVQRLRNRVSQYRTRYGPLGGGK

SEQ ID NO: 12195 - protein, 332 aa, Artificial Sequence
  Synthetic Polypeptide
MALPVTALLLPLALLLHAARPEVQLQESGAEVKKPGSSVKVSCKASGFNIKDTYMHWVRQAPGQGLEWMGRIDPANGNSKYVPKFQGRVTITADESTSTAYMELSSLRSEDTAVYYCAPFGYYVSDYAMAYWGQGTTVTVSSASGGGGSGGGGSGGGGSDIVMTQSPDSLAVSLGERATINCRAGESVDIFGVGFLHWYQQKPGQPPKLLIYRASNLESGVPDRFSGSGSGTDFTLTIRPLQAEDVAVYYCQQTNEDPYTFGQGTKLEIKRTVAATRGGGSMDPDLEIEAAFLERENTALETRVAELRQRVQRLRNRVSQYRTRYGPLGGGK

SEQ ID NO: 12196 - protein, 325 aa, Artificial Sequence
  Synthetic Polypeptide
MALPVTALLLPLALLLHAARPQVQLVQSGAEVKKPGSSVKVSCKASGGTFSSYAISWVRQAPGQGLEWMGLIIPRYGKARYAQKFQGRVTITADESTSTAYMELSSLRSEDTAVYYCARNWPYYYMDFWGQGTLVTVSSASGGGGSGGGGSGGGGSDIVLTQSPATLSLSPGERATLSCRASQNIVFNLAWYQQKPGQAPRLLIYDASNRATGVPARFSGSGSGTDFTLTISSLEPEDFAVYYCQQKKSMPLTFGQGTKVEIKRTVAATRGGGSMDPDLEIEAAFLERENTALETRVAELRQRVQRLRNRVSQYRTRYGPLGGGK

SEQ ID NO: 12197 - protein, 328 aa, Artificial Sequence
  Synthetic Polypeptide
MALPVTALLLPLALLLHAARPEVQLVESGGGLVKPGGSLRLSCAASGFTFSNAWMSWVRQAPGKGLEWVGRIKSKTEGGTTDYAAPVKGRFTISRDDSKNTLYLQMNSLKTEDTAVYYCTTPYEWSWYDYWGQGTLVTVSSASGGGGSGGGGSGGGGSQTVVTQEPSLTVSPGGTVTLTCGSSTGAVTTSNYANWVQQKPGQAPRGLIGGTNKRAPGTPARFSGSLLGGKAALTLSGVQPEDEAEYYCALWYSNLWVFGGGTKLTVLTVAATRGGGSMDPDLEIEAAFLERENTALETRVAELRQRVQRLRNRVSQYRTRYGPLGGGK

SEQ ID NO: 12198 - protein, 328 aa, Artificial Sequence
  Synthetic Polypeptide
MALPVTALLLPLALLLHAARPQVQLVQSGAEVKKPGASVKVSCKASGYTFTSYYMHWVRQAPGQGLEWMGIINPSGGSTSYAQKFQGRVTMTHDTSTSTVYMELSSLRSEDTAVYYCARSFFTGFHLDYWGQGTLVTVSSASGGGGSGGGGSGGGGSEIVLTQSPGTLSLSPGERATLSCRASQSVSSSYLAWYQQKPGQAPRLLIYGASSRATGIPDRFSGSGSGTDFTLTISRLEPEDFAVYYCQQYTNEHYYTFGQGTKVEIKRTVAATRGGGSMDPDLEIEAAFLERENTALETRVAELRQRVQRLRNRVSQYRTRYGPLGGGK

SEQ ID NO: 12199 - protein, 334 aa, Artificial Sequence
  Synthetic Polypeptide
MALPVTALLLPLALLLHAARPEIVLTQSPATLSLSPGERATLSCSVSSSISSSNLHWYQQKPGQAPRLLIYGTSNLASGIPARFSGSGSGTDFTLTISSLEPEDFAVYYCQQWSSYPHTFGGGTKVEIKRTVAAGGGGSGGGGSGGGGSQVQLVQSGAEVKKPGASVKVSCKASGYTFTNYLIEWVRQAPGQGLEWMGLINPGSGGTNYNEKFKGRVTMTTDTSTSTAYMELRSLRSDDTAVYYCARRSPLGSWIYYAYDGVAYWGQGTLVTVSSASTRGGGSMDPDLEIEAAFLERENTALETRVAELRQRVQRLRNRVSQYRTRYGPLGGGK

SEQ ID NO: 12200 - protein, 319 aa, Artificial Sequence
  Synthetic Polypeptide
MALPVTALLLPLALLLHAARPDIQMTQSPSSLSASVGDRVTITCKAGQNVGTSVAWYQQKPGKAPKLLIYSASYRYSGVPSRFSGSGSGTDFTLTISSLQPEDFATYYCQQYITYPYTFGQGTKVEIKRTVAAGGGGSGGGGSGGGGSEVQLVESGGGLVQPGGSLRLSCAASGFTFSRYWMSWVRQAPGKGLEWVAEINPDSSTIQYTPSLKARFTLSVDRSKNTLYLQMNSLRAEDTAVYYCARPAYWGQGTLVTVSSASTRGGGSMDPDLEIEAAFLERENTALETRVAELRQRVQRLRNRVSQYRTRYGPLGGGK

SEQ ID NO: 12201 - protein, 326 aa, Artificial Sequence
  Synthetic Polypeptide
MALPVTALLLPLALLLHAARPDIQMTQSPSSLSASVGDRVTITCSASQDIGNFLNWYQQKPGKAPKLLIYYTSSLYSGVPSRFSGSGSGTDFTLTISSLQPEDFATYYCQQYSKLPLTFGQGTKLEIKRTVAAGGGGSGGGGSGGGGSQVQLVQSGAEVKKPGASVKVSCKASGYTFTGYNIHWVRQAPGQRLEWMGAIYPGNGDTSYKQKFRGRVTITRDTSASTAYMELSSLRSEDTAVYYCARGETARATFAYWGQGTLVTVSSASTRGGGSMDPDLEIEAAFLERENTALETRVAELRQRVQRLRNRVSQYRTRYGPLGGGK

SEQ ID NO: 12202 - protein, 190 aa, Artificial Sequence
  Synthetic Polypeptide
MALPVTALLLPLALLLHAARPDVQVTQSPSSLSASVGDRVTITCRSSQSLANSYGNTFLSWYLHKPGKAPQLLIYGISNRFSGVPDRFSGSGSGTDFTLTISSLQPEDFATYYCLQGTHQPYTFGQGTKVEIKTRGGGSMDPDLEIEAAFLERENTALETRVAELRQRVQRLRNRVSQYRTRYGPLGGGK

SEQ ID NO: 12203 - protein, 185 aa, Artificial Sequence
  Synthetic Polypeptide
MALPVTALLLPLALLLHAARPDIQMTQSPSSLSASVGDRVTITCRASQDISNYLNWYQQKPGKAVKLLIYYTSILHSGVPSRFSGSGSGTDYTLTISSLQPEDFATYFCQQGNTLPWTFGGGTKVEIKTRGGGSMDPDLEIEAAFLERENTALETRVAELRQRVQRLRNRVSQYRTRYGPLGGGK

SEQ ID NO: 12204 - protein, 186 aa, Artificial Sequence
  Synthetic Polypeptide
MALPVTALLLPLALLLHAARPDIVMTQSQRFMTTSVGDRVSVTCKASQSVDSNVAWYQQKPRQSPKALIFSASLRFSGVPARFTGSGSGTDFTLTISNLQSEDLAEYFCQQYNNYPLTFGAGTKLELKRTRGGGSMDPDLEIEAAFLERENTALETRVAELRQRVQRLRNRVSQYRTRYGPLGGGK

SEQ ID NO: 12205 - protein, 186 aa, Artificial Sequence
  Synthetic Polypeptide
MALPVTALLLPLALLLHAARPDIQMTQSPSSLSASVGDRVTITCRASQDISNYLNWYQQKPGKAPKLLIYYTSILHSGVPSRFSGSGSGTDFTLTISSLQPEDFATYYCQQGNTLPWTFGQGTKVEIKRTRGGGSMDPDLEIEAAFLERENTALETRVAELRQRVQRLRNRVSQYRTRYGPLGGGK

SEQ ID NO: 12206 - protein, 186 aa, Artificial Sequence
  Synthetic Polypeptide
MALPVTALLLPLALLLHAARPDIQMTQSPSSLSASVGDRVTITCKASDHINNWLAWYQQKPGKAPKLLIYGATTLETGVPSRFSGSGSGTDFTLTISSLQPEDFATYYCQQSWNTPWTFGQGTKVEIKRTRGGGSMDPDLEIEAAFLERENTALETRVAELRQRVQRLRNRVSQYRTRYGPLGGGK

SEQ ID NO: 12207 - protein, 186 aa, Artificial Sequence
  Synthetic Polypeptide
MALPVTALLLPLALLLHAARPSYVLTQPPSVSVAPGQTARITCGGNNIGSKSVHWYQQPPGQAPVVVVYDDSDRPSGIPERFSGSNSGNTATLTISRVEAGDEAVYYCQVWDSSSDHVVFGGGTKLTVLTRGGGSMDPDLEIEAAFLERENTALETRVAELRQRVQRLRNRVSQYRTRYGPLGGGK

SEQ ID NO: 12208 - protein, 186 aa, Artificial Sequence
  Synthetic Polypeptide
MALPVTALLLPLALLLHAARPDIQMTQSPSSLSASVGDRVTITCMASEDIYIRLAWYQQKPGKAPKLLIYAATSLETGVPSRFSGSGSGTDFTLTISSLQPEDFATYYCQQYWSSPWTFGQGTKVEIKRTRGGGSMDPDLEIEAAFLERENTALETRVAELRQRVQRLRNRVSQYRTRYGPLGGGK

SEQ ID NO: 12209 - protein, 190 aa, Artificial Sequence
  Synthetic Polypeptide
MALPVTALLLPLALLLHAARPDIQMTQSPSSVSASVGDRVTITCRASESVDNYGISFMNWYQQKPGKAPKLLISAASNRATGVPSRFSGSGSGTDFTLTISSLQPEDFAIYYCQQSKEVPWTFGQGTKVEIKRTRGGGSMDPDLEIEAAFLERENTALETRVAELRQRVQRLRNRVSQYRTRYGPLGGGK

SEQ ID NO: 12210 - protein, 190 aa, Artificial Sequence
  Synthetic Polypeptide
MALPVTALLLPLALLLHAARPDIQLTQSPSSLSASVGDRVTITCRASKSVSTSGYSYMHWYQQKPGKAPKLLIYLVSNLESGVPSRFSGSGSGTDFTLTISSLQPEDFATYYCQQFSELPWTFGQGTKVEIKRTRGGGSMDPDLEIEAAFLERENTALETRVAELRQRVQRLRNRVSQYRTRYGPLGGGK

SEQ ID NO: 12211 - protein, 187 aa, Artificial Sequence
  Synthetic Polypeptide
MALPVTALLLPLALLLHAARPDIQMTQSPSSVSASVGDRVTITCRASQFISSSYLSWYQQKPGKAPKLLISGSSSRATGVPSRFSGSGSGTDFTLTISSLQPEDFAIYYCQQLYSSPMTFGQGTKVEIKRTRGGGSMDPDLEIEAAFLERENTALETRVAELRQRVQRLRNRVSQYRTRYGPLGGGK

SEQ ID NO: 12212 - protein, 201 aa, Artificial Sequence
  Synthetic Polypeptide
MALPVTALLLPLALLLHAARPQVQLVESGGGLVQAGDSVTLSCTASGRTFSSYALAWFRQRPGKEREFVAGLRWGGPTNYADSVKDRFTISGDSAKHTMYLQMNSLKPEDTAVYYCGYNPGGWAVPSQYEYDSWGQGTQVTVSSTRGGGSMDPDLEIEAAFLERENTALETRVAELRQRVQRLRNRVSQYRTRYGPLGGGK

SEQ ID NO: 12213 - protein, 196 aa, Artificial Sequence
  Synthetic Polypeptide
MALPVTALLLPLALLLHAARPQVQLQESGGGLAQAGGSLRLSCAASGRTFSMGWFRQAPGKEREFVAAITYSGGSPYYASSVRGRFTISRDNAKNTVYLQMNSLKPEDTAVYYCAANPTYGSDWNAENWGQGTQVTVSSTRGGGSMDPDLEIEAAFLERENTALETRVAELRQRVQRLRNRVSQYRTRYGPLGGGK

SEQ ID NO: 12214 - protein, 194 aa, Artificial Sequence
  Synthetic Polypeptide
MALPVTALLLPLALLLHAARPEVQLVESGGGLVQPGGSLRLSCAASGFSFSDFWMSWVRQAPGKGLEWVATISQAGSEKDYVDSVKGRFTISRDNAKKSLYLQMNSLRAEDTAVYYCASGVYSFDYRGQGTLVTVSSTRGGGSMDPDLEIEAAFLERENTALETRVAELRQRVQRLRNRVSQYRTRYGPLGGGK

SEQ ID NO: 12215 - protein, 194 aa, Artificial Sequence
  Synthetic Polypeptide
MALPVTALLLPLALLLHAARPEVQLVESGGGLVQPGGSLRLSCAASGFTFSNYWMSWVRQAPGKGQEWVATINQDGSDKDYVDSVKGRFTISRDNAKKSLYLQMNSLRAEDTAVYYCASGVYSFDYRGQGTLVTVSSTRGGGSMDPDLEIEAAFLERENTALETRVAELRQRVQRLRNRVSQYRTRYGPLGGGK

SEQ ID NO: 12216 - protein, 194 aa, Artificial Sequence
  Synthetic Polypeptide
MALPVTALLLPLALLLHAARPEVQLVESGGGLVQPGGSLRLSCAASGIDFSRYWMSWVRQAPGKGLEWVATISQAGSEKDYVDSVKGRFTISRDNAKKSLYLQMNSLRAEDTAVYYCASGVYSFDYRGQGTLVTVSSTRGGGSMDPDLEIEAAFLERENTALETRVAELRQRVQRLRNRVSQYRTRYGPLGGGK

SEQ ID NO: 12217 - protein, 194 aa, Artificial Sequence
  Synthetic Polypeptide
MALPVTALLLPLALLLHAARPEVQLVESGGGLVQPGGSLRLSCAASGIDFSRYWMSWVRQAPGKGQEWVATINQDGSDKDYVDSVKGRFTISRDNAKKSLYLQMNSLRAEDTAVYYCASGVYSFDYRGQGTLVTVSSTRGGGSMDPDLEIEAAFLERENTALETRVAELRQRVQRLRNRVSQYRTRYGPLGGGK

SEQ ID NO: 12218 - protein, 198 aa, Artificial Sequence
  Synthetic Polypeptide
MALPVTALLLPLALLLHAARPEVQLVESGGGLVQPGGSLRLSCTFSGGTFSSYTMGWFRQAPGKEREFVAEVRWGGVTTYSNSLKDRFSISEDSVKNAVYLQMNSLKPEDTAVYYCAAVRQMYMTVVPDYWGQGTLVTVSSTRGGGSMDPDLEIEAAFLERENTALETRVAELRQRVQRLRNRVSQYRTRYGPLGGGK

SEQ ID NO: 12219 - protein, 196 aa, Artificial Sequence
  Synthetic Polypeptide
MALPVTALLLPLALLLHAARPEVQLVESGGGLVQAGGSLRLSCAASGRTFSMGWFRQAPGKEREFVAAITYSGGSPYYADSVKGRFTISRDNAKNTVYLQMNSLKPEDTAVYYCAANPTYGSDWNAENWGQGTQVTVSSTRGGGSMDPDLEIEAAFLERENTALETRVAELRQRVQRLRNRVSQYRTRYGPLGGGK

SEQ ID NO: 12220 - protein, 196 aa, Artificial Sequence
  Synthetic Polypeptide
MALPVTALLLPLALLLHAARPQLQLQESGPGLVKPSETLSLTCTVSGGSISSGDYYWGWIRQPPGKGLEWIGHIYYSGATYYNPSLKSRVTISVDTSRNQFSLKLSSVTAADTAVYYCTRDDSSNWRSRGQGTLVTVSSTRGGGSMDPDLEIEAAFLERENTALETRVAELRQRVQRLRNRVSQYRTRYGPLGGGK

SEQ ID NO: 12221 - protein, 196 aa, Artificial Sequence
  Synthetic Polypeptide
MALPVTALLLPLALLLHAARPQLQLQESGPGLVKPSETLSLTCTVSGDSISSGDYYWGWIRQPPGKGLEWIGHIYYSGVTYYNPSLKSRVTISVDTSRNQFSLKLSSVTAADTAVYYCTREDSSNWRSRGQGTLVTVSSTRGGGSMDPDLEIEAAFLERENTALETRVAELRQRVQRLRNRVSQYRTRYGPLGGGK

SEQ ID NO: 12222 - protein, 196 aa, Artificial Sequence
  Synthetic Polypeptide
MALPVTALLLPLALLLHAARPQLQLQESGPGLVKPSETLSLTCTVSGGSISSGDYYWGWIRQPPGKGLEWIGSISYSGSTYYNPSLKSRVTISVDTSRNQFSLKLSSVTAADTAVYYCTREDSSNWRSRGQGTLVTVSSTRGGGSMDPDLEIEAAFLERENTALETRVAELRQRVQRLRNRVSQYRTRYGPLGGGK

SEQ ID NO: 12223 - protein, 202 aa, Artificial Sequence
  Synthetic Polypeptide
MALPVTALLLPLALLLHAARPQLQLQESGPGLVKPSETLALTCNVSGGSISSSSYYWGWIRQPPGKRLEWIGSIYYSGSTYFNPSLKSRVTISVDTSKNQFSLKLSSVTAADTAVYYCAGGDYYGPVGQWPSDYRGQGTLVTVSSTRGGGSMDPDLEIEAAFLERENTALETRVAELRQRVQRLRNRVSQYRTRYGPLGGGK

SEQ ID NO: 12224 - protein, 208 aa, Artificial Sequence
  Synthetic Polypeptide
MALPVTALLLPLALLLHAARPEVQLLESGGGLVQPGGSLRLSCAASGFIFSSYAMSWVRQAPGKGQEWVSGVSGTGVNTYYADSVKGRFTISRDNSKNTLYLQMNSLRAEDTAVYYCASGKGWDSGSWYEDYRGQGTLVTVSSTRPRLCLLTRGGGSMDPDLEIEAAFLERENTALETRVAELRQRVQRLRNRVSQYRTRYGPLGGGK

SEQ ID NO: 12225 - protein, 202 aa, Artificial Sequence
  Synthetic Polypeptide
MALPVTALLLPLALLLHAARPQLQLQESGPGLVKPSETLSLTCTVSGGSVSSSSYYWGWIRQPPGKRLELIGSIYYGGSTYFNPSLKSRVTISVDTSKNQFSLKLSSVTAADTAVYYCAGGDTYGPVGQWPSDYRGQGTLVTVSSTRGGGSMDPDLEIEAAFLERENTALETRVAELRQRVQRLRNRVSQYRTRYGPLGGGK

SEQ ID NO: 12226 - protein, 200 aa, Artificial Sequence
  Synthetic Polypeptide
MALPVTALLLPLALLLHAARPEVQLLESGGGLVQPGGSLRLSCAASGFIFSIYAMSWVRQAPGKGLEWVSGISGSGVNTYYADSVKGRFIISRDNSRNTVYLQMNSLRADDTAVYHCANGKGWDGNTWYEDYRGQGTLVTVSSTRGGGSMDPDLEIEAAFLERENTALETRVAELRQRVQRLRNRVSQYRTRYGPLGGGK

SEQ ID NO: 12227 - protein, 195 aa, Artificial Sequence
  Synthetic Polypeptide
MALPVTALLLPLALLLHAARPEVQVLESGGGLVQPGGSLRLSCAASGFTFSNFAMSWVRQAPGKGLEWVSTISGSAGTTDYADSVKGRFTISRDNSKKTLYLQMNSLRVEDTAVYYCADGRGPFFDYRGQGTLVTVSSTRGGGSMDPDLEIEAAFLERENTALETRVAELRQRVQRLRNRVSQYRTRYGPLGGGK

SEQ ID NO: 12228 - protein, 197 aa, Artificial Sequence
  Synthetic Polypeptide
MALPVTALLLPLALLLHAARPEVQLVESGGGLVQPGGSLRLSCAASGFNIKDTCIGWVRRAPGKEEELVAKICKYSGHTRYADSVKGRFTISADTSKNTAYLQMNSLRAEDTAVYYCAAVSVRDGHYNYWGQGTTVTVSSTRGGGSMDPDLEIEAAFLERENTALETRVAELRQRVQRLRNRVSQYRTRYGPLGGGK

SEQ ID NO: 12229 - protein, 197 aa, Artificial Sequence
  Synthetic Polypeptide
MALPVTALLLPLALLLHAARPEVQLVESGGGLVQPGGSLRLSCAASGFNIKDTCIGWVRRAPGKEEELVADICPYKGSTRYADSVKGRFTISADTSKNTAYLQMNSLRAEDTAVYYCAIVSARDGYYNYWGQGTTVTVSSTRGGGSMDPDLEIEAAFLERENTALETRVAELRQRVQRLRNRVSQYRTRYGPLGGGK

SEQ ID NO: 12230 - protein, 197 aa, Artificial Sequence
  Synthetic Polypeptide
MALPVTALLLPLALLLHAARPEVQLLESGGGLVQPGGSLRLSCAASGFTFSSYAMSWVRQAPGKGLEWVSAITGSGGSTYYADSVKGRFTISRDNSKNTLYLQMNSLRAEDTAVYYCAKDEDGGSLLGHRGQGTLVTVSSTRGGGSMDPDLEIEAAFLERENTALETRVAELRQRVQRLRNRVSQYRTRYGPLGGGK

SEQ ID NO: 12231 - protein, 197 aa, Artificial Sequence
  Synthetic Polypeptide
MALPVTALLLPLALLLHAARPEVQLLESGGGLIQPGGSLRLSCAASGFTFSSHAMTWVRQAPGKGLEWVSAISSGGSYTYYADSVKGRFTISRDNSKNTLYLQMNSLRAEDTAVYYCAKDEDGGSLLGHRGQGTLVTVSSTRGGGSMDPDLEIEAAFLERENTALETRVAELRQRVQRLRNRVSQYRTRYGPLGGGK

SEQ ID NO: 12232 - protein, 197 aa, Artificial Sequence
  Synthetic Polypeptide
MALPVTALLLPLALLLHAARPEVQLVESGGGLVQPGGSLRLSCAASGFSFSDFWMSWVRQAPGKGLEWVSAISGSGDYTHYADSVKGRFTISRDNSKNTVYLQMNSLRAEDSAVYYCAKDEDGGSLLGHRGQGTLVTVSSTRGGGSMDPDLEIEAAFLERENTALETRVAELRQRVQRLRNRVSQYRTRYGPLGGGK

SEQ ID NO: 12233 - protein, 199 aa, Artificial Sequence
  Synthetic Polypeptide
MALPVTALLLPLALLLHAARPEVQLLESGGGLVQPGGSLRLSCAASGFAFSIYDMSWVRQAPGKGLEWVSSISGSGDYIYYADSVKGRFTISRDISKNTLYLQMNSLRAEDTAVYYCAKEGTGANSSLADYRGQGTLVTVSSTRGGGSMDPDLEIEAAFLERENTALETRVAELRQRVQRLRNRVSQYRTRYGPLGGGK

SEQ ID NO: 12234 - protein, 199 aa, Artificial Sequence
  Synthetic Polypeptide
MALPVTALLLPLALLLHAARPEVQLLESGGGLVQPGGSLRLSCAASGFTFSSYAMSWVRQAPGKGLEWVSSISGSGDYIYYADSVKGRFTISRDISKNTLYLQMNSLRAEDTAVYYCAKEGTGANSSLADYRGQGTLVTVSSTRGGGSMDPDLEIEAAFLERENTALETRVAELRQRVQRLRNRVSQYRTRYGPLGGGK

SEQ ID NO: 12235 - protein, 196 aa, Artificial Sequence
  Synthetic Polypeptide
MALPVTALLLPLALLLHAARPQVQLVESGGGLVQPGGSLRLSCAASGFTFTNHAMSWVRQAPGKGLELVSSISGNGRTTYYADSVKGRFTISRDISKNTLDLQMNSLRAEDTAVYYCAKDGGETLVDSRGQGTLVTVSSTRGGGSMDPDLEIEAAFLERENTALETRVAELRQRVQRLRNRVSQYRTRYGPLGGGK

SEQ ID NO: 12236 - protein, 197 aa, Artificial Sequence
  Synthetic Polypeptide
MALPVTALLLPLALLLHAARPEVQLLESGGGLIQPGGSLRLSCAASGFTFSSHAMTWVRQAPGKGLEWVSAISGSGDYTHYADSVKGRFTISRDNSKNTVYLQMNSLRAEDSAVYYCAKDEDGGSLLGHRGQGTLVTVSSTRGGGSMDPDLEIEAAFLERENTALETRVAELRQRVQRLRNRVSQYRTRYGPLGGGK

SEQ ID NO: 12237 - protein, 198 aa, Artificial Sequence
  Synthetic Polypeptide
MALPVTALLLPLALLLHAARPQVQLQESGGGLVQAGDSLRLSCAASGRAVSSLFMGWFRRAPGKERELVAAISRYSLYTYYADSVKGRFTISADNAKNAVYLQMNSLKPEDTAVYYCASKLEYTSNDYDSWGQGTQVTVSSTRGGGSMDPDLEIEAAFLERENTALETRVAELRQRVQRLRNRVSQYRTRYGPLGGGK

SEQ ID NO: 12238 - protein, 198 aa, Artificial Sequence
  Synthetic Polypeptide
MALPVTALLLPLALLLHAARPEVQLQESGGGLVQPGGSLRLSCAASGRTFSSLFMGWFRQAPGKERELVAAISRYSLYTYYADSVKGRFTISADNAKNAVYLQMNSLKPEDTAVYYCASKLEYTSNDYDSWGQGTQVTVSSTRGGGSMDPDLEIEAAFLERENTALETRVAELRQRVQRLRNRVSQYRTRYGPLGGGK

SEQ ID NO: 12239 - protein, 198 aa, Artificial Sequence
  Synthetic Polypeptide
MALPVTALLLPLALLLHAARPEVQLQESGGGLVQPGGSLRLSCAASGRTFSSLFMGWVRQAPGKGLELVSAISRYSLYTYYADSVKGRFTISRDNAKNTLYLQMNSLRPEDTAVYYCASKLEYTSNDYDSWGQGTLVTVSSTRGGGSMDPDLEIEAAFLERENTALETRVAELRQRVQRLRNRVSQYRTRYGPLGGGK

SEQ ID NO: 12240 - protein, 206 aa, Artificial Sequence
  Synthetic Polypeptide
MALPVTALLLPLALLLHAARPEVQLVESGGGLVQPGGSLRLSCEASGFASDDYIIGWFRQAPGKEREGVSCISSKYANTVYTDSVKGRFRLSRGTAKNTVYLQMSALKPEDTAVYYCAMDSRRVTCPEISTMHRNFDSWGQGTLVTVSSTRGGGSMDPDLEIEAAFLERENTALETRVAELRQRVQRLRNRVSQYRTRYGPLGGGK

SEQ ID NO: 12241 - protein, 206 aa, Artificial Sequence
  Synthetic Polypeptide
MALPVTALLLPLALLLHAARPEVQLVESGGGLVQPGGSLRLSCAASGFASDYYIIGWFRQAPGKEREGVSCISSRYANTNYADSVKGRFTISRDNAKNTVYLQMNSLKPEDTAVYYCAADTRRYTCPDIATMHRNFDSWGQGTLVTVSSTRGGGSMDPDLEIEAAFLERENTALETRVAELRQRVQRLRNRVSQYRTRYGPLGGGK

SEQ ID NO: 12242 - protein, 202 aa, Artificial Sequence
  Synthetic Polypeptide
MALPVTALLLPLALLLHAARPEVQLVESGGSLVQPGGSLRLSCAASGFTFDDYAMSWVRQVPGKGLEWVSSINWSGTHTDYADSVKGRFTISRNNANNTLYLQMNSLKSEDTAVYYCAKNWRDAGTTWFEKSGSAGQGTQVTVSSTRGGGSMDPDLEIEAAFLERENTALETRVAELRQRVQRLRNRVSQYRTRYGPLGGGK

SEQ ID NO: 12243 - protein, 196 aa, Artificial Sequence
  Synthetic Polypeptide
MALPVTALLLPLALLLHAARPEVQLVESGGGLVQAGGSLRLSCAASGITFSINTMGWYRQAPGKQRELVALISSIGDTYYADSVKGRFTISRDNAKNTVYLQMNSLKPEDTAVYYCKRFRTAAQGTDYWGQGTQVTVSSTRGGGSMDPDLEIEAAFLERENTALETRVAELRQRVQRLRNRVSQYRTRYGPLGGGK

SEQ ID NO: 12244 - protein, 197 aa, Artificial Sequence
  Synthetic Polypeptide
MALPVTALLLPLALLLHAARPEVQLVESGGGLVQPGGSLRLSCAASGSIFGFNDMAWYRQAPGKQRELVALISRVGVTSSADSVKGRFTISRVNAKDTVYLQMNSLKPEDTAVYYCYMDQRLDGSTLAYWGQGTQVTVSSTRGGGSMDPDLEIEAAFLERENTALETRVAELRQRVQRLRNRVSQYRTRYGPLGGGK

SEQ ID NO: 12245 - protein, 198 aa, Artificial Sequence
  Synthetic Polypeptide
MALPVTALLLPLALLLHAARPDVQLVESGGGLVQPGGSLRLSCAASGSIGGLNAMAWYRQAPGKERELVAGIFGVGSTRYADSVKGRFTISRDNSKNTVYLQMNSLRPEDTAVYYCRMSSVTRGSSDYWGQGTLVTVSSLETRGGGSMDPDLEIEAAFLERENTALETRVAELRQRVQRLRNRVSQYRTRYGPLGGGK

SEQ ID NO: 12246 - protein, 203 aa, Artificial Sequence
  Synthetic Polypeptide
MALPVTALLLPLALLLHAARPEVQLVESGGGLVQPGGSLRLSCAASGRTYYLNAMGWFRQAPGKEREFVAAIDWSEGNKDYADSVKGRFTISRDNSKNTVYLQMNSLRPEDTAVYYCAADTPPWGPLIYIESYDSWGQGTLVTVSSTRGGGSMDPDLEIEAAFLERENTALETRVAELRQRVQRLRNRVSQYRTRYGPLGGGK

SEQ ID NO: 12247 - protein, 201 aa, Artificial Sequence
  Synthetic Polypeptide
MALPVTALLLPLALLLHAARPEVQLVESGGGSVQAGGSLRLSCAASGDTYGSYWMGWFRQAPGKEREGVAAINRGGGYTVYADSVKGRFTISRDTAKNTVYLQMNSLRPDDTADYYCAASGVLGGLHEDWFNYWGQGTLVTVSSTRGGGSMDPDLEIEAAFLERENTALETRVAELRQRVQRLRNRVSQYRTRYGPLGGGK

SEQ ID NO: 12248 - protein, 200 aa, Artificial Sequence
  Synthetic Polypeptide
MALPVTALLLPLALLLHAARPVQLVESGGGSVQAGGSLRLSCAASGDTYGSYWMGWFRQAPGQEREAVAAINRGGGYTVYADSVKGRFTISRDNAKNTLYLQMNSLRPDDTADYYCAASGVLGGLHEDWFNYWGQGTLVTVSSTRGGGSMDPDLEIEAAFLERENTALETRVAELRQRVQRLRNRVSQYRTRYGPLGGGK

SEQ ID NO: 12249 - protein, 202 aa, Artificial Sequence
  Synthetic Polypeptide
MALPVTALLLPLALLLHAARPEVQLVESGGGSVQTGGSLRLTCAASGRTSRSYGMGWFRQAPGKEREFVSGISWRGDSTGYADSVKGRFTISRDNAKNTVDLQMNSLKPEDTAIYYCAAAAGSAWYGTLYEYDYWGQGTLVTVSSTRGGGSMDPDLEIEAAFLERENTALETRVAELRQRVQRLRNRVSQYRTRYGPLGGGK

SEQ ID NO: 12250 - protein, 202 aa, Artificial Sequence
  Synthetic Polypeptide
MALPVTALLLPLALLLHAARPEVQLVESGGGSVQAGGSLRLTCAASGSTSRSYGMGWFRQAPGKEREFVSGISWRGDSTGYADSVKGRFTISRDNAKNTVDLQMNSLKPEDTAIYYCAAAAGSTWYGTLYEYDYWGQGTLVTVSSTRGGGSMDPDLEIEAAFLERENTALETRVAELRQRVQRLRNRVSQYRTRYGPLGGGK

SEQ ID NO: 12251 - protein, 203 aa, Artificial Sequence
  Synthetic Polypeptide
MALPVTALLLPLALLLHAARPDVQLVESGGGLVQPGGSLRLSCAASGFILDYYAIGWFRQAPGKEREGVLCIDASDDITYYADSVKGRFTISRDNSKNTVYLQMNSLRPEDTAVYYCATPIGLSSSCLLEYDYDYWGQGTLVTVSSTRGGGSMDPDLEIEAAFLERENTALETRVAELRQRVQRLRNRVSQYRTRYGPLGGGK

SEQ ID NO: 12252 - protein, 204 aa, Artificial Sequence
  Synthetic Polypeptide
MALPVTALLLPLALLLHAARPEVQLVESGGGLVQAGDSLRLSCAASGRAFSRYAMGWFRQAPGKEREFVAAIGWGPSKTNYADSVKGRFTISRDNAKNTVYLQMNTLKPEDTAVYSCAAKFVNTDSTWSRSEMYTYWGQGTLVTVSSTRGGGSMDPDLEIEAAFLERENTALETRVAELRQRVQRLRNRVSQYRTRYGPLGGGK

SEQ ID NO: 12253 - protein, 200 aa, Artificial Sequence
  Synthetic Polypeptide
MALPVTALLLPLALLLHAARPEVQLVESGGGLVQAGGSLRLSCVASGISSSKRNMGWYRQAPGKQRESVATISSGGNKDYTDAVKDRFTISRDTTKNTVYLQMNSLKPEDTAVYYCKIEAGTGWATRRGYTYWGQGTLVTVSSTRGGGSMDPDLEIEAAFLERENTALETRVAELRQRVQRLRNRVSQYRTRYGPLGGGK

SEQ ID NO: 12254 - protein, 190 aa, Artificial Sequence
  Synthetic Polypeptide
MALPVTALLLPLALLLHAARPQVQLVQSGGGLVQPGGSLRLSCAASDFDFAAYEMSWVRQAPGQGLEWVAIISHDGIDKYYTDSVKGRFTISRDNSKNTLYLQMNTLRAEDTATYYCLRLGAVGQGTLVTVSSTRGGGSMDPDLEIEAAFLERENTALETRVAELRQRVQRLRNRVSQYRTRYGPLGGGK

SEQ ID NO: 12255 - protein, 198 aa, Artificial Sequence
  Synthetic Polypeptide
MALPVTALLLPLALLLHAARPQVQLVQSGGGLVQPGGSLRLSCAASDFAFDDYEMSWVRQAPGKALEWIGDINHSGTTIYNPSLKSRVTISRDNSKNTLYLQMNTLRAEDTAIYYCARPHYGDYSDAFDIWGQGTMVTVSSTRGGGSMDPDLEIEAAFLERENTALETRVAELRQRVQRLRNRVSQYRTRYGPLGGGK

SEQ ID NO: 12256 - protein, 193 aa, Artificial Sequence
  Synthetic Polypeptide
MALPVTALLLPLALLLHAARPEVQLVESGGGLVQPGNSLRLSCAASGFTFSSFGMSWVRQAPGKGLEWVSSISGSGSDTLYADSVKGRFTISRDNAKTTLYLQMNSLRPEDTAVYYCTIGGSLSRSSQGTLVTVSSTRGGGSMDPDLEIEAAFLERENTALETRVAELRQRVQRLRNRVSQYRTRYGPLGGGK

SEQ ID NO: 12257 - protein, 194 aa, Artificial Sequence
  Synthetic Polypeptide
MALPVTALLLPLALLLHAARPEVQLVESGGGLVQAGGSLRLSCAASGSIFSGNVMGWYRRQAPGKEREWVAAIASGGSIYYRDSVKGRFTISRDNAKNTVYLQMNSLKPEDTAVYYCNSHPPTLPYWGLGTQVTVSSTRGGGSMDPDLEIEAAFLERENTALETRVAELRQRVQRLRNRVSQYRTRYGPLGGGK

SEQ ID NO: 12258 - protein, 204 aa, Artificial Sequence
  Synthetic Polypeptide
MALPVTALLLPLALLLHAARPEVQLVESGGGSVQAGGSLRLSCTTSGRALNMYVMGWFRQAPGNEREFVAATSSSGGSTSYPDSVKGRFTISRDNAKNTVYLQMNSLKPEDTAAYRCAASPYVSTPTMNILEEYRYWGLGTQVTVSSTRGGGSMDPDLEIEAAFLERENTALETRVAELRQRVQRLRNRVSQYRTRYGPLGGGK

SEQ ID NO: 12259 - protein, 199 aa, Artificial Sequence
  Synthetic Polypeptide
MALPVTALLLPLALLLHAARPEVQLVESGGGLVQPGGSLRLSCAASGSVFKINVMAWYRQAPGKGRELVAGIISGGSTSYADSVKGRFTISRDNAKNTLYLQMNSLRPEDTAVYYCAFITTESDYDLGRRYWGQGTLVTVSSTRGGGSMDPDLEIEAAFLERENTALETRVAELRQRVQRLRNRVSQYRTRYGPLGGGK

SEQ ID NO: 12260 - protein, 344 aa, Artificial Sequence
  Synthetic Polypeptide
MALPVTALLLPLALLLHAARPEVQLVESGGGSVQTGGSLRLTCAASGRTSRSYGMGWFRQAPGKEREFVSGISWRGDSTGYADSVKGRFTISRDNAKNTVDLQMNSLKPEDTAIYYCAAAAGSAWYGTLYEYDYWGQGTLVTVSSLEGGGGSGGGGSGGGGSFEEVQLVESGGGSVQAGGSLRLSCAASGDTYGSYWMGWFRQAPGKEREGVAAINRGGGYTVYADSVKGRFTISRDTAKNTVYLQMNSLRPDDTADYYCAASGVLGGLHEDWFNYWGQGTLVTVSSTRGGGSMDPDLEIEAAFLERENTALETRVAELRQRVQRLRNRVSQYRTRYGPLGGGK

SEQ ID NO: 12261 - protein, 363 aa, Artificial Sequence
  Synthetic Polypeptide
MALPVTALLLPLALLLHAARPEVQLVESGGGSVQAGGSLRLTCAASGSTSRSYGMGWFRQAPGKEREFVSGISWRGDSTGYADSVKGRFTISRDNAKNTVDLQMNSLKPEDTAIYYCAAAAGSTWYGTLYEYDYWGQGTLVTVSSLEGGGGSGGGGSGGGGSGSGGSGSGGSGSGGSGSGGSFEVQLVESGGGSVQAGGSLRLSCAASGDTYGSYWMGWFRQAPGQEREAVAAINRGGGYTVYADSVKGRFTISRDNAKNTLYLQMNSLRPDDTADYYCAASGVLGGLHEDWFNYWGQGTLVTVSSTRGGGSMDPDLEIEAAFLERENTALETRVAELRQRVQRLRNRVSQYRTRYGPLGGGK

SEQ ID NO: 12262 - protein, 353 aa, Artificial Sequence
  Synthetic Polypeptide
MALPVTALLLPLALLLHAARPEVQLVESGGGLVQAGGSLRLSCAASGITFSINTMGWYRQAPGKQRELVALISSIGDTYYADSVKGRFTISRDNAKNTVYLQMNSLKPEDTAVYYCKRFRTAAQGTDYWGQGTQVTVSSLEGGGGSGGGGSGGGGSGSGGSGSGGSGSGGSGSGGSFEVQLVESGGGLVQPGGSLRLSCAASGSIFGFNDMAWYRQAPGKQRELVALISRVGVTSSADSVKGRFTISRVNAKDTVYLQMNSLKPEDTAVYYCYMDQRLDGSTLAYWGQGTQVTVSSTRGGGSMDPDLEIEAAFLERENTALETRVAELRQRVQRLRNRVSQYRTRYGPLGGGK

SEQ ID NO: 12263 - protein, 320 aa, Artificial Sequence; identical to SEQ ID NO: 12078
  Synthetic Polypeptide

SEQ ID NO: 12264 - protein, 358 aa, Artificial Sequence
  Synthetic Polypeptide
MALPVTALLLPLALLLHAARPDVQLVESGGGLVQPGGSLRLSCAASGSIGGLNAMAWYRQAPGKERELVAGIFGVGSTRYADSVKGRFTISRDNSKNTVYLQMNSLRPEDTAVYYCRMSSVTRGSSDYWGQGTLVTVSSLEGGGGSGGGGSGGGGSGSGGSGSGGSGSGGSGSGGSFEVQLVESGGSLVQPGGSLRLSCAASGFTFDDYAMSWVRQVPGKGLEWVSSINWSGTHTDYADSVKGRFTISRNNANNTLYLQMNSLKSEDTAVYYCAKNWRDAGTTWFEKSGSAGQGTQVTVSSTRGGGSMDPDLEIEAAFLERENTALETRVAELRQRVQRLRNRVSQYRTRYGPLGGGK

SEQ ID NO: 12265 - protein, 366 aa, Artificial Sequence
  Synthetic Polypeptide
MALPVTALLLPLALLLHAARPDVQLVESGGGLVQPGGSLRLSCAASGFILDYYAIGWFRQAPGKEREGVLCIDASDDITYYADSVKGRFTISRDNSKNTVYLQMNSLRPEDTAVYYCATPIGLSSSCLLEYDYDYWGQGTLVTVSSLEGGSGSGGGGSGGGGSGSGGSGSGGSGSGGSGSGGSFEVQLVESGGGLVQPGGSLRLSCAASGRTYYLNAMGWFRQAPGKEREFVAAIDWSEGNKDYADSVKGRFTISRDNSKNTVYLQMNSLRPEDTAVYYCAADTPPWGPLIYIESYDSWGQGTLVTVSSTRGGGSMDPDLEIEAAFLERENTALETRVAELRQRVQRLRNRVSQYRTRYGPLGGGK

SEQ ID NO: 12266 - protein, 349 aa, Artificial Sequence
  Synthetic Polypeptide
MALPVTALLLPLALLLHAARPQVQLVQSGGGLVQPGGSLRLSCAASDFDFAAYEMSWVRQAPGQGLEWVAIISHDGIDKYYTDSVKGRFTISRDNSKNTLYLQMNTLRAEDTATYYCLRLGAVGQGTLVTVSSLEGGGGSGGGGSGGGGSGSGGSGSGGSGSGGSGSGGSFEQVQLVQSGGGLVQPGGSLRLSCAASDFAFDDYEMSWVRQAPGKALEWIGDINHSGTTIYNPSLKSRVTISRDNSKNTLYLQMNTLRAEDTAIYYCARPHYGDYSDAFDIWGQGTMVTVSSTRGGGSMDPDLEIEAAFLERENTALETRVAELRQRVQRLRNRVSQYRTRYGPLGGGK

SEQ ID NO: 12267 - protein, 197 aa, Artificial Sequence
  Synthetic Polypeptide
MALPVTALLLPLALLLHAARPQVKLEESGGGLVQAGRSLRLSCAASEHTFSSHVMGWFRQAPGKERESVAVIGWRDISTSYADSVKGRFTISRDNAKKTLYLQMNSLKPEDTAVYYCAARRIDAADFDSWGQGTQVTVSSTRGGGSMDPDLEIEAAFLERENTALETRVAELRQRVQRLRNRVSQYRTRYGPLGGGK

SEQ ID NO: 12268 - protein, 196 aa, Artificial Sequence
  Synthetic Polypeptide
MALPVTALLLPLALLLHAARPEVQLVESGGGLVQAGGSLRLSCAASGRTFTMGWFRQAPGKEREFVAAISLSPTLAYYAESVKGRFTISRDNAKNTVVLQMNSLKPEDTALYYCAADRKSVMSIRPDYWGQGTQVTVSSTRGGGSMDPDLEIEAAFLERENTALETRVAELRQRVQRLRNRVSQYRTRYGPLGGGK

SEQ ID NO: 12269 - protein, 330 aa, Artificial Sequence
  Synthetic Polypeptide
MALPVTALLLPLALLLHAARPQVKLEESGGGLVQAGRSLRLSCAASEHTFSSHVMGWFRQAPGKERESVAVIGWRDISTSYADSVKGRFTISRDNAKKTLYLQMNSLKPEDTAVYYCAARRIDAADFDSWGQGTQVTVSSGGGGSGGGGSGGGGSEVQLVESGGGLVQAGGSLRLSCAASGRTFTMGWFRQAPGKEREFVAAISLSPTLAYYAESVKGRFTISRDNAKNTVVLQMNSLKPEDTALYYCAADRKSVMSIRPDYWGQGTQVTVSSTRGGGSMDPDLEIEAAFLERENTALETRVAELRQRVQRLRNRVSQYRTRYGPLGGGK

SEQ ID NO: 12270 - protein, 194 aa, Artificial Sequence
  Synthetic Polypeptide
MALPVTALLLPLALLLHAARPEVQLVESGGGLVQAGGSLRLSCIATGKVFSIYDMGWYRQAPGKQRELVAEITSSGTTHYDDFVSGRFTISRDNAKNTVYLQMNTLKAEDTAVYYCRANHVFGGSYWGQGTQVTVSSTRGGGSMDPDLEIEAAFLERENTALETRVAELRQRVQRLRNRVSQYRTRYGPLGGGK

SEQ ID NO: 12271 - protein, 200 aa, Artificial Sequence
  Synthetic Polypeptide
MALPVTALLLPLALLLHAARPQVQLVESGGGLVQPGGSLRLSCEASGFTLDYYAIGWFRQAPGKEREGVICISRSDGSTYYADSVKGRFTISRDNAKKTVYLQMISLKPEDTAAYYCAAGADCSGYLRDYEFRGQGTQVTVSSTRGGGSMDPDLEIEAAFLERENTALETRVAELRQRVQRLRNRVSQYRTRYGPLGGGK

SEQ ID NO: 12272 - protein, 323 aa, Artificial Sequence
  Synthetic Polypeptide
MALPVTALLLPLALLLHAARPEVQLVESGGGLVQAGGSLRLSCIATGKVFSIYDMGWYRQAPGKQRELVAEITSSGTTHYDDFVSGRFTISRDNAKNTVYLQMNTLKAEDTAVYYCRANHVFGGSYWGQGTQVTVSSEVAALEKQVQLVESGGGLVQPGGSLRLSCEASGFTLDYYAIGWFRQAPGKEREGVICISRSDGSTYYADSVKGRFTISRDNAKKTVYLQMISLKPEDTAAYYCAAGADCSGYLRDYEFRGQGTQVTVSSTRGGGSMDPDLEIEAAFLERENTALETRVAELRQRVQRLRNRVSQYRTRYGPLGGGK

SEQ ID NO: 12273 - protein, 206 aa, Artificial Sequence
  Synthetic Polypeptide
MALPVTALLLPLALLLHAARPQVKLEESGGRLVQPRGSLRLSCAGSGRTFSTYGMAWFRQAPGKEREFVASKASMNYSGRTYYADSVKGRFTIARDNAKNMVFLQMNNLKPEDTAVYYCAAGTGCSTYGCFDAQIIDYWGKGTLVTVSSTRGGGSMDPDLEIEAAFLERENTALETRVAELRQRVQRLRNRVSQYRTRYGPLGGGK

SEQ ID NO: 12274 - protein, 197 aa, Artificial Sequence
  Synthetic Polypeptide
MALPVTALLLPLALLLHAARPQVKLEESGGGLVQPGESLRLSCSASGSIFKVFRVFAMSWYRQGPGKQRELVASISSGETTTYADSVKGRFTISRDNAKNTAYLQMDSLKPEDTAVYYCNADHTFTGDFWGQGTQVTVSSTRGGGSMDPDLEIEAAFLERENTALETRVAELRQRVQRLRNRVSQYRTRYGPLGGGK

SEQ ID NO: 12275 - protein, 332 aa, Artificial Sequence
  Synthetic Polypeptide
MALPVTALLLPLALLLHAARPQVKLEESGGRLVQPRGSLRLSCAGSGRTFSTYGMAWFRQAPGKEREFVASKASMNYSGRTYYADSVKGRFTIARDNAKNMVFLQMNNLKPEDTAVYYCAAGTGCSTYGCFDAQIIDYWGKGTLVTVSSEVAALEKQVKLEESGGGLVQPGESLRLSCSASGSIFKVFRVFAMSWYRQGPGKQRELVASISSGETTTYADSVKGRFTISRDNAKNTAYLQMDSLKPEDTAVYYCNADHTFTGDFWGQGTQVTVSSTRGGGSMDPDLEIEAAFLERENTALETRVAELRQRVQRLRNRVSQYRTRYGPLGGGK

SEQ ID NO: 12276 - protein, 195 aa, Artificial Sequence
  Synthetic Polypeptide
MALPVTALLLPLALLLHAARPQVKLEESGGELVQPGGPLRLSCAASGNIFSINRMGWYRQAPGKQRAFVASITVRGITNYADSVKGRFTISVDKSKNTIYLQMNALKPEDTAVYYCNAVSSNRDPDYWGQGTQVTVSSTRGGGSMDPDLEIEAAFLERENTALETRVAELRQRVQRLRNRVSQYRTRYGPLGGGK

SEQ ID NO: 12277 - protein, 207 aa, Artificial Sequence
  Synthetic Polypeptide
MALPVTALLLPLALLLHAARPPVQLVESGGGLVQAGDSLRLSCAASGRTFGIGTMGWFRQPPGKEREFVAAIRWSTGGTRYADSVKGRFTISRDNAKLTVDLQMDSLKPEDTAVYYCAADRLSLDLSGRYHYNPAVYDYWGQGTQVTVSSTRGGGSMDPDLEIEAAFLERENTALETRVAELRQRVQRLRNRVSQYRTRYGPLGGGK

SEQ ID NO: 12278 - protein, 339 aa, Artificial Sequence
  Synthetic Polypeptide
MALPVTALLLPLALLLHAARPQVKLEESGGELVQPGGPLRLSCAASGNIFSINRMGWYRQAPGKQRAFVASITVRGITNYADSVKGRFTISVDKSKNTIYLQMNALKPEDTAVYYCNAVSSNRDPDYWGQGTQVTVSSGGGGSGGGGSGGGGSPVQLVESGGGLVQAGDSLRLSCAASGRTFGIGTMGWFRQPPGKEREFVAAIRWSTGGTRYADSVKGRFTISRDNAKLTVDLQMDSLKPEDTAVYYCAADRLSLDLSGRYHYNPAVYDYWGQGTQVTVSSTRGGGSMDPDLEIEAAFLERENTALETRVAELRQRVQRLRNRVSQYRTRYGPLGGGK

SEQ ID NO: 12279 - protein, 197 aa, Artificial Sequence
  Synthetic Polypeptide
MALPVTALLLPLALLLHAARPAVQLVESGGGLVQAGDSLRLTCTASGRAFSTYFMAWFRQAPGKEREFVAGIAWSGGSTAYADSVKGRFTISRDNAKNTVYLQMNSLKSEDTAVYYCASRGIEVEEFGAWGQGTQVTVSSTRGGGSMDPDLEIEAAFLERENTALETRVAELRQRVQRLRNRVSQYRTRYGPLGGGK

SEQ ID NO: 12280 - protein, 198 aa, Artificial Sequence
  Synthetic Polypeptide
MALPVTALLLPLALLLHAARPQVQLVESGGGLVQAGGSLRLSCAASGGTLSKNTVAWFRQAPGKERGFVASITWDGRTTYYADSVKGRFTISRDNAKNTVYLQMNSLKPEDTAVYVCADLGKWPAGPADYWGQGTQVTVSSTRGGGSMDPDLEIEAAFLERENTALETRVAELRQRVQRLRNRVSQYRTRYGPLGGGK

SEQ ID NO: 12281 - protein, 306 aa, Artificial Sequence
  Synthetic Polypeptide
MALPVTALLLPLALLLHAARPDVQMIQTPDSLAVSLGQRATISCRASESVDNYGISFMHWYQQKPGQSPKLLIYRASNLESGIPARFSGSGSRTDFTLTINPVETDDVATYYCQQNNKDPPTFGGGTKLEIKGGGGSGGGGSGGGGSGGGGSQVQLQQSGAELVKPGASVKISCKASGYAFSSYWMNWVKQRPGKGLEWIGQIYPGDGDTTYNGKFKGKATLTADKSSSTVYMQLNSLTSEDSAVYFCVRYYYGSSGYFDYWGQGTTLTVSSTRGGGSKVAALKEKVAALKEKVAALKEKVAALKE

SEQ ID NO: 12282 - protein, 297 aa, Artificial Sequence
  Synthetic Polypeptide
MALPVTALLLPLALLLHAARPDVQMIQTPSSLSASLGDRVTISCRASQDIGNYLNWYQQKPDGTVKLLIYYTSRLHSGVPSRFSGSGSGTEYSLTISNLEQEDIATYFCQQGSALPPTFGGGTKLEINGGGGSGGGGSGGGGSALQLQQSGAELVRPGASVTLSCKASGYTFTDYEMHWVKQTPVHGLEWIGAIDPETGGTAYNQKFEGKAILTADKSSSTAYMELRSLTSEDSPVYYCARRRYYGSSSFDYWGQGTTLTVSSTRGGGSKVAALKEKVAALKEKVAALKEKVAALKE

SEQ ID NO: 12283 - protein, 299 aa, Artificial Sequence
  Synthetic Polypeptide
MALPVTALLLPLALLLHAARPDIVLTQSPATLSLSPGDRATISCRASESVTILGSHLIYWYQQKPGQPPRLLIQLASNVQTGVPARFSGSGSRTDFTLTISSVEPEDFAVYYCLQSRTIPRTFGQGTKLEIKRGGGGSGGGGSGGGGSQVQLVQSGPEVKKPGESVKISCKASGYTFRHYSMNWVKQAPGQGLKWMGRINTESGVPIYADDFKGRFSFTVDTSASTAYLEISSLTSEDTAVYFCSNDYLYSLDFWGQGTTLTVSSTRGGGSKVAALKEKVAALKEKVAALKEKVAALKE

SEQ ID NO: 12284 - protein, 299 aa, Artificial Sequence
  Synthetic Polypeptide
MALPVTALLLPLALLLHAARPDIQMTQSPSSLSASVGDRVTITCSASQDISNYLNWYQQKPGKAPKLLIYYTSNLHSGVPSRFSGSGSGTDFTLTISSLQPEDFATYYCQQYRKLPWTFGQGTKLEIKRGGGGSGGGGSGGGGSQVQLVQSGAEVKKPGSSVKVSCKASGGTFSNYWMHWVRQAPGQGLEWMGATYRGHSDTYYNQKFKGRVTITADKSTSTAYMELSSLRSEDTAVYYCARGAIYDGYDVLDNWGQGTLVTVSSTRGGGSKVAALKEKVAALKEKVAALKEKVAALKE

SEQ ID NO: 12285 - protein, 304 aa, Artificial Sequence
  Synthetic Polypeptide
MALPVTALLLPLALLLHAARPDIVMTQSPDSLAVSLGERATINCESSQSLLNSGNQKNYLTWYQQKPGQPPKPLIYWASTRESGVPDRFSGSGSGTDFTLTISSLQAEDVAVYYCQNDYSYPYTFGQGTKLEIKRGGGGSGGGGSGGGGSEVQLVQSGAEVKKPGESLKISCKGSGYSFTDYYMKWARQMPGKGLEWMGDIIPSNGATFYNQKFKGQVTISADKSISTTYLQWSSLKASDTAMYYCARSHLLRASWFAYWGQGTMVTVSSTRGGGSKVAALKEKVAALKEKVAALKEKVAALKE

SEQ ID NO: 12286 - protein, 299 aa, Artificial Sequence
  Synthetic Polypeptide
MALPVTALLLPLALLLHAARPDIQMTQSTSSLSASLGDRVTISCSASQGINNYLNWYQQKPDGTVELLIYYTSTLQSGVPSRFSGSGSGTDYSLTISNLEPEDIGTYYCQQYSKLPRTFGGGTKLEIKGGGGSGGGGSGGGGSQVQLQQSGSELMMPGASVKISCKATGYTFSNYWIEWVKQRPGHGLEWIGEILPGTGRTIYNEKFKGKATFTADISSNTVQMQLSSLTSEDSAVYYCARRDYYGNFYYAMDYWGQGTSVTVSSTRGGGSKVAALKEKVAALKEKVAALKEKVAALKE

SEQ ID NO: 12287 - protein, 294 aa, Artificial Sequence
  Synthetic Polypeptide
MALPVTALLLPLALLLHAARPDIQMTQSPASLSVSVGETVTITCRASENIYSNLAWYQQKQGKSPQLLVYAATNLADGVPSRFSGSGSGTQYSLKINSLQSEDFGSYYCQHFWGTWTFGGGTTLEIKGGGGSGGGGSGGGGSEVQLQQSGPELVKPGASVKMSCKASGYTFTDYYMKWMKQSHGKSLEWIGDINPNNGGTTYNQKFKGKATLTVDKSSSTAYMQLNSLTSEDSAVYYCARDYGYGYFDYWGQGTTLTVSSTRGGGSKVAALKEKVAALKEKVAALKEKVAALKE

SEQ ID NO: 12288 - protein, 298 aa, Artificial Sequence
  Synthetic Polypeptide
MALPVTALLLPLALLLHAARPDEIVLTQSPATLSLSPGERATLSCSASSSVSYMHWYQQKPGQAPRLLIYDTSKLASGIPARFSGSGSGTDFTLTISSLEPEDVAVYYCFQGSVYPFTFGQGTKLEIKRGGGGSGGGGSGGGGSQVQLQESGPGLVKPSQTLSLTCTVSGGSISTSGMGVGWIRQHPGKGLEWIGHIWWDDDKRYNPALKSRVTISVDTSKNQFSLKLSSVTAADTAVYYCARMELWSYYFDYWGQGTLVTVSSTRGGGSKVAALKEKVAALKEKVAALKEKVAALKE

SEQ ID NO: 12289 - protein, 297 aa, Artificial Sequence
  Synthetic Polypeptide
MALPVTALLLPLALLLHAARPDIQMTQTTSSLSASLGDRVTISCRASQDISKYLNWYQQKPDGTVKLLIYHTSRLHSGVPSRFSGSGSGTDYSLTISNLEQEDIATYFCQQGNTLPYTFGGGTKLEITGGGGSGGGGSGGGGSEVKLQESGPGLVAPSQSLSVTCTVSGVSLPDYGVSWIRQPPRKGLEWLGVIWGSETTYYNSALKSRLTIIKDNSKSQVFLKMNSLQTDDTAIYYCAKHYYYGGSYAMDYWGQGTSVTVSSTRGGGSKVAALKEKVAALKEKVAALKEKVAALKE

SEQ ID NO: 12290 - protein, 297 aa, Artificial Sequence
  Synthetic Polypeptide
MALPVTALLLPLALLLHAARPEIVMTQSPATLSLSPGERATLSCRASQDISKYLNWYQQKPGQAPRLLIYHTSRLHSGIPARFSGSGSGTDYTLTISSLQPEDFAVYFCQQGNTLPYTFGQGTKLEIKGGGGSGGGGSGGGGSQVQLQESGPGLVKPSETLSLTCTVSGVSLPDYGVSWIRQPPGKGLEWIGVIWGSETTYYNSSLKSRVTISKDNSKNQVSLKLSSVTAADTAVYYCAKHYYYGGSYAMDYWGQGTLVTVSSTRGGGSKVAALKEKVAALKEKVAALKEKVAALKE

SEQ ID NO: 12291 - protein, 299 aa, Artificial Sequence
  Synthetic Polypeptide
MALPVTALLLPLALLLHAARPEIVLTQSPATLSLSPGERATLSCRASQSVSSYLAWYQQKPGQAPRLLIYDASNRATGIPARFSGSGSGTDFTLTISSLEPEDFAVYYCQQRSNWPITFGQGTRLEIKGGGGSGGGGSGGGGSEVQLVESGGGLVQPGRSLRLSCAASGFTFNDYAMHWVRQAPGKGLEWVSTISWNSGSIGYADSVKGRFTISRDNAKKSLYLQMNSLRAEDTALYYCAKDIQYGNYYYGMDVWGQGTTVTVSSTRGGGSKVAALKEKVAALKEKVAALKEKVAALKE

SEQ ID NO: 12292 - protein, 302 aa, Artificial Sequence
  Synthetic Polypeptide
MALPVTALLLPLALLLHAARPDIVMTQTPLSLPVTPGEPASISCRSSKSLLHSNGITYLYWYLQKPGQSPQLLIYQMSNLVSGVPDRFSGSGSGTDFTLKISRVEAEDVGVYYCAQNLELPYTFGGGTKVEIKRGGGGSGGGGSGGGGSQVQLVQSGAEVKKPGSSVKVSCKASGYAFSYSWINWVRQAPGQGLEWMGRIFPGDGDTDYNGKFKGRVTITADKSTSTAYMELSSLRSEDTAVYYCARNVFDGYWLVYWGQGTLVTVSSTRGGGSKVAALKEKVAALKEKVAALKEKVAALKE

SEQ ID NO: 12293 - protein, 303 aa, Artificial Sequence
  Synthetic Polypeptide
MALPVTALLLPLALLLHAARPDIQMTQSPSSLSASVGDRVTITCRSSQSIVHSVGNTFLEWYQQKPGKAPKLLIYKVSNRFSGVPSRFSGSGSGTDFTLTISSLQPEDFATYYCFQGSQFPYTFGQGTKVEIKRGGGGSGGGGSGGGGSEVQLVESGGGLVQPGGSLRLSCAASGYEFSRSWMNWVRQAPGKGLEWVGRIYPGDGDTNYSGKFKGRFTISADTSKNTAYLQMNSLRAEDTAVYYCARDGSSWDWYFDVWGQGTLVTVSSTRGGGSKVAALKEKVAALKEKVAALKEKVAALKE

SEQ ID NO: 12294 - protein, 297 aa, Artificial Sequence
  Synthetic Polypeptide
MALPVTALLLPLALLLHAARPEIVLTQSPGTLSLSPGERATLSCRASQSVGGYLAWYQQKPGQAPRLLIYDASNRATGIPARFSGSGSGTDFTLTISSLEPEDFAVYYCQQRNNWPPMYTFGQGTKLEIKRGGGGSGGGGSGGGGSQVQLVQSGAEVKKPGSSVKVSCKASGGTFSSYAISWVRQAPGQGLEWMGGIIPILGTANYAQKFQGRVTITADESTSTAYMELSSLRSEDTAVYYCARWGGGAFDIWGQGTMVTVSSTRGGGSKVAALKEKVAALKEKVAALKEKVAALKE

SEQ ID NO: 12295 - protein, 294 aa, Artificial Sequence
  Synthetic Polypeptide
MALPVTALLLPLALLLHAARPDIQMTQSPATIENTSLSASVGDRVTITCRASQGISSWLTWYQQKPEKAPKSLIYAASSLQSGVPSRFSGSGSGTDFTLTISSLQPEDFATYYCQQYDSYPITFGQGTRLEIKGGGGSGGGGSGGGGSQVQLQQWGAGLLKPSETLSLTCAVYGGSFSAYYWSWIRQPPGKGLEWIGDINHGGGTNYNPSLKSRVTISVDTSKNQFSLKLNSVTAADTAVYYCASLTAYWGQGSLVTVSSTRGGGSKVAALKEKVAALKEKVAALKEKVAALKE

SEQ ID NO: 12296 - protein, 298 aa, Artificial Sequence
  Synthetic Polypeptide
MALPVTALLLPLALLLHAARPEIVLTQSPDSLAVSLGERATINCKASQSVDFDGDSYLNWYQQKPGQPPKVLIYAASTLQSGVPSRFSGSGSGTDFTLTINSLEAEDAATYYCQQSNEDPWTFGGGTKVEIKGGGGSGGGGSGGGGSQVQLVQSGAEVKKPGASVKVSCKVSGYTFTDYYITWVRQAPGQALEWMGWIYPGSGNTKYSQKFQGRFVFSVDTSASTAYLQLSSLKAEDTAVYYCANYGNYWFAYWGQGTLVTVSSTRGGGSKVAALKEKVAALKEKVAALKEKVAALKE

SEQ ID NO: 12297 - protein, 296 aa, Artificial Sequence
  Synthetic Polypeptide
MALPVTALLLPLALLLHAARPDIQMTQSPSSLSASVGDRVTITCRASQGISSWLAWYQQKPEKAPKSLIYAASSLQSGVPSRFSGSGSGTDFTLTISSLQPEDFATYYCQQYNSYPPTFGGGTKVEIKGGGGSGGGGSGGGGSEVQLVQSGGGLVHPGGSLRLSCAGSGFAFSSSTMHWIRQAPGKGLEWISLIGSGGGIYYGDSVKGRFTISRDNAKNSLYLQMNSLRAEDMAVYYCVRGYFDWVDYFDYWGQGTLVTVSSTRGGGSKVAALKEKVAALKEKVAALKEKVAALKE

SEQ ID NO: 12298 - protein, 302 aa, Artificial Sequence
  Synthetic Polypeptide
MALPVTALLLPLALLLHAARPDVVMTQSPLSLPVTLGQPASISCRSSQSIVHSDGNTYLEWYQQRPGQSPRRLIYKVSNRFSGVPDRFSGSGSGTDFTLKISRVEAEDVGVYYCFQGSHAPWTFGGGTKVEIKGGGGSGGGGSGGGGSEVQLVESGGGLVQPGGSLRLSCAASGFTFSSYGMHWVRQAPGKGLEWVAYITTRSSTIYYADSVKGRFTISRDNAKNSLYLQMNSLRAEDTAVYYCTREPLTGYYAMDYWGQGTSVTVSSTRGGGSKVAALKEKVAALKEKVAALKEKVAALKE

SEQ ID NO: 12299 - protein, 292 aa, Artificial Sequence
  Synthetic Polypeptide
MALPVTALLLPLALLLHAARPQIVLTQSPALMSASPGEKVTMTCSASSSVRYMYWYQQKPRSSPKPWIHLTSNLASGVPARFSGSGSGTSYSLTISSMEAEDAATYYCQQWSSHPFTFGSGTKLEIKGGGGSGGGGSGGGGSDVQLQESGPGLVKPSQSLSLTCTVTGFSITSDYSWNWIRQFPGNKLEWMGYISYSGHTSYNPSLESRISITRDTSKNQFFLQLNSVTTEDTATYYCTRGNWDVVYWGQGTLVTVSATRGGGSKVAALKEKVAALKEKVAALKEKVAALKE

SEQ ID NO: 12300 - protein, 301 aa, Artificial Sequence
  Synthetic Polypeptide
MALPVTALLLPLALLLHAARPEIVLTQSPGSLAVSPGERVTMSCKSSQSVFFSSSQKNYLAWYQQIPGQSPRLLIYWASTRESGVPDRFTGSGSGTDFTLTISSVQPEDLAIYYCHQYLSSRTFGQGTKLEIKRGGGGSGGGGSGGGGSQVQLQQPGAEVVKPGASVKMSCKASGYTFTSYYIHWIKQTPGQGLEWVGVIYPGNDDISYNQKFQGKATLTADKSSTTAYMQLSSLTSEDSAVYYCAREVRLRYFDVWGQGTTVTVSSTRGGGSKVAALKEKVAALKEKVAALKEKVAALKE

SEQ ID NO: 12301 - protein, 305 aa, Artificial Sequence
  Synthetic Polypeptide
MALPVTALLLPLALLLHAARPDIVMTQSPDSLTVSLGERTTINCKSSQSVLDSSKNKNSLAWYQQKPGQPPKLLLSWASTRESGIPDRFSGSGSGTDFTLTIDSLQPEDSATYYCQQSAHFPITFGQGTRLEIKGGGGSGGGGSGGGGSQVQLVQSGAEVKKPGASVKVSCKASGYTFTNYGMNWVKQAPGQGLKWMGWINTYTGEPTYADDFKGRVTMTSDTSTSTAYLELHNLRSDDTAVYYCARWSWSDGYYVYFDYWGQGTTVTVSSTRGGGSKVAALKEKVAALKEKVAALKEKVAALKE

SEQ ID NO: 12302 - protein, 305 aa, Artificial Sequence
  Synthetic Polypeptide
MALPVTALLLPLALLLHAARPDVLLTQSPLSLPVTLGQPASISCRSSQTIVHSNGNTYLEWFQQRPGQSPRLLIYQVSNRFSGVPDRFSGSGSGTDFTLKISRVEAEDVGVYYCFQGSHVPRTFGGGTKVEIKRGGGGSGGGGSGGGGSQIQLVQSGSELKKPGASVKVSCKASGYTFTNYGMNWVRQAPGQGLKWMGWINTNTGEPKYAEEFKGRFALSLDTSVSTAYLQINSLKAEDTAVYFCARGYGNYARGAWLAYWGQGTLVTVSSTRGGGSKVAALKEKVAALKEKVAALKEKVAALKE

SEQ ID NO: 12303 - protein, 300 aa, Artificial Sequence
  Synthetic Polypeptide
MALPVTALLLPLALLLHAARPDHIVLTQSPSSLSASLGDRVTISCRASQDISTYLNWYQQKPDGTVKLLIFYTSRLHAGVPSRFSGSGSGTHHSLTISNLEQEDIATYFCQQGNSLPFTFGSGTKLEIKRGGGGSGGGGSGGGGSQVQLKESGPELEKPGASVKISCKASGYSFTAYSMNWVKQNNGMSLEWIGSIDPYYGDTKYAQKFKGKATLTVDKASSTAYLQLKSLTSEDSAVYYCARRMITTGDWYFDVWGAGTTVTVSSTRGGGSKVAALKEKVAALKEKVAALKEKVAALKE

SEQ ID NO: 12304 - protein, 300 aa, Artificial Sequence; identical to SEQ ID NO: 12303
  Synthetic Polypeptide

SEQ ID NO: 12305 - protein, 300 aa, Artificial Sequence
  Synthetic Polypeptide
MALPVTALLLPLALLLHAARPDIVMTQSPDSLAVSLGERATINCRASKSVSTSGYSFMHWYQQKPGQPPKLLIYLASNLESGVPDRFSGSGSGTDFTLTISSLQAEDVAVYYCQHSREVPWTFGQGTKVEIKRGGGGSGGGGSGGGGSQVQLVQSGAEVKKPGASVKVSCKASGYTFTNYGMNWVRQAPGQGLEWMGWINTYTGEPTYADAFKGRFAFSLDTSTSTAYLQINSLRSDDTAVYYCARDYGDYGMDYWGQGTTVTVSSTRGGGSKVAALKEKVAALKEKVAALKEKVAALKE

SEQ ID NO: 12306 - protein, 296 aa, Artificial Sequence
  Synthetic Polypeptide
MALPVTALLLPLALLLHAARPDIVMTQTPLTLSVTIGQPASISCKSSQSLLDSDGKTYLNWLLQRPGQSPERLIYLVSKLDSGVPDRFTGSGSGTDFTLKISRVEAEDLGVYCCWQGTHFPYTFGGGTKVEIKGGGGGSGGGGSGGGGSQVQLQQPGAELVRPGASVKLSCKASGYTFTSYWMNWVKQRPGQGLEWIGMIDPSDSETHYNHIFKDKATLTVDKSSSTAYLQLSSLTSEDSAVYYCARNLYLWGQGTSVTVSSTRGGGSKVAALKEKVAALKEKVAALKEKVAALKE

SEQ ID NO: 12307 - protein, 299 aa, Artificial Sequence
  Synthetic Polypeptide
MALPVTALLLPLALLLHAARPDIQLTQSPSSLSASVGDRVTITCKASQSVDYEGDSFLNWYQQKPGKAPKLLIYAASNLESGVPSRFSGSGSGTDFTLTISSLQPEDFATYYCQQSNEDPLTFGQGTKVEIKRGGGGSGGGGSGGGGSEVQLVESGGGLVQPGGSLRLSCAASGYTFSSYWIEWVRQAPGKGLEWIGEILPGGGDTNYNEIFKGRATFSADTSKNTAYLQMNSLRAEDTAVYYCTRRVPIRLDYWGQGTLVTVSSTRGGGSKVAALKEKVAALKEKVAALKEKVAALKE

SEQ ID NO: 12308 - protein, 307 aa, Artificial Sequence
  Synthetic Polypeptide
MALPVTALLLPLALLLHAARPDIVMSQSPSSLAVSVGEKVTMSCKSSQSLLHSSNQKNYLAWYQQKPGQSPKVLIYWASTRESGVPDRFTGSGSGTDFTLTITSVKSEDLAVYYCQQYYSYPWTFGGGTRLEIKRGGGGSGGGGSGGGGSEVQLQQSVAELVKPGASVKMSCKVSGYTLTDHTIHWMKQRPEQGLEWIGYIYPRDGITGYNEKFKGKATLTADTSSSTAYMQLNSLTSEDSAVYFCARWGYSYRNYAYYYDYWGQGTTLTVSSTRGGGSKVAALKEKVAALKEKVAALKEKVAALKE

SEQ ID NO: 12309 - protein, 304 aa, Artificial Sequence
  Synthetic Polypeptide
MALPVTALLLPLALLLHAARPEIVLTQSPGTLSLSPGERATLSCRASQSVSSSYLAWYQQKPGQAPRLLIYGTSSRATGIPDRFSGSGSGTDFTLTISRLEPEDFAVYYCQQYGSSPFTFGGGTKVEIKRGGGGSGGGGSGGGGSQVQLQESGPGLAKPSETLSLTCTVSGDSITSYYWSWIRQPPGKGLEWIGYIYYSGSTNYNPSLKSRVTISVDTSKNQFSLKLSSVTAADTAVYYCARDQRRIAAAGTHFYGMDVWGQGTTVTVSSTRGGGSKVAALKEKVAALKEKVAALKEKVAALKE

SEQ ID NO: 12310 - protein, 294 aa, Artificial Sequence
  Synthetic Polypeptide
MALPVTALLLPLALLLHAARPDIQMTQSPSSLSASVGDRVTITCRASQSISLWLNWYQQKPGKAPKLLIYAASTLQSGVPSRFSGSGSGTDFTLTISSLQPEDFATYYCQQYYTSPYTFGQGTKVEIKRGGGGSGGGGSGGGGSQVQLLESGGGLVQPGGSLRLSCAASGFTFSSYAMSWVRQAPGKGLEWVSVIRSSGSSTYYADSVKGRFTISRDNSKNTLYLQMNSLRAEDTAVYYCARGGGYFDYWGQGTLVTVSSTRGGGSKVAALKEKVAALKEKVAALKEKVAALKE

SEQ ID NO: 12311 - protein, 297 aa, Artificial Sequence
  Synthetic Polypeptide
MALPVTALLLPLALLLHAARPDIQMTQSPSSLSASVGDRVTITCRASQSISSYLNWYQQKPGKAPKLLIYAVSTLQSGVPSRFSGSGSGTDFTLTISSLQPEDFATYYCQQSGTFPPTTFGQGTKVEIKRGGGGSGGGGSGGGGSQVQLLESGGGLVQPGGSLRLSCAASGFTFSSHGMHWVRQAPGKGLEWVSVISGSGSNTGYADSVKGRFTISRDNSKNTLYLQMNSLRAEDTAVYYCARQWGSYAFDSWGQGTLVTVSSTRGGGSKVAALKEKVAALKEKVAALKEKVAALKE

SEQ ID NO: 12312 - protein, 289 aa, Artificial Sequence
  Synthetic Polypeptide
MALPVTALLLPLALLLHAARPMTQSPKFLLVSAGDRVTLTCKASQSVNNDVYWYQQEPGQSPKLLIYWASTRESGVPDRFTGSGSGTDFTLTISSVQAEDLAVYYCKQSYNLYTFGGGTKLEIKRGGGGSGGGGSGGGGSESGRGLVQPGGSRKLSCAASGFTFSTSGMHWVRQAPEKGLEWVAYISSGSTTIYHADTVKGRFTISRDNPKNTLFLQMTSLRSEDTAMYYCCARSGQFGNYFDYWGQGTTLTVSSTRGGGSKVAALKEKVAALKEKVAALKEKVAALKE

SEQ ID NO: 12313 - protein, 294 aa, Artificial Sequence
  Synthetic Polypeptide
MALPVTALLLPLALLLHAARPQSPSSLAVSAGEKVTMSCKSSQSLLNSRTRKNYLAWYQQKPGQSPKLLIYWASTRESGVPDRFTGSGSGTDFTLTISSVQAEDLAVYYCKQSNLYTFGGGTKLEIKGGGGSGGGGSGGGGSQVQLEESGPELVKPGASVKLSCKASGYTFTEYIIHWVKQRSGQGLEWIGWFYPGSGSIKYNEKFKDKATLTADKSSSTVYMELSGLTSEDSAVYFCARHDGYSYFDYWGQGTTLTVSSTRGGGSKVAALKEKVAALKEKVAALKEKVAALKE

SEQ ID NO: 12314 - protein, 297 aa, Artificial Sequence
  Synthetic Polypeptide
MALPVTALLLPLALLLHAARPDIQMTQSPSSLSASLGERVSLTCRATQELSGYLSWLQQKPDGTIKRLIYAASTLDSGVPKRFSGNRSGSDYSLTISSLESEDFADYYCLQYAIYPYTFGGGTKLEIKGGGGSGGGGSGGGGSEVQLQQSGPELVKPGASVKMSCKASGYTFTSYFIHWVKQKPGQGLEWIGFINPYNDGSKYNEKFKGKATLTSDKSSSTAYMELSSLTSEDSAVYYCTRDDGYYGYAMDYWGQGTSVTVSSTRGGGSKVAALKEKVAALKEKVAALKEKVAALKE

SEQ ID NO: 12315 - protein, 302 aa, Artificial Sequence
  Synthetic Polypeptide
MALPVTALLLPLALLLHAARPDTIVLTQSPASLAVSLGQRATISCRASESVDSYGNSFMHWYQQKPGQPPKLLIYLASNLESGVPARFSGSGSRTDFTLTIDPVEADDAATYYCQQNNYDPWTFGGGTKLEIKGGGGSGGGGSGGGGSEVQLQQSGPELVKPGASVKMSCKASGYTFTSYVMHWVKQKPGQGLEWIGYINPYNDGTKYNEKFKGKATLTSDTSSSTAYMELNSLTSEDSAVYFCARPIYFDNDYFDYWGQGTTLKVSSTRGGGSKVAALKEKVAALKEKVAALKEKVAALKE

SEQ ID NO: 12316 - protein, 296 aa, Artificial Sequence
  Synthetic Polypeptide
MALPVTALLLPLALLLHAARPDIQMTQSPSSLSASVGDRVTITCKASQDVGIAVAWYQQKPGKVPKLLIYWASTRHTGVPDRFSGSGSGTDFTLTISSLQPEDVATYYCQQYSSYPYTFGQGTKVEIKGGGGSGGGGSGGGGSEVQLVESGGGLVQPGGSLRLSCAASGFDFSRYWMSWVRQAPGKGLEWIGEINPDSSTINYAPSLKDKFIISRDNAKNSLYLQMNSLRAEDTAVYYCARPDGNYWYFDVWGQGTLVTVSSTRGGGSKVAALKEKVAALKEKVAALKEKVAALKE

SEQ ID NO: 12317 - protein, 297 aa, Artificial Sequence
  Synthetic Polypeptide
MALPVTALLLPLALLLHAARPDIVMTQSQKSMSTSVGDRVSITCKASQDVITGVAWYQQKPGQSPKLLIYSASYRYTGVPDRFTGSGSGTDFTFTISNVQAEDLAVYYCQQHYSTPLTFGAGTKLELKGGGGSGGGGSGGGGSQVQLQQPGAELVRPGASVKLSCKASGYSFTTYWMNWVKQRPGQGLEWIGMIHPSDSETRLNQKFKDKATLTVDKSSSTAYMQLSSPTSEDSAVYYCARSTMIATRAMDYWGQGTSVTVSSTRGGGSKVAALKEKVAALKEKVAALKEKVAALKE

SEQ ID NO: 12318 - protein, 303 aa, Artificial Sequence
  Synthetic Polypeptide
MALPVTALLLPLALLLHAARPQSVLTQPPSVSGAPGQRVTISCTGSGSNIGAPYDVSWYQQLPGTAPKLLIYHNNKRPSGVPDRFSGSKSGTSASLAITGLQAEDEADYYCATVEAGLSGSVFGGGTKLTVLGAGGGGSGGGGSGGGGSQVQLVQSGAEVKKPGASVKVSCKVSGYTLTELSIHWVRQAPGKGLEWMGGFDPEENEIVYAQRFQGRVTMTEDTSTDTAYMELSSLRSEDTAVYYCAIVGSFSPLTLGLWGQGTMVTVSSTRGGGSKVAALKEKVAALKEKVAALKEKVAALKE

SEQ ID NO: 12319 - protein, 303 aa, Artificial Sequence
  Synthetic Polypeptide
MALPVTALLLPLALLLHAARPQSVLTQPPSVSGAPGQRVTISCTGSGSNIGAPYDVSWYQQLPGTAPKLLIYHNNKRPSGVPDRFSGSKSGTSASLAITGLQAEDEADYYCQSYDSSSISTIFGGGTKLTVLGAGGGGSGGGGSGGGGSQVQLVQSGAEVKKPGASVKVSCKVSGYTLTELSIHWVRQAPGKGLEWMGGFDPEENEIVYAQRFQGRVTMTEDTSTDTAYMELSSLRSEDTAVYYCAIVGSFSGIAYRPWGQGTMVTVSSTRGGGSKVAALKEKVAALKEKVAALKEKVAALKE

SEQ ID NO: 12320 - protein, 301 aa, Artificial Sequence
  Synthetic Polypeptide
MALPVTALLLPLALLLHAARPDIQMTQSPSSLSASVGDRVTITCSASSSVSYMYWYQQKPGKAPKLLIYLTSNLASGVPSRFSGSGSGTDFTLTISSLQPEDFATYYCQQWRSNPFTFGQGTKLEIKRGGGGSGGGGSGGGGSQITLKESGPTLVKPTQTLTLTCTFSGFSLSTSGMGVGWIRQPPGKALEWLAHIWWDDVKRYSPSLKSRLTITKDTSKNQVVLTMTNMDPVDTATYYCARIVSFDNDVVSAMDYWGQGTLVTVSSTRGGGSKVAALKEKVAALKEKVAALKEKVAALKE

SEQ ID NO: 12321 - protein, 296 aa, Artificial Sequence
  Synthetic Polypeptide
MALPVTALLLPLALLLHAARPEIVMTQSPATLSVSPGERATLSCKASQSVSNDVVWYQQKPGQAPRLLIYYASNRYTGIPARFSGSGSGTEFTLTISSLQSEDFAVYYCQQDYTSPWTFGQGTKLEIKRGGGGSGGGGSGGGGSQVQLVQSGAEVKKPGASVKVSCKASGYTFTNYGMNWVRQAPGQGLEWMGWINTYTGEPTYADDFKGRVTMTTDTSTSTAYMELRSLRSDDTAVYYCARIGDSSPSDYWGQGTLVTVSSTRGGGSKVAALKEKVAALKEKVAALKEKVAALKE

SEQ ID NO: 12322 - protein, 296 aa, Artificial Sequence
  Synthetic Polypeptide
MALPVTALLLPLALLLHAARPDILLTQSPVILSVSPGERVSFSCRASQSIGTNIHWYQQRTNGSPRLLIKYASESISGIPSRFSGSGSGTDFTLSINSVESEDIADYYCQQNNNWPTTFGAGTKLELKGGGGSGGGGSGGGGSQVQLKQSGPGLVQPSQSLSITCTVSGFSLTNYGVHWVRQSPGKGLEWLGVIWSGGNTDYNTPFTSRLSINKDNSKSQVFFKMNSLQSNDTAIYYCARALTYYDYEFAYWGQGTLVTVSATRGGGSKVAALKEKVAALKEKVAALKEKVAALKE

SEQ ID NO: 12323 - protein, 296 aa, Artificial Sequence
  Synthetic Polypeptide
MALPVTALLLPLALLLHAARPEIQLVQSGAEVKKPGESLRISCKGSGFNIEDYYIHWVRQMPGKGLEWMGRIDPENDETKYGPIFQGHVTISADTSINTVYLQWSSLKASDTAMYYCAFRGGVYWGQGTTVTVSSGGGGSGGGGSGGGGSDVVMTQSPDSLAVSLGERATINCKSSQSLLDSDGKTYLNWLQQKPGQPPKRLISLVSKLDSGVPDRFSGSGSGTDFTLTISSLQAEDVAVYYCWQGTHFPGTFGGGTKVEIKTRGGGSKVAALKEKVAALKEKVAALKEKVAALKE

SEQ ID NO: 12324 - protein, 304 aa, Artificial Sequence
  Synthetic Polypeptide
MALPVTALLLPLALLLHAARPELQMTQSPSSLSASVGDRVTITCRASQSISSYLNWYQQKPGQPPKLLIYWASTRESGVPDRFSGSESGTNYTLTISSLQPEDFATYFCQQSDSLPITFGQGTRLDIQGGGGSGGGGSGGGGSEVQLLESGGGVVQPGRSLRLSCAASGFTFSSYGMHWVRQAPGKGLEWVAVISYDGSNKYYADSVKGRFTISRDNSKNTLYLQMNSLRAEDTAVYYCAKDMGWGSGWRPYYYYGMDVWGQGTTVTVSSTRGGGSKVAALKEKVAALKEKVAALKEKVAALKE

SEQ ID NO: 12325 - protein, 303 aa, Artificial Sequence
  Synthetic Polypeptide
MALPVTALLLPLALLLHAARPELVMTQSPSSLTVTAGEKVTMSCKSSQSLLNSGNQKNYLTWYQQKPGQPPKLLIYWASTRESGVPDRFTGSGSGTDFTLTISSVQAEDLAVYYCQNDYSYPLTFGAGTKLEIKGGGGSGGGGSGGGGSEVQLLEQSGAELVRPGTSVKISCKASGYAFTNYWLGWVKQRPGHGLEWIGDIFPGSGNIHYNEKFKGKATLTADKSSSTAYMQLSSLTFEDSAVYFCARLRNWDEPMDYWGQGTTVTVSSTRGGGSKVAALKEKVAALKEKVAALKEKVAALKE

SEQ ID NO: 12326 - protein, 301 aa, Artificial Sequence
  Synthetic Polypeptide
MALPVTALLLPLALLLHAARPDIQMTQSPSSLSASVGDRVTITCRASQSISSYLNWYQQKPGKAPKLLIYAASSLQSGVPSRFSGSGSGTDFTLTISSLQPEDLATYYCQQSYSTPFTFGPGTKVDIKGGGGSGGGGSGGGGSVHEVQLVQSGAEVKKPGSSVKVSCKASGGTFSSYAISWVRQAPGQGLEWMGGIIPIFGTANYAQKFQGRVTITADKSTSTAYMELSSLRSEDTAVYYCATFALFGFREQAFDIWGQGTTVTVSSTRGGGSKVAALKEKVAALKEKVAALKEKVAALKE

SEQ ID NO: 12327 - protein, 295 aa, Artificial Sequence
  Synthetic Polypeptide
MALPVTALLLPLALLLHAARPYIHVTQSPSSLSVSIGDRVTINCQTSQGVGSDLHWYQHKPGRAPKLLIHHASSVEDGVPSRFSGTGFHTSFNLTINDLQADDIGTYYCQVLQSFGRGSRLDTKGGGGSGGGGSGGGGSRAHLVQSGTAMKKPGASVRVSCQTSGYTFTAHILFWFRQAPGRGLEWVGWIKPQYGAVNFGGGFRDRVTLTRDVYREIAYMDIRGLKPDDTAVYYCARDRSYGDSSWALDAWGQGTTVVVSATRGGGSKVAALKEKVAALKEKVAALKEKVAALKE

SEQ ID NO: 12328 - protein, 300 aa, Artificial Sequence
  Synthetic Polypeptide
MALPVTALLLPLALLLHAARPDIVLTQSPLSLAVSLGQPAIISCKASQSVSFAGTSLMHWYHQKPGQQPRLLIYRASNLEAGVPDRFSGSGSKTDFTLTISPVEAEDAATYYCQQSREYPYTFGGGTKLEIKRGGGGSGGGGSGGGGSQVQLVQSGAEVVKPGASVKISCKASGYTFTGYFMNWVKQSPGQSLEWIGRIHPYDGDTFYNQKFQGKATLTVDKSSNTAHMELLSLTSEDFAVYYCTRYDGSRAMDYWGQGTTVTVSSTRGGGSKVAALKEKVAALKEKVAALKEKVAALKE

SEQ ID NO: 12329 - protein, 296 aa, Artificial Sequence
  Synthetic Polypeptide
MALPVTALLLPLALLLHAARPDVVMTQTPLSLPVTPGEPASISCRSSQSLVHRNGNTYLHWYLQKPGQSPKLLIHKVSNRFSGVPDRFSGSGSGTDFTLKISRVEAEDLGVYFCSQSTHVPPLTFGAGTKLELKGGGGSGGGGSGGGGSEVQLVQSGAEVEKPGASVKISCKASGSSFTGYNMNWVRQNIGKSLEWIGAIDPYYGGTSYNQKFKGRATLTVDKSTSTAYMHLKSLRSEDTAVYYCVSGMEYWGQGTSVTVSSTRGGGSKVAALKEKVAALKEKVAALKEKVAALKE

SEQ ID NO: 12330 - protein, 294 aa, Artificial Sequence
  Synthetic Polypeptide
MALPVTALLLPLALLLHAARPEIVMTQTPATLSVSAGERVTITCKASQSVSNDVTWYQQKPGQAPRLLIYSASNRYSGVPARFSGSGYGTEFTFTISSVQSEDFAVYFCQQDYSSFGQGTKLEIKRGGGGSGGGGSGGGGSQVQLVESGPGVVQPGRSLRISCAVSGFSVTNYGVHWVRQPPGKGLEWLGVIWAGGITNYNSAFMSRLTISKDNSKNTVYLQMNSLRAEDTAMYYCASRGGHYGYALDYWGQGTLVTVSSTRGGGSKVAALKEKVAALKEKVAALKEKVAALKE

SEQ ID NO: 12331 - protein, 297 aa, Artificial Sequence
  Synthetic Polypeptide
MALPVTALLLPLALLLHAARPDIQMTQTASSLPASLGDRVTISCSASQDISNYLNWYQQKPDGTVKLLIFYSSNLHSGVPSRFSGGGSGTDYSLTISNLEPEDIATYFCHQYSKLPWTFGGGTKLEIKRGGGGSGGGGSGGGGSEVTLVESGGDFVKPGGSLKVSCAASGFAFSHYAMSWVRQTPAKRLEWVAYISSGGSGTYYSDSVKGRFTISRDNAKNTLYLQMRSLRSEDSAMYFCTRVKLGTYYFDSWGQGTTLTVSSTRGGGSKVAALKEKVAALKEKVAALKEKVAALKE

SEQ ID NO: 12332 - protein, 299 aa, Artificial Sequence
  Synthetic Polypeptide
MALPVTALLLPLALLLHAARPQFVLTQSPSASAALGASAKLTCTLSSAHKTYTIDWYQQQKGKAPRYLIQVKSDGTYTKATGVPDRFSGSSSGADRYLIIPSVQADDEADYYCGTDYTGGYVFGGGTQLTVTGGGGSGGGGSGGGGSEQLKESGGGLFKPTDTLTLTCTVSGFSLSYYGVNWVRQAPGNGLEWIGTIGGSGDTYYASWAKSRSTIIRNTNENTVTLKMTSLTAADTATYFCVRYANIGYEYFNVWGPGTLVTVSSTRGGGSKVAALKEKVAALKEKVAALKEKVAALKE

SEQ ID NO: 12333 - protein, 298 aa, Artificial Sequence
  Synthetic Polypeptide
MALPVTALLLPLALLLHAARPDIQMTQSPSSLSASVGDRVTITCRASQGISSWLAWYQQKPEKAPKSLIYAASSLQSGVPSRFSGSGSGTDFTLTISSLQPEDFATYYCQQYNSYPPTFGGGTKVEIKGGGGSGGGGSGGGGSEVQLVESGGGLVQPGESLRLSCVASGFTFSRYKMNWVRQAPGKGLEWVSYISRSGRDIYYADSVKGRFTISRDNAKNSLYLQMNSLRDEDTAVYYCAGTVTTYYYFGMDVWGHGTTVTVSSTRGGGSKVAALKEKVAALKEKVAALKEKVAALKE

SEQ ID NO: 12334 - protein, 297 aa, Artificial Sequence
  Synthetic Polypeptide
MALPVTALLLPLALLLHAARPQSVVTQPPSMSAAPGQQVTISCSGGNSNIERNYVSWYLQLPGTAPKLVIFDNDRRPSGIPDRFSGSKSGTSATLGITGLQTGDEADYYCGTWDSSLRGWVFGGGTKLTVLGGGGGSGGGGSGGGGSEVQLVESGGGLIQPGGSLRLSCAASGFTFSNYAMNWVRQAPGKGLEWVSTINGRGSSTIYADSVKGRFTISRDNSKNTLYLQMNSLRAEDTATYYCARYISRGLGDSWGQGTLVTVTRGGGSKVAALKEKVAALKEKVAALKEKVAALKE

SEQ ID NO: 12335 - protein, 298 aa, Artificial Sequence
  Synthetic Polypeptide
MALPVTALLLPLALLLHAARPQSVLTQPPSASGTPGQRVTISCSGSRSNVGGNYVFWYQQVPGATPKLLIYRSNQRPSGVPDRFAGSKSGSSASLAISGLRSEDEADYYCATWDDSLSGFVFGTGTKVTVLGGGGGSGGGGSGGGGSEVQLVESGGGLVKPGGSLRLSCAASGFTFSDYYMSWIRQAPGKGLEWVSYISSSGSTIYYADSVKGRFTISRDNAKNSLYLQMNSLRAEDTAVYYCARGYGKAYDQWGQGTLVTVSSTRGGGSKVAALKEKVAALKEKVAALKEKVAALKE

SEQ ID NO: 12336 - protein, 297 aa, Artificial Sequence
  Synthetic Polypeptide
MALPVTALLLPLALLLHAARPDIQMTQSPSSLSASVGDRVTITCRASQDVNTAVAWYQQKPGKAPKLLIYSASFLESGVPSRFSGSRSGTDFTLTISSLQPEDFATYYCQQHYTTPPTFGQTKVEIKRGGGGSGGGGSGGGGSEVQLVESGGGLVQPGGSLRLSCAASGFNIKDTYIHWVRQAPGKGLEWVARIYPTNGYTRYADSVKGRFTISADTSKNTAYLQMNSLRAEDTAVYYCSRWGGDGFYAMDVWGQGTLVTVSSTRGGGSKVAALKEKVAALKEKVAALKEKVAALKE

SEQ ID NO: 12337 - protein, 310 aa, Artificial Sequence
  Synthetic Polypeptide
MALPVTALLLPLALLLHAARPQSALTQPPSASGSPGQSITISCTGTSNNFVSWYQQHAGKAPKLVIYDVNKRPSGVPDRFSGSKSGNTASLTVSGLQTDDEAVYYCGSLVGNWDVIFGGGTKLTVLGGGGSGGGGSGGGGSQPQLQESGPTLVEASETLSLTCAVSGDSTAACNSFWGWVRQPPGKGLEWVGSLSHCASYWNRGWTYHNPSLKSRLTLALDTPKNLVFLKLNSVTAADTATYYCARFGGEVLRYTDWPKPAWVDLWGRGTLVTVSSTRGGGSKVAALKEKVAALKEKVAALKEKVAALKE

SEQ ID NO: 12338 - protein, 305 aa, Artificial Sequence
  Synthetic Polypeptide
MALPVTALLLPLALLLHAARPELVLTQSPGTLSLSAGERATLSCRASQSVSSGSLAWYQQKPGQAPRLLIYGASTRATGIPDRFSGSGSGTDFTLTIGRLEPEDLAVYYCQQYGTSPYTFGQGTKLEIGGGGSGGGGSGGGGSLEQSGAEVKKPGSSVQVSCKASGGTFSMYGFNWVRQAPGHGLEWMGGIIPIFGTSNYAQKFRGRVTFTADQATSTAYMELTNLRSDDTAVYYCARDFGPDWEDGDSYDGSGRGFFDFWGQGTLVTVSSTRGGGSKVAALKEKVAALKEKVAALKEKVAALKE

SEQ ID NO: 12339 - protein, 285 aa, Artificial Sequence
  Synthetic Polypeptide
MALPVTALLLPLALLLHAARPDIQMTQSPSSLSASVGDRVTITCQASQDINNYLNWYQQKPGKAPKLLIYDASNLQTGVPSRFSGSGSGTDFTFTIEDIATYYCQQYTFGPGTKVDIKGGGGSGGGGSGGGGSEVQLLESGGGLVQPGGSLRLSCAASGFTFSWYSMTWVRQAPGKGLEWVSSIVPWGDFTQYADSVKGRFTISRDNSKNTLYLQMNSLRAEDTAVYYCAKGPGWGSFDLWGRGTLVTVSSTRGGGSKVAALKEKVAALKEKVAALKEKVAALKE

SEQ ID NO: 12340 - protein, 295 aa, Artificial Sequence
  Synthetic Polypeptide
MALPVTALLLPLALLLHAARPDIQMTQSPSSLSASVGDRVTITCTASLSVSSTYLHWYQQKPGSSPKLWIYSTSNLASGVPSRFSGSGSGTSYTLTISSLQPEDFATYYCHQYHRSPLTFGGGTKVEIKRGGGGSGGGGSGGGGSEVQLVESGGGLVQPGGSLRLSCAASGFSLTKYGVHWVRQAPGKGLEWVGVKWAGGSTDYNSALMSRFTISKDNAKNSLYLQMNSLRAEDTAVYYCARDHRDAMDYWGQGTLVTVSSTRGGGSKVAALKEKVAALKEKVAALKEKVAALKE

SEQ ID NO: 12341 - protein, 299 aa, Artificial Sequence
  Synthetic Polypeptide
MALPVTALLLPLALLLHAARPDIQMTQSPSSLSASVGDRVTITCKASQDVGTAVAWYQQKPGKAPKLLIYSASYRSTGVPSRFSGSGSGTDFTLTISSLQPEDFATYYCQHHYSAPWTFGGGTKVEIKGGGGSGGGGSGGGGSEVQLVESGGGLVQPGGSLRLSCAASGFTFSRNGMSWVRQAPGKGLEWVATVSSGGSYIYYADSVKGRFTISRDNAKNSLYLQMNSLRAEDTAVYYCARQGTTALATRFFDVWGQGTLVTVSSTRGGGSKVAALKEKVAALKEKVAALKEKVAALKE

SEQ ID NO: 12342 - protein, 295 aa, Artificial Sequence
  Synthetic Polypeptide
MALPVTALLLPLALLLHAARPDIQMTQSFSSLSASVGDRVTITCRASQDISNYLNWYQQKPGKAPKLLIYYTSRLHSGVPSRFSGSGSGTDYTLTISSLQPEDFATYFCQQGNTLPWTFGGGTKLEIKRGGGGSGGGGSGGGGSEVQLVQSGGGLVQSGGSLRLSCRASGYTFTRYWMLWVRQRPGKGLEWVAEINPRNDRTNYNEKFKTRFTISVDRSKNTLYLQMDSLRAEDTAVYFCALGGGYAMDYWGQGTLVTVSSTRGGGSKVAALKEKVAALKEKVAALKEKVAALKE

SEQ ID NO: 12343 - protein, 295 aa, Artificial Sequence
  Synthetic Polypeptide
MALPVTALLLPLALLLHAARPDIQMTQSPPSLSASVGGKVTITCKASQDIDRYMAWYQDKPGKGPKLLIHDTSTLQPGIPSRFSGSGSGRDYSFSISNLEPEDIATYYCLQYDNLWTFGGGTKLEIKRGGGGSGGGGSGGGGSQVQLVQSGAELVKPGASVKMSCKASGYIFTNYNIHWVKKSPGQGLEWIGAIYPGNGDAPYSQKFQDRATLTADTSSSTTYMELSSLTSEDSAVYYCVRANWDVAFAYWGQGTLVSVSSTRGGGSKVAALKEKVAALKEKVAALKEKVAALKE

SEQ ID NO: 12344 - protein, 296 aa, Artificial Sequence
  Synthetic Polypeptide
MALPVTALLLPLALLLHAARPDIQMTQSPASLSASVGETVTITCRVSGNIHNYLAWYQQKQGKSPQLLVYNAKTLADGVPSRFSGSGSGTQYSLKINSLQPEDFGSYYCQHFWSNPYTFGGGTKLEIKGGGGSGGGGSGGGGSQVQLQQSGASVKVSCKASELVRPGTGYAFTNYLIEWVKQRPGQGLEWIGVINPGSGGTNYNEKFKGKATLTADKSSSTAYMQLSSLTSDDSAVYFCARYRSYDWYFDVWGAGTTVTVSSTRGGGSKVAALKEKVAALKEKVAALKEKVAALKE

SEQ ID NO: 12345 - protein, 296 aa, Artificial Sequence
  Synthetic Polypeptide
MALPVTALLLPLALLLHAARPDIQMTQSPASLSASVGETVTIICRASVNIYSYLAWYQQKQGKSPQLLVYNAKILAEGVPSRFSGSGSGTQFSLKINSLQPEDFGSYYCQHHYGTFTFGSGTKLEIKRGGGGSGGGGSGGGGSQVQLKESGPGLVAPSQSLSITCTISGFSLTSYGVHWVRQPPGKGLEWLVVIWSDGSTTYNSALKSRLSISKDNSKSQVFLKMNSLQTDDTAIYYCASHYGSTLAFASWGHGTLVTVSAATRGGGSKVAALKEKVAALKEKVAALKEKVAALKE

SEQ ID NO: 12346 - protein, 304 aa, Artificial Sequence
  Synthetic Polypeptide
MALPVTALLLPLALLLHAARPDIVMTQSHKFMSTSVGDRVSVTCKASQNVGNNVAWYQQKPGQSPKVLIYSASYRYSGVPDRFTGSGSGTDFTLTISNVQSEDLAEYFCQQYNTYPFTFGSGTKLEIKGGGGSGGGGSGGGGSEVQLEESGGGLVQPGGSMKLSCVASGFTFSNYWMNWVRQSPEKGLEWVAEIRFKSHNYATHFAESVKGRFTISRDDSKSSVYLQMNNLRAEDTGIYYCTRRIGNSDYDWWYFDVWGAGTSVTVSSASTRGGGSKVAALKEKVAALKEKVAALKEKVAALKE

SEQ ID NO: 12347 - protein, 296 aa, Artificial Sequence
  Synthetic Polypeptide
MALPVTALLLPLALLLHAARPDIQMTQSSSSFSVSLGDRVTITCKASEDIYIRLAWYQQKPGNAPRLLISAATSLETGIPSRFSGSGSGEDYTLTITSLQTEDVATYYCQQYWTTPWTFGGGTKLEIKRGGGGSGGGGSGGGGSDVQLQESGPGLVKPSQSLSLTCTVTGYSITIDYTWNWIRQFPGNKLEWMGYITYSGSTDYNPSLKSRSSITRDTSMNQFFLQLNSVTTEDTATYYCARLGRRYALDYWGQGTSVTVSSTRGGGSKVAALKEKVAALKEKVAALKEKVAALKE

SEQ ID NO: 12348 - protein, 295 aa, Artificial Sequence
  Synthetic Polypeptide
MALPVTALLLPLALLLHAARPDVQLQESGPGLVKPSQSLSLTCTVTGYSITSDYTWNWIRQFPGNKLEWMGYITYSGSTSYNPSLKSRNSITRDTSKNQFFLQLNSVTTEDTATYYCARLGRRYTMDYWGQGTSVTVSSGGGGSGGGGSGGGGSDIQMTQSSSSFSVSLGDRVTITCMASEDIYIRLAWYQQKPGNAPRLLISAATSLETGVPSRFSGSGSGKDYTLSITSLQTEDVGTYYCQQYWSSPWTFGGGTKLEINTRGGGSKVAALKEKVAALKEKVAALKEKVAALKE

SEQ ID NO: 12349 - protein, 295 aa, Artificial Sequence
  Synthetic Polypeptide
MALPVTALLLPLALLLHAARPDIQMTQSSSSFSVSLGDRVTITCMASEDIYIRLAWYQQKPGNAPRLLISAATSLETGVPSRFSGSGSGKDYTLSITSLQTEDVGTYYCQQYWSSPWTFGGGTKLEINGGGGSGGGGSGGGGSDVQLQESGPGLVKPSQSLSLTCTVTGYSITSDYTWNWIRQFPGNKLEWMGYITYSGSTSYNPSLKSRNSITRDTSKNQFFLQLNSVTTEDTATYYCARLGRRYTMDYWGQGTSVTVSSTRGGGSKVAALKEKVAALKEKVAALKEKVAALKE

SEQ ID NO: 12350 - protein, 297 aa, Artificial Sequence
  Synthetic Polypeptide
MALPVTALLLPLALLLHAARPDQIVLTQSPAIMSASPGEKVTISCSASSSVSYMYWYQQKPGSSPKPWIYRTSNLASGVPARFSGSGSGTSYSLTISNMEAEDAAAYYCQQYHSYPTTFGGGTKLEVKGGGGSGGGGSGGGGSEVQLVESGGGLVQPKGSLKLSCAASGFSFNTYAMNWVRQAPGKGLEWIAHIRSKSNNFATYYADSVKDRFSISRDASENILFLQMNNLKTEDTAMYYCVRQGGDFPMDYWGQGTSVTVSSTRGGGSKVAALKEKVAALKEKVAALKEKVAALKE

SEQ ID NO: 12351 - protein, 298 aa, Artificial Sequence
  Synthetic Polypeptide
MALPVTALLLPLALLLHAARPDIQMTQSPSSLSASVGDRVTITCRASQSISSYLNWYQQKPGKAPKLLIYDASNLETGVPSRFSGSGSGTDFTFTISSLQPEDIATYYCQQYDNLPLTFGGGTKVDIKRGGGGSGGGGSGGGGSQVQLVESGGGVVQPGRSLRLSCAASGFTFSSYAMHWVRQAPGKGLEWVAVISYDGSNKYYADSVKGRFTISRDNSKNTLYLQMNSLRAEDTAVYYCARAHNSSSWSFDYWGQGTLVTVSSTRGGGSKVAALKEKVAALKEKVAALKEKVAALKE

SEQ ID NO: 12352 - protein, 307 aa, Artificial Sequence
  Synthetic Polypeptide
MALPVTALLLPLALLLHAARPDVVMTQSPLSLPVSLGDQASISCRSSQRLVHSNGNTYLHWYLQKPGQSPKLLIYRVSNRFPGVPDRFSGSGSGTDFTLKISRVEAEDLGIYFCSQSTHVPYTFGGGTKLEIKRGGGGSGGGGSGGGGSEVRLQQSGPDLIKPGASVKMSCKASGYTFTGYVMHWVKQRPGQGLEWIGFINPYNDDIQSNERFRGKATLTSDKSSTTAYMELSSLTSEDSAVYYCARGAGYNFDGAYRFFDFWGQGTTLTVSSTRGGGSKVAALKEKVAALKEKVAALKEKVAALKE

SEQ ID NO: 12353 - protein, 298 aa, Artificial Sequence
  Synthetic Polypeptide
MALPVTALLLPLALLLHAARPSYELTQPPSVSVSPGQTATISCSGDQLGGKYGHWYQKKPGQSPVLVLYQDRKRPAGIPERFSGSSSGNTITLTISGTQAVDEADYYCQAWDTNLGGVFGGGTKVTVLGQGGGGSGGGGSGGGGSQVQLVESGAEVKKPGASVKVSCKASGYTFTGYYMHWVRQAPGQGLEWMGRINPNSGGTNYAQKFQGRVTMTRDTSISTAYMELSRLRSDDTAVYYCASPRGRGSAFDIWGQGTLVTVSSTRGGGSKVAALKEKVAALKEKVAALKEKVAALKE

SEQ ID NO: 12354 - protein, 301 aa, Artificial Sequence
  Synthetic Polypeptide
MALPVTALLLPLALLLHAARPNFMLTQPHSVSESPGKTVTISCTRSSGSIASKYVQWYQQRPGSSPTTVIYEDNQRPSGVPDRFSGSIDTSSNSASLTISGLRTEDEADYYCHSYDSNNHSVFGGGTKVTVLGQGGGGSGGGGSGGGGSEVQLVESGGGVVQPGGSLRLSCAASGFTFSSYAMSWVRQAPGKGLEWVSAISGSGGSTYYADSVKGRFSISRDNSKNTLYLQMNSLRAEDTAVYYCARTRSSGAFDIWGQGTLVTVSSTRGGGSKVAALKEKVAALKEKVAALKEKVAALKE

SEQ ID NO: 12355 - protein, 297 aa, Artificial Sequence
  Synthetic Polypeptide
MALPVTALLLPLALLLHAARPDIQMNQSPSSLSASLGDTITITCHASQNINVWLSWYQQKPGNIPKLLIYKASNLHTGVPSRFSGSGSGTGFTITISSLQPEDIATYYCQQGQSYPWTFGGGTKLEIKRGGGGSGGGGSGGGGSEVQLQQSGPELVKPGASVKISCKASGYSFTGYFMNWVKQSHGKSLEYIGRFNPYNGETLYNQKFKGKATLTVDKSSSTVHMELLSVTSEDSAVYYCGRSGNDDAMDYWGQGTSVTVSSATRGGGSKVAALKEKVAALKEKVAALKEKVAALKE

SEQ ID NO: 12356 - protein, 294 aa, Artificial Sequence
  Synthetic Polypeptide
MALPVTALLLPLALLLHAARPDILLTQSPAILSVSPGERVSFSCRASQNIGTSIHWYQQRTNGSPRLLIKYASESVSGIPSRFSGSGSGTDFTLSINSVESEDIADYYCQHTNSWPTTFGGGTKLEIKRGGGGSGGGGSGGGGSQVQLQQSDAELVKPGASVKISCKASGYTFTDHAIHWVKQKPEQGLEWIGYFSPGNGDIKYNEKFKGKATLTADKSSSTAYMQLNSLTSEDSAVYFCKRSYGNYDYWGQGTTLTVSSTRGGGSKVAALKEKVAALKEKVAALKEKVAALKE

SEQ ID NO: 12357 - protein, 299 aa, Artificial Sequence
  Synthetic Polypeptide
MALPVTALLLPLALLLHAARPDIVMTQSPDSLAVSLGERATINCKSSQSLLNSGDQKNYLTWYQQKPGQPPKLLIYWASTRESGVPDRFSGSGSGTDFTLTISSLQAEDVAVYYCQNDYSYPLTFGQGTKVEIKGGGGSGGGGSGGGGSQVQLVQSGAEVKKTGSSVKVSCKASGYTFTDHAIHVWRQAPGQALEWMGHFSPGNTDIKYNDKFKGRVTLTVDRSMSTAYMELSSLRSEDTAMYYCKTSTFFFDYWGQGTMVTVSSTRGGGSKVAALKEKVAALKEKVAALKEKVAALKE

SEQ ID NO: 12358 - protein, 298 aa, Artificial Sequence
  Synthetic Polypeptide
MALPVTALLLPLALLLHAARPDIQMTQSPSSLSASVGDRVTITCKASQDVSIAVAWYQQKPGKAPKVLIYSASYRYTGVPDRFSGSGSGTDFTFTISSLQPEDIAVYYCQQHYITPLTFGGGTKVEIKGGGGSGGGGSGGGGSQIQLVQSGHEVKKPGASVKVSCKASGYTFTNYGMNWVRQAPGQGLEWMGWINTKTGEPTYAEEFKGRFVFSLETSASTAYLQISSLKAEDTAMYFCGRGGYGSSYWYFDVWGQGTTVTVSSTRGGGSKVAALKEKVAALKEKVAALKEKVAALKE

SEQ ID NO: 12359 - protein, 301 aa, Artificial Sequence
  Synthetic Polypeptide
MALPVTALLLPLALLLHAARPQAVVTQPPSASGTPGQRVTISCSGSSSNIGSNTVNWYQQVPGTAPKLLIYSNNQRPSGVPDRFSGSKSGTSASLAISGLQSEDEADYYCAAWDDSLNGWVFGGGTKLTVLGGGGSGGGGSGGGGSQMQLVQSGAEVKEPGESLRISCKGSGYSFTNFWISWVRQMPGKGLEWMGRVDPGYSYSTYSPSFQGHVTISADKSTSTAYLQWNSLKASDTAMYYCARVQYSGYYDWFDPWGQGTLVTVSSTRGGGSKVAALKEKVAALKEKVAALKEKVAALKE

SEQ ID NO: 12360 - protein, 295 aa, Artificial Sequence
  Synthetic Polypeptide
MALPVTALLLPLALLLHAARPDIQMTQSPSTLSASVGDRVTITCRASQNINKWLAWYQQRPGKAPQLLIYKASSLESGVPSRFSGSGSGTEYTLTISSLQPDDFATYYCQQYNSYATFGQGTKVEIKRGGGGSGGGGSGGGGSQVQLVQSGAEVKKPGESLKISCKGSGYNFSNKWIGWVRQLPGRGLEWIAIIYPGYSDITYSPSFQGRVTISADTSINTAYLHWHSLKASDTAMYYCVRHTALAGFDYWGLGTLVTVSSTRGGGSKVAALKEKVAALKEKVAALKEKVAALKE

SEQ ID NO: 12361 - protein, 300 aa, Artificial Sequence
  Synthetic Polypeptide
MALPVTALLLPLALLLHAARPQSVVTQPPSVSVAPGKTARITCGRNNIGSKSVHWYQQKPGQAPVLVVYDDSDRPSGIPERFSGSNSGNTATLTISRVEAGDEADYYCQVWDSSSDHVVFGGGTKLTVLGGGGGSGGGGSGGGGSEVQLVQSGGGVVRPGGSLRLSCAASGFTFDDYGMSWVRQAPGKGLEWVSGINWNGGSTGYADSVRGRFTISRDNAKNSLYLQMNSLRAEDTALYYCARERGYGYHDPHDYWGQGTLVTVSSTRGGGSKVAALKEKVAALKEKVAALKEKVAALKE

SEQ ID NO: 12362 - protein, 299 aa, Artificial Sequence
  Synthetic Polypeptide
MALPVTALLLPLALLLHAARPDIVLTQSPASLAVSLGQRATISCRASESVDNYGNTFMHWYQQKPGQPPKLLIYRASNLESGIPARFSGSGSRTDFTLTINPVEADDVATYYCQQSNEDPPTFGAGTKLELKGGGGSGGGGSGGGGSQIQLVQSGPELKKPGETVKISCKASGYIFTNYGMNWVKQAPGKSFKWMGWINTYTGESTYSADFKGRFAFSLETSASTAYLHINDLKNEDTATYFCARSGGYDPMDYWGQGTSVTVSSTRGGGSKVAALKEKVAALKEKVAALKEKVAALKE

SEQ ID NO: 12363 - protein, 297 aa, Artificial Sequence
  Synthetic Polypeptide
MALPVTALLLPLALLLHAARPEIVLTQSPGTLSLSPGERATLSCRASQSVSNTYLAWYHQRPGQAPRLLIYGASSRATGIPDRFSGSGSGTDFALTISSLEPEDFAVYYCQQYSNSWTFGQGTKVEIKRGGGGSGGGGSGGGGSQVQLVESGGGVVQPGRSLRLSCAASGFTFSSYDMHWVRQAPGKGLEWVAVISYDGTNEYYADSVKGRFTISRDTSKNTLYLQMNSLRAEDTAVYYCARERYFDWSFDYWGQGTLVSVSSTRGGGSKVAALKEKVAALKEKVAALKEKVAALKE

SEQ ID NO: 12364 - protein, 296 aa, Artificial Sequence
  Synthetic Polypeptide
MALPVTALLLPLALLLHAARPELTQDPAVSVALGQTVRITCQGDSLRSNYANWYQQKPGQAPVLVIYGQNNRPSGIPDRFSGSSSGNTASLTITGAQAADEADYYCDSRVSTGNHVVFGGGTKLTVLGQGGGGSGGGGSGGGGSEVQLVQSGAEVKKPGASVKVSCKASGYTFTSYAMHWVRQAPGQRLEWMGWINAGNGNTKYSQKFQGRVTITRDTSASTAYMELSSLRSEDTAVYYCARDISYGSFDYWGQGTLVTVSSTRGGGSKVAALKEKVAALKEKVAALKEKVAALKE

SEQ ID NO: 12365 - protein, 292 aa, Artificial Sequence
  Synthetic Polypeptide
MALPVTALLLPLALLLHAARPDIQMTQSPSSLSASVGDRVTITCSATSSISYMHWYQQKPGKAPKGWIYDTSKLAHGVPSRFSGSGSGTDFTLTISSLQPEDFATYYCHQRRSYPFTFGQGTKVEIKGGGGSGGGGSGGGGSEVQLVQSGAEVKKPGASVKVSCKASGYTFTNFWIHWVRQAPGQGLEWIGEIDPSDSYTNYNQKFKGRVTITRDTSTSTAYLELSSLRSEDTAVYYCAREITTVDYWGQGTLVTVSSTRGGGSKVAALKEKVAALKEKVAALKEKVAALKE

SEQ ID NO: 12366 - protein, 299 aa, Artificial Sequence
  Synthetic Polypeptide
MALPVTALLLPLALLLHAARPDIQMTQSPSSLSASVGDRVTITCKASQGFNKYVAWYQQKPGKAPKLLIYYTSTLQPGVPSRFSGSGSGRDYTLTISSLQPEDFATYYCLQYGNLLYAFGQGTKVEIKRGGGGSGGGGSGGGGSEVQLVQSGAEVKKPGASVKVSCKASGYTFTSYWIGWVRQAPGQGLEWIGDIYPGGGYTNYNEKFKGRVTITRDTSTSTAYLELSSLRSEDTAVYYCARLDGSSYRGAMDSWGQGTLVTVSSTRGGGSKVAALKEKVAALKEKVAALKEKVAALKE

SEQ ID NO: 12367 - protein, 295 aa, Artificial Sequence
  Synthetic Polypeptide
MALPVTALLLPLALLLHAARPDIQMTQSPSSLSASVGDRVTITCRASQDIRYYLNWYQQKPGKAPKLLIYVASSLQSGVPSRFSGSGSGTEFTLTVSSLQPEDFATYYCLQVYSTPRTFGQGTKVEIKGGGGSGGGGSGGGGSEVQLVESGGGLAKPGGSLRLSCAASGFRFTFNNYYMDWVRQAPGQGLEWVSRISSSGDPTWYADSVKGRFTISRENAKNTLFLQMNSLRAEDTAVYYCASLTTGSDSWGQGVLVTVSSTRGGGSKVAALKEKVAALKEKVAALKEKVAALKE

SEQ ID NO: 12368 - protein, 296 aa, Artificial Sequence
  Synthetic Polypeptide
MALPVTALLLPLALLLHAARPEIVMTQSPATLSVSPGERATLSCRASQSVSRNLAWYQQKPGQAPRLLIYGASTRATGIPARFSGSGSGTEFTLTIGSLQSEDFAVYYCQQYKTWPRTFGQGTNVEIKGGGGSGGGGSGGGGSQVQLQQWGAGLLKPSETLSLTCAVFGGSFSGYYWSWIRQPPGKGLEWIGEINHRGNTNDNPSLKSRVTISVDTSKNQFALKLSSVTAADTAVYYCARERGYTYGNFDHWGQGTLVTVSSTRGGGSKVAALKEKVAALKEKVAALKEKVAALKE

SEQ ID NO: 12369 - protein, 302 aa, Artificial Sequence
  Synthetic Polypeptide
MALPVTALLLPLALLLHAARPDIQMTQSPSSLSASVGDRVTITCKASKNIRSYLAWYQQKPGKAPKLLIYSGSTLHSGVPSRFSGSGSGTDFTLTISSLQPEDFATYYCQQHHEYPLTFGQGTKVEIKRGGGGSGGGGSGGGGSQVQLQESGPGLVKPSETLSLTCTVSGYTITSGYDWSWIRQPPGKGLEWIGYINYGGSTNYKPSLGSRVTISVDTSKNQFSLKLSSVTAADTAVYYCARYNEYKSYIYDWYFDFWGQGTLVTVSSTRGGGSKVAALKEKVAALKEKVAALKEKVAALKE

SEQ ID NO: 12370 - protein, 304 aa, Artificial Sequence
  Synthetic Polypeptide
MALPVTALLLPLALLLHAARPQSVVTQPPSVSAAPGQKVTISCSGSSSNIGNNYVSWYQQLPGTAPKLLIYDNNKRPSGIPDRFSGSKSGTSATLGITGLQTGDEADYYCGTWDGSLYTMLFGGGTKLTVLGGGGSGGGGSGGGGSEVQLVESGGGLVKPGGSLRLSCAASGFTFSNAWMSWVRQAPGKGLEWVGFIRSKAYGGTTEYAASVKGRFTISRDDSKSIAYLQMNNLKTEDTAVYYCARDGLYSSSWYDSDYWGQGTLVTVSSTRGGGSKVAALKEKVAALKEKVAALKEKVAALKE

SEQ ID NO: 12371 - protein, 309 aa, Artificial Sequence
  Synthetic Polypeptide
MALPVTALLLPLALLLHAARPQSVLTQPPSVSGAPGQRVTISCTGSSSNIGAGYDVHWYQQLPGTAPKLLIFGNSNRPSGVPDRFSGFKSGTSASLAITGLQAEDEADYFCQSYDSSLSGSGVFGTGTKVTVLGGGGGSGGGGSGGGGSQMQLVQSGGGLVQPGRSLRLSCAASGFTFDDYAMHWVRQAPGKGLEWVSGISWNSGSIGYADSVKGRFTISRDNAKNSLYLQMNSLRAEDTALYYCAKDIHSGSYYGLLYYAMDVWGQGTTVTVSSTRGGGSKVAALKEKVAALKEKVAALKEKVAALKE

SEQ ID NO: 12372 - protein, 309 aa, Artificial Sequence
  Synthetic Polypeptide
MALPVTALLLPLALLLHAARPLPVLTQPPSASGTPGQRVTISCSGRSSNIGSNSVNWYRQLPGAAPKLLIYSNNQRPPGVPVRFSGSKSGTSASLAISGLQSEDEATYYCATWDDNLNVHYVFGTGTKVTVLGSRGGGGSGGGGSGGGGSLEMAQVQLVQSGAEVKKPGSSVKVSCKASGGTFSSYAISWVRQAPGQGLEWMGRIIPILGIANYAQKFQGRVTITADKSTSTAYMELSSLRSEDTAVYYCARGGYYSHDMWSEDWGQGTLVTVSSTRGGGSKVAALKEKVAALKEKVAALKEKVAALKE

SEQ ID NO: 12373 - protein, 298 aa, Artificial Sequence
  Synthetic Polypeptide
MALPVTALLLPLALLLHAARPDIVLTQSPASLAVSLGERATINCRASESVSVIGAHLIHWYQQKPGQPPKLLIYLASNLETGVPARFSGSGSGTDFTLTISSLQAEDAAIYYCLQSRIFPRTFGQGTKLEIKGGGGSGGGGSGGGGSQVQLVQSGSELKKPGESVKISCKASGYTFTDYSINWVKQAPGQGLKWMGWINTETREPAYAYDFRGRFVFSLDTSASTAYLQISSLKAEDTAVYFCALDYSYAMDYWGQGTLVTVSSTRGGGSKVAALKEKVAALKEKVAALKEKVAALKE

SEQ ID NO: 12374 - protein, 299 aa, Artificial Sequence
  Synthetic Polypeptide
MALPVTALLLPLALLLHAARPDIVLTQSPATLSLSPGDRATLSCRASESVTILGSHLIYWYQQKPGQAPRLLIQLASNVQTGIPARFSGSGSRTDFTLTISSLEPEDFAVYYCLQSRTIPRTFGQGTKLEIKRGGGGSGGGGSGGGGSQVQLVQSGSELKKPGESVKISCKASGYTFTHYSMNWVRQAPGQGLEWMGRINTETGEPLYADDFKGRFVFSLDTSASTAYLQISSLKAEDTAVYYCSNDYLYSLDYWGQGTLVTVSSTRGGGSKVAALKEKVAALKEKVAALKEKVAALKE

SEQ ID NO: 12375 - protein, 303 aa, Artificial Sequence
  Synthetic Polypeptide
MALPVTALLLPLALLLHAARPDFVMTQSPDSLAVSLGERVTMSCKSSQSLLNSGNQKNYLTWYQQKPGQPPKLLIYWASTRESGVPDRFSGSGSGTDFTLTISSLQAEDVAVYYCQNDYSYPYTFGQGTKLEIKGGGGSGGGGSGGGGSEVQLVQSGAELKKPGASVKVSCKASGYTFTDYYMKWVRQAPGQGLEWIGDIIPSNGATFYNQKFKGRVTITVDKSTSTAYMELSSLRSEDTAVYYCARSHLLRASWFAYWGQGTLVTVSSTRGGGSKVAALKEKVAALKEKVAALKEKVAALKE

SEQ ID NO: 12376 - protein, 303 aa, Artificial Sequence
  Synthetic Polypeptide
MALPVTALLLPLALLLHAARPDFVMTQSPDSLAVSLGERVTMSCKSSQSLLNSGNQKNYLTWYQQKPGQPPKLLIYWASTRESGVPDRFSGSGSGTDFTLTISSLQAEDVAVYYCQNDYSYPYTFGQGTKLEIKGGGGSGGGGSGGGGSQVQLVQSGAELKKPGASVKVSCKASGYTFTDYYMKWVRQAPGQGLEWIGDIIPSNGATFYNQKFKGRVTITVDKSTSTAYMELSSLRSEDTAVYYCARSHLLRASWFAYWGQGTLVTVSSTRGGGSKVAALKEKVAALKEKVAALKEKVAALKE

SEQ ID NO: 12377 - protein, 293 aa, Artificial Sequence
  Synthetic Polypeptide
MALPVTALLLPLALLLHAARPDVQITQSPSYLAASPGETITINCRASKSISKDLAWYQEKPGKTNKLLIYSGSTLQSGIPSRFSGSGSGTDFTLTISSLEPEDFAMYYCQQHNKYPYTFGGGTKLEIKRGGGGSGGGGSGGGGSQVQLQQPGAELVRPGASVKLSCKASGYTFTSYWMNWVKQRPDQGLEWIGRIDPYDSETHYNQKFKDKAILTVDKSSSTAYMQLSSLTSEDSAVYYCARGNWDDYWGQGTTLTVSSTRGGGSKVAALKEKVAALKEKVAALKEKVAALKE

SEQ ID NO: 12378 - protein, 295 aa, Artificial Sequence
  Synthetic Polypeptide
MALPVTALLLPLALLLHAARPEIVLTQSPTSMTASPGEQVTITCRASSSINYMHWYQQKPGASPRPWIYETSKLASGVPDRFSGSASGTSYSLTINNMEAEDAATYYCQQWNYPSWTFGGGTKLELKGGGGSGGGGSGGGGSEVQLVESGGGLVQPGRSLKLSCAASGFTFSDYNMAWVRQAPKKGLEWVATILYDGGRTYYRGSVKGRFTISRDNAKSTLYLRMDSLRSEDTATYYCATHSRGTDYFDYWGQGVMVTVSSTRGGGSKVAALKEKVAALKEKVAALKEKVAALKE

SEQ ID NO: 12379 - protein, 304 aa, Artificial Sequence
  Synthetic Polypeptide
MALPVTALLLPLALLLHAARPDIVMTQSPSSLAVSEGETVTINCKSSQSFLSSGDGKNYVAWYQYKPGQSPKLLIYWASTRQSGVPDRFIGSGSGTDFTLTISTVQAEDLAIYYCQQYYDTPLTFGSGTKLEIKGGGGSGGGGSGGGGSEVKLQESGPSLVQSSQTLSLTCTVSGFSLTSYHIHWVRQTPGKGLEWMGVMWSDGDTSYNSALKSRLSISRDTSQSQVFLKMNSLQTEDTATYYCARGYYSSYLYLWFAYWGQGTLVTVSSTRGGGSKVAALKEKVAALKEKVAALKEKVAALKE

SEQ ID NO: 12380 - protein, 308 aa, Artificial Sequence
  Synthetic Polypeptide
MALPVTALLLPLALLLHAARPDVLMTQTPVSLPVSLGGQVSISCRSSQSLVHSDGDTYLHWYLQKPGQSPQLLIYRVSNRFSGVPDRFSGSGSGTDFTLKISRVEPEDLGLYYCLQTTHFPPWTFGGGTKLEMKGGGGSGGGGSGGGGSQVQLQQSGPELRRPGSSVRLSCKASGYRIKDFLIHWIKNRPEHGLEWIGWIDPEDGETKYAQKFQTKATLTADTSSNTAYMQLSSLTSEDTATYFCARWGDVYYGLMRGHVMDAWGQGTSVTVSSTRGGGSKVAALKEKVAALKEKVAALKEKVAALKE

SEQ ID NO: 12381 - protein, 304 aa, Artificial Sequence
  Synthetic Polypeptide
MALPVTALLLPLALLLHAARPDIVMTQAAPSIPVTPGESVSISCRSSKSLLNSNGNTYLYWFLQRPGQSPQLLIYRMSNLASGVPDRFSGSGSGTAFTLRISRVEAEDVGVYYCMQHLEYPFTFGAGTKLELKRGGGGSGGGGSGGGGSEVQLQQSGPELIKPGASVKMSCKASGYTFTSYVMHWVKQKPGQGLEWIGYINPYNDGTKYNEKFKGKATLTSDKSSSTAYMELSSLTSEDSAVYYCARGTYYYGSRVFDYWGQGTTLTVSSTRGGGSKVAALKEKVAALKEKVAALKEKVAALKE

SEQ ID NO: 12382 - protein, 304 aa, Artificial Sequence; identical to SEQ ID NO: 12381
  Synthetic Polypeptide

SEQ ID NO: 12383 - protein, 322 aa, Artificial Sequence
  Synthetic Polypeptide
MALPVTALLLPLALLLHAARPINIYNAEPANPSEKNSPEFDIVMTQSPATLSLSPGERATLSCRSSKSLQNVNGNTYLYWFQQKPGQSPQLLIYRMSNLNSGVPDRFSGSGSGTEFTLTISSLEPEDFAVYYCMQHLEYPITFGAGTKLEIKGGGGSGGGGSGGGGSEVQLVESGGGLVKPGGSLKLSCAASGYTFTSYVMHWVRQAPGKGLEWIGYINPYNDGTKYNEKFQGRVTISSDKSISTAYMELSSLRSEDTAMYYCARGTYYYGTRVFDYWGQGTLVTVSSTRGGGSKVAALKEKVAALKEKVAALKEKVAALKE

SEQ ID NO: 12384 - protein, 299 aa, Artificial Sequence
  Synthetic Polypeptide
MALPVTALLLPLALLLHAARPDIQMTQSPSSLSASVGDRVTITCKASDHINNWLAWYQQKPGQAPKLLIYGATTLETGVPSRFSGSGSGTDYTLTISSLQPEDFATYYCQQSWNTPWTFGQGTKLEIKRGGGGSGGGGSGGGGSQVQLQQPGAELVKPGASVKMSCKASGYAFSSYWINWMKQKPGQGLEWIGQIYPGDGDTNYNGKFKGRATLTADTSSSTAYMQLSSLTSEDSAVYFCARSITTVVGCAMDYWGQGTSVTVSSTRGGGSKVAALKEKVAALKEKVAALKEKVAALKE

SEQ ID NO: 12385 - protein, 301 aa, Artificial Sequence
  Synthetic Polypeptide
MALPVTALLLPLALLLHAARPQIVLSQSPAILSASPGEKVTMTCRASSSVSYMHWYQQKPGSSPKPWIYATSNLASGVPARFSGSGSGTSYSFTISRVEAEDAATYYCQQWTFNPPTFGGGTRLEIKRTVAAGGGGSGGGGSGGGGSQAYLQQSGAELVRPGASVKMSCKASGYTFTSYNMHWVKQTPRQGLEWIGGIYPGNGDTSYNQKFKGKATLTVGKSSSTAYMQLSSLTSEDSAVYFCARYDYNYAMDYWGQGTSVTVSSASTRGGGSKVAALKEKVAALKEKVAALKEKVAALKE

SEQ ID NO: 12386 - protein, 300 aa, Artificial Sequence
  Synthetic Polypeptide
MALPVTALLLPLALLLHAARPDEIVLTQSPATLSLSPGERATLSCRASQSVSSYLAWYQQKPGQAPRLLIYDASNRATGIPARFSGSGSGTDFTLTISSLEPEDFAVYYCQQRSNWPITFGQGTRLEIKGGGGSGGGGSGGGGSEVQLVESGGGLVQPDRSLRLSCAASGFTFHDYAMHWVRQAPGKGLEWVSTISWNSGTIGYADSVKGRFTISRDNAKNSLYLQMNSLRAEDTALYYCAKDIQYGNYYYGMDVWGQGTTVTVSSTRGGGSKVAALKEKVAALKEKVAALKEKVAALKE

SEQ ID NO: 12387 - protein, 294 aa, Artificial Sequence
  Synthetic Polypeptide
MALPVTALLLPLALLLHAARPDIQMTQSPSSLSASVGDRVTINCKASQDINSYLSWFQQKPGKAPKTLIYRANRLVDGVPSRFSGSGSGQDYTLTISSLQPEDFATYYCLQYDEFPLTFGGGTKVEIKGGGGSGGGGSGGGGSQVQLVQSGAEVKKPGASVKVSCKASGYTFTNYDINWVRQAPGQGLEWIGWIYPGDGSTKYNEKFKAKATLTADTSTSTAYMELRSLRSDDTAVYYCASGYEDAMDYWGQGTTVTVSSTRGGGSKVAALKEKVAALKEKVAALKEKVAALKE

SEQ ID NO: 12388 - protein, 296 aa, Artificial Sequence
  Synthetic Polypeptide
MALPVTALLLPLALLLHAARPDIVMTQTPLSLSVTPGQPASISCKSSQSLLDGDGKTYLNWLLQKPGQSPQRLIYLVSKLDSGVPDRFSGSGSGTDFTLKISRVEAEDVGVYYCWQGTHFPRTFGQGTKLEIKGGGGSGGGGSGGGGSQVQLVQSGAEVKKPGASVKVSCKASGYTFKDTYIHWVRQAPGQGLEWMGRIDPANGNTKYDPKFQGRVTMTRDTSISTAYMELSRLRSDDTAVYYCARRGGVDWGQGTLVTVSSTRGGGSKVAALKEKVAALKEKVAALKEKVAALKE

SEQ ID NO: 12389 - protein, 297 aa, Artificial Sequence
  Synthetic Polypeptide
MALPVTALLLPLALLLHAARPDIQMTQSPSSLSASVGDRVTITCKASQDVSTAVAWFQQKPGKAPKLLIYSPSYRYTGVPSRFSGSGSGTDFTLTISSLQPEDFTYYCQQLYSTPYTFGQGTKVEIKGGGGSGGGGSGGGGSEVQLVQSGAEVKKPGASVKVSCKASGYTFTDYYLDVVVRQAPGQGLEWIGRVNPYNGGTIYNQKFKGRVTLTRDTSTSTAYLELSSLRSEDTAVYYCARDHYRYDPLLDYWGQGTLVTVSSTRGGGSKVAALKEKVAALKEKVAALKEKVAALKE

SEQ ID NO: 12390 - protein, 303 aa, Artificial Sequence
  Synthetic Polypeptide
MALPVTALLLPLALLLHAARPDIQMTQSPSSLSASVGDRVTITCRASQSVSTSSYNYMHWYQQKPGKPPKLLIKYASNLESGVPSRFSGSGSGTDFTLTISSLQPEDFATYYCQHSWEIPLTFGQGTKVEIKGGGGSGGGGSGGGGSEVQLVQSGAEVKKPGASVKVSCKASGYSFTDYYMHWVRQAPGQGLEWIGRINPYNGAAFYSQNFKDRVTLTVDTSTSTAYLELSSLRSEDTAVYYCAIERGADLEGYAMDYWGQGTLVTVSSTRGGGSKVAALKEKVAALKEKVAALKEKVAALKE

SEQ ID NO: 12391 - protein, 301 aa, Artificial Sequence
  Synthetic Polypeptide
MALPVTALLLPLALLLHAARPEIVLTQSPATLSASPGERVTLTCRASSNVISSYVHWYQQKPGSSPRLFLYSTSNLASGVPSRFSGSGSGTDFTFTISSLEAEDAATYYCQQYSGYPLTFGQGTRLEIKGGGGSGGGGSGGGGSQVQLQESGPGLVKPSETLSLTCAVSGYSITSAYYWNWIRQPPGKGLEWIGYISYDGRNNYNPSLKNRITINPDTSKNQFSLQLNSVTPEDTAVYYCAREGDYDVGNYYAMDYWGQGTLVTVSSTRGGGSKVAALKEKVAALKEKVAALKEKVAALKE

SEQ ID NO: 12392 - protein, 301 aa, Artificial Sequence
  Synthetic Polypeptide
MALPVTALLLPLALLLHAARPEIVLTQSPATLSLSPGERATLSCRASSNVISSYVHWYQQKPGQAPRLLIYSTSNLASGIPARFSGSGSGTDFTLTISSLEPEDFAVYYCQQYSGYPLTFGQGTRLEIKGGGGSGGGGSGGGGSEVQLVESGGGLVQPGRSLRLSCAASGYSITSAYYWNWVRQAPGKGLEWVSYISYDGRNNYNPSLKNRFTISRDNAKKSLYLQMNSLRAEDTALYYCAKEGDYDVGNYYAMDYWGQGTTVTVSSTRGGGSKVAALKEKVAALKEKVAALKEKVAALKE

SEQ ID NO: 12393 - protein, 310 aa, Artificial Sequence
  Synthetic Polypeptide
MALPVTALLLPLALLLHAARPDVVMTQTPLSLPVSLGDQASISCRSSQSLVHSNGNTYLRWYLQKPGQSPKVLIYKVSNRVSGVPDRFSGSGSGTDFTLKINRVEAEDLGVYFCSQSTHVPWTFGGGTKLEIKSSADDAKKDAAKKDDAKKDDAKKDGGVKLDETGGGLVQPGGAMKLSCVTSGFTFGHYWMNWVRQSPEKGLEWVAQFRNKPYNYETYYSDSVKGRFTISRDDSKSSVYLQMNNLRVEDTGIYYCTGASYGMEYLGQGTSVTVSTTRGGGSKVAALKEKVAALKEKVAALKEKVAALKE

SEQ ID NO: 12394 - protein, 306 aa, Artificial Sequence
  Synthetic Polypeptide
MALPVTALLLPLALLLHAARPQVQLVESGGNLVQPGGSLRLSCAASGFTFGSFSMSWVRQAPGGGLEWVAGLSARSSLTHYADSVKGRFTISRDNAKNSVYLQMNSLRVEDTAVYYCARRSYDSSGYWGHFYSYMDVWGQGTLVTVSGGGGSGGGGSGGGGSSVLTQPSSVSAAPGQKVTISCSGSTSNIGNNYVSWYQQHPGKAPKLMIYDVSKRPSGVPDRFSGSKSGNSASLDISGLQSEDEADYYCAAWDDSLSEFLFGTGTKLTVLGTRGGGSKVAALKEKVAALKEKVAALKEKVAALKE

SEQ ID NO: 12395 - protein, 297 aa, Artificial Sequence
  Synthetic Polypeptide
MALPVTALLLPLALLLHAARPQSVVTQPPSVSGAPGQRVTISCTGSSSNIGAGYDVHWYQQLPGTAPKLLIYGNSNRPSGVPDRFSGSKSGTSASLAITGLQAEDEADYYCQSYDSSLSGSYVFGTGTKLTVLGGGGGSGGGGSGGGGSEVQLVETGGNLVQPGASLRLSCAASGFSFSGTAMHWVRQAPGKGLEWVSTISSTGRSTYYRDSVKGRFTISRDNSKNTLYLQMNSLRGEDTAVYYCARVSFDYWGQGTLVTVSSTRGGGSKVAALKEKVAALKEKVAALKEKVAALKE

SEQ ID NO: 12396 - protein, 299 aa, Artificial Sequence
  Synthetic Polypeptide
MALPVTALLLPLALLLHAARPQSVVTQPASVSGSPGQSITISCTGTSSDVGGYNYVSWYQQHPGKAPKLMIYDVSKRPSGVSNRFSGSKSGNTASLTISGLQAEDEADYYCSSYTSSSTLVFGGGTKLTVLGGGGGSGGGGSGGGGSEVQLVESGGAFVQPGGSLRLSCAASGFTFSSYAMTWVRQAPGKGLEWVSTISGRGRSTFYADSVKGRFTISRDNSKNTLYLQMNSLRAEDTAVYYCARYYHAGAFDLWGQGTLVTVSSTRGGGSKVAALKEKVAALKEKVAALKEKVAALKE

SEQ ID NO: 12397 - protein, 301 aa, Artificial Sequence
  Synthetic Polypeptide
MALPVTALLLPLALLLHAARPDVVMTQSPSSLSASVGDRVTITCQSSLDISHYLNWYQQKPGKAPKLLIYDASNLETGVPSRFSGSGSGTHFTFTISSLQPEDFATYYCQQYDNLPLTFGGGTKLEIKRGGGGSGGGGSGGGGSQVQLVQSGGGVVQPGGSLRVSCAASGVTLSDYGMHWVRQAPGKGLEWVAFIRNDGSDKYYADSVKGRFTISRDNSEKTVSLQMSSLRAEDTAVYYCAKNGESGPLDYWYLDLWGRGTLVTVSSTRGGGSKVAALKEKVAALKEKVAALKEKVAALKE

SEQ ID NO: 12398 - protein, 308 aa, Artificial Sequence
  Synthetic Polypeptide
MALPVTALLLPLALLLHAARPDVMLTQTPLSLPVSLGDQASISCRSSQSILHSTGDTYLEWYLQKPGQSPKLLINKVSNRLSGVPDRFSGSGSGTDFTLKISRVEAEDLGVYYCFQGSHVPWTFGGGTKLEIKRADAAPTVSIFPGGGGSGGGGSGGGGSQVKLQQSGPSLVKPGASVKMSCKASGYTFTDFYMKWVKQSHGKSLEWIGDINPNIGDTFYNQKFKGKATLTVDKSSSTAYMQLNSLTSEDSAVYFCSVGYFDVWGAGTTVTVSSTRGGGSKVAALKEKVAALKEKVAALKEKVAALKE

SEQ ID NO: 12399 - protein, 308 aa, Artificial Sequence
  Synthetic Polypeptide
MALPVTALLLPLALLLHAARPLPVLTQPPSVSVAPGKTARITCGGNNIGSKSVHWYQQKPGQAPVLVVYDDSDRPSGIPERFSGSNSGNTATLTISRVEAGDEADYYCQVWDSSSDYVVFGGGTKLTVLGGGGSGGGGSGGGGSEVQLVQSGAEVKKPGESLKISCKGSGYSFTSYWIGWVRQMPGKGLEWMGIIYPGDSDTRYSPSFQGQVTISADKSISTAYLQWSSLKASDTAMYYCARQVWGWQGGMYPRSNWWYNLDSWGQGTLVTVSSTRGGGSKVAALKEKVAALKEKVAALKEKVAALKE

SEQ ID NO: 12400 - protein, 301 aa, Artificial Sequence
  Synthetic Polypeptide
MALPVTALLLPLALLLHAARPELVMTQSPASLAVSLGQRATISCRASESVDSYGKSFMHWYQLKPGQPPKLLIYRASNLESGVPARFSGSGSRTDFTLTIDPVEADDAATYYCQQNNEDPWTFGGGTKLEIKGGGGSGGGGSGGGGSEVQLEQSGPELVKPGASVKMSCKASGYTFTNYYMKWVKQSHGKSLEWIGDLNPNNGDTFYNQKFKGKATLTVDKSSNTAYMQLNSLTSEDSAVYYCARTGRYEENAMDYWGQGTSVTVSSTRGGGSKVAALKEKVAALKEKVAALKEKVAALKE

SEQ ID NO: 12401 - protein, 299 aa, Artificial Sequence; identical to SEQ ID NO: 12374
  Synthetic Polypeptide

SEQ ID NO: 12402 - protein, 299 aa, Artificial Sequence; identical to SEQ ID NO: 12283
  Synthetic Polypeptide

SEQ ID NO: 12403 - protein, 295 aa, Artificial Sequence
  Synthetic Polypeptide
MALPVTALLLPLALLLHAARPDVVMTQSPSSLSASVGDRVTITCMASEDIYIRLAWYQQKPGNAPKLLIYAATSLETGVPSRFSGSGSGTDFTLTISSLQPEDFATYYCQQYWSSPWTFGGGTKVEIKGGGGSGGGGSGGGGSQVQLQESGPGLVKPSQTLSLTCTVSGYSITSDYTWNWIRQPPGNGLEWIGYITYSGSTSYNPSLKSRVLISVDTSKNQVSLKLSSVTAADTAVYYCARLGRRYTMDYWGQGTTVTVSSTRGGGSKVAALKEKVAALKEKVAALKEKVAALKE

SEQ ID NO: 12404 - protein, 300 aa, Artificial Sequence
  Synthetic Polypeptide
MALPVTALLLPLALLLHAARPEVQLVESGGGLVQPGRSLRLSCAASGFTFDDYAMHWVRQAPGKGLEWVSGISWNSGSIGYADSVKGRFTISRDNAKNSLYLQMNSLRAEDTALYYCAKDKGGGYYDFWSGSDYWGQGTLVTVSSGGGGSGGGGSGGGGSSSELTQDPAVSVALGQTVRITCQGDSLRSYYASWYQQKPGQAPVLVIYGKNNRPSGIPDRFSGSSSGNTASLTITGAQAEDEADYYCNSRDSSGWVFGGGTKLTVLTRGGGSKVAALKEKVAALKEKVAALKEKVAALKE

SEQ ID NO: 12405 - protein, 309 aa, Artificial Sequence
  Synthetic Polypeptide
MALPVTALLLPLALLLHAARPEVQLQQSGPGLVKPSQTLSLTCAISGDSVLSNSDTWNWIRQSPSRGLEWLGRTYHRSTWYDDYASSVRGRVSINVDTSKNQYSLQLNAVTPEDTGVYYCARDRLQDGNSWSDAFDVWGQGTMVTVSSGGGGSGGGGSGGGGSQSALTQPASVSGSPGQSITISCTGTSSDVGGYNYVSWYQQHPGKAPKLMIYDVSNRPSGVSNRFSGSKSGNTASLTISGLQAEDEADYYCSSYTSSSTLVYVFGTGTKVTVLTRGGGSKVAALKEKVAALKEKVAALKEKVAALKE

SEQ ID NO: 12406 - protein, 307 aa, Artificial Sequence
  Synthetic Polypeptide
MALPVTALLLPLALLLHAARPQVQLVQSGAEVKKPGASVKVSCKASGYTFTSYDINWVRQATGQGLEWMGWMNPNSGNTGYAQKFQGRVTMTRNTSISTAYMELSSLRSEDTAVYYCARGDSNYWSYYGMDVWGQGTLVTVSSGGGGSGGGGSGGGGSGGGGSQSVLTQPRSVSGSPGQSVTISCTGTSSDVGGYNYVSWYQQHPGEAPKLIIYDADKRPSGISNRFSSGKSGNTASLTISGLQVEDEADYYCCSYAGGSTWVFGGGTKVTVLTRGGGSKVAALKEKVAALKEKVAALKEKVAALKE

SEQ ID NO: 12407 - protein, 309 aa, Artificial Sequence
  Synthetic Polypeptide
MALPVTALLLPLALLLHAARPEVQLQQSGPGLVKPSQTLSLTCAISGDSVSSNSAAWNWIRQSPSRGLEWLGRTYYRSKWYSDYAVSVKSRITINPDTSKNQFSLQLNSVTPEDTAVYYCARDPYDFWSGYPDAFDIWGQGTMVTVSSGGGGSGGGGSGGGGSQSALTQPASVSGSPGQSITISCTGTSSDVGGYNYVSWYQQHPGKAPKVIISEVNNRPSGVSHRFSGSKSGNTASLTISGLQAEDEADYFCSSYTSGRTLYVFGTGSKVTVLGTRGGGSKVAALKEKVAALKEKVAALKEKVAALKE

SEQ ID NO: 12408 - protein, 308 aa, Artificial Sequence
  Synthetic Polypeptide
MALPVTALLLPLALLLHAARPEVQLQQSGPGLVKPSQTLSLTCAISGDSMLSNSDTWNWIRQSPSRGLEWLGRTYHRSTWYDDYASSVRGRVSINVDTSKNQYSLQLNAVTPEDTGVYYCARVRLQDGNSWSDAFDVWGQGTMVTVSSGGGGSGGGGSGGGGSQSALTQPASASGSPGQSVTISCTGTSSDVGGYNYVSWYQQHPGKAPKLMIYDVSNRPSGVSNRFSGSKSGNTASLTISGLQAEDEADYYCSSYTSSSTLYVFGTGTQLTVLTRGGGSKVAALKEKVAALKEKVAALKEKVAALKE

SEQ ID NO: 12409 - protein, 299 aa, Artificial Sequence
  Synthetic Polypeptide
MALPVTALLLPLALLLHAARPEIVLTQSPATLSLSPGERATLSCSASSSVSYMYWYQQKPGQAPRLLIYRTSNLASGIPARFSGSGSGTDFTLTISSLEPEDFAVYYCQQYHSYPTTFGQGTKVEIKRTVGGGGSGGGGSGGGGSEVQLVESGGGLVQPGGSLRLSCAASGFSFNTYAMNWVRQAPGKGLEWVSHIRSKSNNFATYYADSVKDRFTISRDNAKNSLYLQMNSLRAEDTAVYYCARQGGDFPMDYWGQGTLVTVSSTRGGGSKVAALKEKVAALKEKVAALKEKVAALKE

SEQ ID NO: 12410 - protein, 295 aa, Artificial Sequence
  Synthetic Polypeptide
MALPVTALLLPLALLLHAARPDVVMTQSPSSLSASVGDRVTITCKASEDIYIRLAWYQQKPGKAPKLLIYAATSLETGVPSRFSGSGSGTDFTLTISSLQPEDFATYYCQQYWTTPWTFGGGTKVEIKGGGGSGGGGSGGGGSQVQLQESGPGLVKPSQTLSLTCTVSGYSITIDYTWNWIRQPPGKGLEWIGYITYSGSTDYNPSLKSRVLISVDTSKNQVSLKLSSVTAADTAVYYCARLGRRYALDYWGQGTTVTVSSTRGGGSKVAALKEKVAALKEKVAALKEKVAALKE

SEQ ID NO: 12411 - protein, 300 aa, Artificial Sequence
  Synthetic Polypeptide
MALPVTALLLPLALLLHAARPDIQLTQSPSFLSASVGDRVTITCRASQGISTDLNWYQQKPGKAPKLLIYAASNLESGVPSRFSGSGSGTEFTLTISSLQPEDFATYYCQQSYNWPYTFGGGTKVEIKRGGGGSGGGGSGGGGSEVQLVESGGGLVKPGGSLRLSCAASGFTFSNFEMNWVRQAPGKGLEWVSGISSNGRYINYADSVKGRFTISRDNAKNSLYLQMNSLRAEDTAVYYCARVVDFDQDYNGFDYWGQGTLVTVSSTRGGGSKVAALKEKVAALKEKVAALKEKVAALKE

SEQ ID NO: 12412 - protein, 298 aa, Artificial Sequence
  Synthetic Polypeptide
MALPVTALLLPLALLLHAARPDIQLTQSPSFLSASVGDRVTITCSLSLGISTWRDWFPPRLGRGLEPLTYAASTLQSGVPSRFSGSGSGTEFTLTISSLQPEDFATYYCQQLNSYPLTFGGGTKVEIKRGGGGSGGGGSGGGGSEVQLVESGGGLVKPGGSLRLSCAASGFTFSTYGMSWVRQAPGKGLEWVAYINNGSGYIYYADSVKGRFTISRDNAKNSLYLQMNSLRAEDTAVYYCARGQWWSGGDFDYWGQGTLVTVSSTRGGGSKVAALKEKVAALKEKVAALKEKVAALKE

SEQ ID NO: 12413 - protein, 300 aa, Artificial Sequence
  Synthetic Polypeptide
MALPVTALLLPLALLLHAARPDIQMTQTTSSLSASLGDRVTISCRASQDISNYLNWYQQKPDGTVKLLIYYTSILHSGVPSRFSGSGSGTDYSLTISNLEQEDFATYFCQQGNTLPWTFGGGTKLEIKAGGGGSGGGGSGGGGSEVQLVESGGGLVKPGGSLKLSCAASGFAFSIYDMSWVRQTPEKRLEWVAYISSGGGTYYPDTVKGRFTISRDNAKNTLYLQMSSLKSEDTAMYYCARHSGYGTHWGVLFAYWGQGTLVTVSATRGGGSKVAALKEKVAALKEKVAALKEKVAALKE

SEQ ID NO: 12414 - protein, 310 aa, Artificial Sequence
  Synthetic Polypeptide
MALPVTALLLPLALLLHAARPDIVMTQSPDSLAVSLGERATINCKSSQSLLYRSNQKNYLAWYQQKPGQPPKLLIYWASTRESGVPDRFSGSGSGTDFTLTISSLQAEDVAVYYCQQYYNYPRTFGQGTKVEIKRTVGGGGSGGGGSGGGGSEVQLLESGGGLVQPGGSLRLSCAASGYSITSDYAWNWVRQAPGKGLEWVSYISNSGSTSYNPSLKSRFTISRDNSKNTLYLQMNSLRAEDTAVYYCAKERNYDYDDYYYAMDYWGQGTLVTVSSTRGGGSKVAALKEKVAALKEKVAALKEKVAALKE

SEQ ID NO: 12415 - protein, 303 aa, Artificial Sequence
  Synthetic Polypeptide
MALPVTALLLPLALLLHAARPDVVMTQSPLSLPVTLGQPASISCRSSQSLLHSSGNTYLEWYQQRPGQSPRPLIYKISTRFSGVPDRFSGSGSGTDFTLKISRVEAEDVGVYYCFQGSHVPYTFGGGTKVEIKRGGGGSGGGGSGGGGSQVQLVQSGAEVKKPGASVKVSCKASGLTIEDYYMHWVRQAPGQGLEWMGWIDPENGDTEYGPKFQGRVTMTRDTSINTAYMELSRLRSDDTAVYYCAVHNAHYGTWFAYWGQGTLVTVSSTRGGGSKVAALKEKVAALKEKVAALKEKVAALKE

SEQ ID NO: 12416 - protein, 295 aa, Artificial Sequence
  Synthetic Polypeptide
MALPVTALLLPLALLLHAARPDIQMTQSPSSLSASVGDRVTITCRASENIYSNLAWYQQKPGKAPKLLIYAATNLADGVPSRFSGSGSGTDFTLTISSLQPEDFATYYCQHFWGTPTFGQGTKVEIKRTVGGGGSGGGGSGGGGSEVQLVESGGGLVQPGGSLRLSCAASGFSLTNYGVHWVRQAPGKGLEWVSVIWSGGSTDYNAAFISRFTISADTSKNTAYLQMNSLRAEDTAVYYCARELIHAMDNWGQGTLVTVSSTRGGGSKVAALKEKVAALKEKVAALKEKVAALKE

SEQ ID NO: 12417 - protein, 302 aa, Artificial Sequence
  Synthetic Polypeptide
MALPVTALLLPLALLLHAARPDFVMTQSPLSLPVTPGEPASISCRSSQSIVHSNGNTYLEWYLQKPGQSPQLLIYKVSNRFSGVPDRFSGSGSGTDFTLKISRVEAEDVGVYYCFQGSHVPLTFGQGTKLEIKRGGGGSGGGGSGGGGSEVQLVESGAEVKKPGASVKVSCKASGYTFTSYWIHWVRQAPGQGLEWMGENDPSNGRTNYNEKFKNRVTLTVDTSISTAYMELSRLRSDDTAVYYCARGPNYFYSMDYWGQGTMVTVSSTRGGGSKVAALKEKVAALKEKVAALKEKVAALKE

SEQ ID NO: 12418 - protein, 295 aa, Artificial Sequence
  Synthetic Polypeptide
MALPVTALLLPLALLLHAARPDIQLTQSPSFLSASVGDRVTITCSARSSISFMYWYQQKPGKAPKLLIYDTSNLASGVPSRFSGSGSGTEFTLTISSLEAEDAATYYCQQWSSYPLTFGQGTKLEIKGGGGSGGGGSGGGGSQVQLVQSGAEVKKPGASVKVSCKASGYTFTGSWMNWVRQAPGQGLEWIGRIYPGDGETNYNGKFKDRVTITADKSTSTAYMELSSLRSEDTAVYYCARIYGNNVYFDVWGQGTTVTVSSTRGGGSKVAALKEKVAALKEKVAALKEKVAALKE

SEQ ID NO: 12419 - protein, 303 aa, Artificial Sequence
  Synthetic Polypeptide
MALPVTALLLPLALLLHAARPQLVLTQSPSASASLGSSVKLTCTLSSGHKTDTIDWYQQQPGKAPRYLMKLEGSGSYNKGSGVPDRFSGSSSGADWYLTISSLQSEDEADYYCGTDYPGNYLFGGGTQLTVLGGGGGSGGGGSGGGGSQEQLVESGGGLVQPGGSLRLSCAASGFTFSDYYMSWIRQAPGKGLEWVATIYPSSGKTYYADSAKGRLTISSDNAKDSLYLQMNSLRAEDTAVYYCTRDSYADDAALFDIWGQGTTVTVSSTRGGGSKVAALKEKVAALKEKVAALKEKVAALKE

SEQ ID NO: 12420 - protein, 298 aa, Artificial Sequence
  Synthetic Polypeptide
MALPVTALLLPLALLLHAARPDIVLTQSPPSLAMSLGKRATISCRASESVTILGSHLIHWYQQKPGQPPTLLIQLASNVQTGVPARFSGSGSRTDFTLTIDPVEEDDVAVYYCLQSRTIPRTFGGGTKLEIKGGGGSGGGGSGGGGSQIQLVQSGPELKKPGETVKISCKASGYTFTDYSINWVKRAPGKGLKWMGWINTETREPAYAYDFRGRFAFSLETSASTAYLQINNLKYEDTATYFCALDYSYAMDYWGQGTSVTVSSTRGGGSKVAALKEKVAALKEKVAALKEKVAALKE

SEQ ID NO: 12421 - protein, 302 aa, Artificial Sequence
  Synthetic Polypeptide
MALPVTALLLPLALLLHAARPQVQLQESGPGLVKPSQTLSLTCTVSGGSISSGGFYWSWIRQHPGKGLEWIGYIHHSGSTHYNPSLKSRVTISIDTSKNLFSLRLSSVTAADTAVYYCASLVYCGGDCYSGFDYWGQGTLVTVSSGGGGSGGGGSGGGGSDIQLTQSPSSLSASVGDRVSFTCQASQDINNFLNWYQQKPGKAPKLLIYDASNLETGVPSRFSGSGSGTDFTFTISSLQPEDIATYYCQQYGNLPFTFGGGTKVEIKRTRGGGSKVAALKEKVAALKEKVAALKEKVAALKE

SEQ ID NO: 12422 - protein, 300 aa, Artificial Sequence
  Synthetic Polypeptide
MALPVTALLLPLALLLHAARPQVQLQESGPGLVKPSETLSLTCTVSGGSISSYYWSWIRQPPGKGLEWIGYIYYSGSTNYNPSLKSRVTISVDTSKNQFSLKLSSVTAADTAVYYCVSLVYCGGDCYSGFDYWGQGTLVTVSSGGGGSGGGGSGGGGSDIQLTQSPSSLSASVGDRVSFTCQASQDINNFLNWYQQKPGKAPKLLIYDASNLETGVPSRFSGSGSGTDFTFTISSLQPEDIATYYCQQYGNLPFTFGGGTKVEIKRTRGGGSKVAALKEKVAALKEKVAALKEKVAALKE

SEQ ID NO: 12423 - protein, 305 aa, Artificial Sequence
  Synthetic Polypeptide
MALPVTALLLPLALLLHAARPQVTLKESGPVLVKPTETLTLTCTVSGFSLINARMGVSWIRQPPGKALEWLAHIFSNAEKSYRTSLKSRLTISKDTSKSQVVLTMTNMDPVDTATYYCARIPGYGGNGDYHYYGMDVWGQGTTVTVSSGGGGSGGGGSGGGGSDIQMTQSPSSLSASLGDRVTITCRASQGIRNDLGWYQQKPGKAPKRLIYASSTLQSGVPSRFSGSGSGTEFTLTISSLQPEDFATYYCLQHNNFPWTFGQGTKVEIKRTRGGGSKVAALKEKVAALKEKVAALKEKVAALKE

SEQ ID NO: 12424 - protein, 299 aa, Artificial Sequence
  Synthetic Polypeptide
MALPVTALLLPLALLLHAARPQIQLVESGGGVVQPGRSLRLSCVASGFTFKNYGMHWVRQAPGKGLEWVAVIWYDGSNEYYGDPVKGRFTISRDNSKNMLYLQMNSLRADDTAVYYCARSGIAVAGAFDYWGQGTLVTVSSGGGGSGGGGSGGGGSEIVLTQSPDTLSLSPGEKATLSCRASQSVSSSFLAWYQQKPGQAPSLLIYVASRRAAGIPDRFSGSGSGTDFTLTISRLEPEDFGMFYCQHYGRTPFTFGPGTKVDIKRTRGGGSKVAALKEKVAALKEKVAALKEKVAALKE

SEQ ID NO: 12425 - protein, 300 aa, Artificial Sequence
  Synthetic Polypeptide
MALPVTALLLPLALLLHAARPDIQLTQSPSFLSASVGDRVTITCRASQGISSYLAWYQQKPGKAPKLLIYAASTLQSGVPSRFSGSGSGTEFTLTISSLQPEDFATYYCQQVNSYPLTFGGGTKVEIKRGGGGSGGGGSGGGGSQLQLQESGPGLVKPSETLSLTCTVSGGSISSSTYYWGWIRQPPGKGLEWIGSIYFTGSTDYNPSLKSRVSISVDTSKNQFSLKLSSVTAADTAVYYCAKEDDSSGYYSFDYWGQGNLVTVSSTRGGGSKVAALKEKVAALKEKVAALKEKVAALKE

SEQ ID NO: 12426 - protein, 303 aa, Artificial Sequence
  Synthetic Polypeptide
MALPVTALLLPLALLLHAARPQSALTQPRSVSGSPGHSVTISCTGTSSDVGDYNYVSWYQQRPGKVPKLLIYDVSKRPSGVPDRFSGSKSGNTASLTISGLQAEDEAIYFCASYAGNYNVVFGGGTKLTVLGQGGGGSGGGGSGGGGSQVQLVQSGSELKKPGASVKVSCKASGYTFNTYAMNWVRQAPGQGLEWMGWINTNTGNPTYAQGFTGRFVFSLDTSVSTAYLQISSLKAEDTAVYYCARRYFDWLLGAFDIWGQGTMVTVSSTRGGGSKVAALKEKVAALKEKVAALKEKVAALKE

SEQ ID NO: 12427 - protein, 295 aa, Artificial Sequence
  Synthetic Polypeptide
MALPVTALLLPLALLLHAARPDIQMTQSPSSLSASVGDRVTITCSASQGINNYLNWYQQKPGKAPKLLIHYTSGLHAGVPSRFSGSGSGTDYTLTISSLQPEDVATYYCQQYSILPWTFGGGTKVEIKRGGGGSGGGGSGGGGSQVQLVQSGAEVKKPGSSVKVSCKASGYAFSSSWMNWVRQAPGQGLEWMGRIYPGDGNTHYAQKFQGRVTLTADKSTSTAYMELSSLRSEDTAVYYCGEGYLDPMDYWGQGTLVTVSSTRGGGSKVAALKEKVAALKEKVAALKEKVAALKE

SEQ ID NO: 12428 - protein, 298 aa, Artificial Sequence
  Synthetic Polypeptide
MALPVTALLLPLALLLHAARPEVQLVESGGGLVQPGGSLRLSCAASGYTFTTYWMHWVRQAPGKGLEWVGYIRPSTGYTEYNQKFKDRFTISADTSKNTAYLQMNSLRAEDTAVYYCARSRWLLDYWGQGTLVTVSGGGGSGGGGSGGGGSDIQMTQSPSSLSASVGDRVTITCKSSQSVLYSSNQKNYLAWFQQKPGKAPKLLIYWASTRESGVPSRFSGSGSGTDFTLTISSLQPEDFATYFCHQYLSSYTFGQGTKVEIKRTRGGGSKVAALKEKVAALKEKVAALKEKVAALKE

SEQ ID NO: 12429 - protein, 295 aa, Artificial Sequence
  Synthetic Polypeptide
MALPVTALLLPLALLLHAARPDIQMTQSPSSLSASVGDRVTITCRASQDISNYLNWYQQKPGKAPKLLIYYTSRLHSGVPSRFSGSGSGTDFTLTISSLQPEDFATYYCQQGNTLPYTFGQGTKVEIKRGGGGSGGGGSGGGGSEVQLVESGGGLVQPGGSLRLSCAASGFTFSDYFMSWVRQAPGKGLEWVATISNGGTYTYYPDSVKGRFTISRDNSKNTLYLQMNSLRAEDTAVYYCARFDGYIFDYWGQGTLVTVSSTRGGGSKVAALKEKVAALKEKVAALKEKVAALKE

SEQ ID NO: 12430 - protein, 302 aa, Artificial Sequence
  Synthetic Polypeptide
MALPVTALLLPLALLLHAARPDIQMTQSPSSLSASVGDRVTITCTASSRVSSSYLHWFQQKPGKAPKLLIYSTSNLASGVPSRFSGSGSGTDFTLTISSLQPEDFATYYCHQYHRSPYTFGQGTKVEIKRGGGGSGGGGSGGGGSEVQLVESGGGLVQPGGSLRLSCAASGYAFSNSWINWVRQAPGKGLEWVGQIYPGDYDTNYNGKFKGRFTISRDKSKNTAYLQMNSLRAEDTAVYYCARGGSIYYGNLGFFDVWGQGTLVTVSSTRGGGSKVAALKEKVAALKEKVAALKEKVAALKE

SEQ ID NO: 12431 - protein, 292 aa, Artificial Sequence
  Synthetic Polypeptide
MALPVTALLLPLALLLHAARPDIQMTQSPSSLSASVGDRVTITCSASSSVTYMYWYQQKPGKAPKLLIYDTSNLASGVPSRFSGSGSGTDYTLTISSLQPEDFATYYCQQWSNYPLTFGQGTKVEIKGGGGSGGGGSGGGGSQVQLVQSGAEVKKPGASVKVSCKASGYSFIEYTINWVRQAPGQGLEWIGNIDPYYGTTYYNQMFTGRATLTVDTSISTAYMELSRLRSDDTAVYYCARGSAWFPYWGQGTLVTVSSTRGGGSKVAALKEKVAALKEKVAALKEKVAALKE

SEQ ID NO: 12432 - protein, 292 aa, Artificial Sequence
  Synthetic Polypeptide
MALPVTALLLPLALLLHAARPEIVLTQSPSSLSASVGDRVTITCRASENIYSYLAWYQQKPGKAPKLLIYNTKTLGEGVPSRFSGSGSGTDFTLTISSLQPEDFATYYCQHHYGTPFTFGPGTKVDIKGGGGSGGGGSGGGGSQVQLVQSGAEVKKPGASVKVSCKASGYTFSDYWVHWVRQAPGQGLEWMGAIDGSDTFNDYSQKFKGRVTMTRDTSISTAYMELSRLRSDDTAVYYCARGGLLQYWGQGTLVTVSSTRGGGSKVAALKEKVAALKEKVAALKEKVAALKE

SEQ ID NO: 12433 - protein, 296 aa, Artificial Sequence
  Synthetic Polypeptide
MALPVTALLLPLALLLHAARPQVQLQQSGPELVKPGASVKISCKASGYAFSSSWMNWVKQRPGKGLEWIGRIYPGDEDTNYSGKFKDKATLTADKSSTTAYMQLSSLTSEDSAVYFCARSLLYGDYLDYWGQGTTLTVSSGGGGSGGGGSGGGGSQIVLTQSPAIMSASPGEKVTMTCSASSSVSYMHWYQQKSGTSPKRWIYDTSKLASGVPDRFSGSGSGTSYFLTINNMEAEDAATYYCQQWNINPLTFGAGTKLELKRTRGGGSKVAALKEKVAALKEKVAALKEKVAALKE

SEQ ID NO: 12434 - protein, 299 aa, Artificial Sequence
  Synthetic Polypeptide
MALPVTALLLPLALLLHAARPDIQMTQSSAYLSVSLGGRVTITCKASDHINNWLAWYQHKPGNAPRLLISGATTLETGVPSRFSGSGSGKDYTLSITSLQTEDVATYYCQQSWNTPWTFGGGTKLEIKRGGGGSGGGGSGGGGSQVQLQQSGAELVRPGSSVKISCKASGYAFSSYWVNWMKQRPGQGLEWIGQIYPGDGDTNYNGKFKGRATVTADKSSSTSYMQFSSLTSEDSAVYFCARSITTVVGCAMDYWGQGTSVTVSSTRGGGSKVAALKEKVAALKEKVAALKEKVAALKE

SEQ ID NO: 12435 - protein, 298 aa, Artificial Sequence
  Synthetic Polypeptide
MALPVTALLLPLALLLHAARPEVQLLESGGGLVQPGGSLRLSCAASGFTFSSYAMSWVRQAPGKGLEWVSVISGSGGRPNYADSVKGRFTISRDNSKNTLYLQMNSLRDEDTAVYYCAKVDYSNYLFFDYWGQGTLVTVSSGGGGSGGGGSGGGGSEIVLTQSPGTLSLSPGEGATLSCRAGQSVRSSYLGWYQQKPGQAPRLLIYGASSRATGIPDRFSGSGSGTDFTLTISRLEPEDFAVYYCQQYGYSPPTFGGGTKLEIKTRGGGSKVAALKEKVAALKEKVAALKEKVAALKE

SEQ ID NO: 12436 - protein, 301 aa, Artificial Sequence
  Synthetic Polypeptide
MALPVTALLLPLALLLHAARPDIVLTQSPPSLAMSLGKRATISCRASESVTILGSHLIHWYQQKPGQPPTLLIQLASNVQTGVPARFSGSGSRTDFTLTIDPVEEDDVAVYYCLQSRTIPRTFGGGTKLEIKGSTSGSGKPGSGEGSTKGQIQLVQSGPELKKPGETVKISCKASGYTFTDYSINWVKRAPGKGLKWMGWINTETREPAYAYDFRGRFAFSLETSASTAYLQINNLKYEDTATYFCALDYSYAMDYWGQGTSVTVSSTRGGGSKVAALKEKVAALKEKVAALKEKVAALKE

SEQ ID NO: 12437 - protein, 301 aa, Artificial Sequence
  Synthetic Polypeptide
MALPVTALLLPLALLLHAARPDIQMTQSPSSLSASVGDRVTITCRASSSVSYMHWYQQKPGKAPKLLIYATSNLASGVPSRFSGSGSGTDFTLTISSLQPEDFATYYCQQWTFNPPTFGQGTKLEIKRTVAAGGGGSGGGGSGGGGSQVQLVQSGAEVKKPGASVKVSCKASGYTFTSYNMHWVRQAPGQRLEWMGGIYPGNGDTSYNQKFKGRVTITRDTSASTAYMELSSLRSEDTAVYYCARYDYNYAMDYWGQGTLVTVSSASTRGGGSKVAALKEKVAALKEKVAALKEKVAALKE

SEQ ID NO: 12438 - protein, 296 aa, Artificial Sequence
  Synthetic Polypeptide
MALPVTALLLPLALLLHAARPEIVLTQSPGTLSLSPGERATLSCRASQSVSSSYLAWYQQKPGQAPRLLIYGASSRATGIPDRFSGSGSGTDFTLTISRLEPEDFAVYYCQQYHHSPLTFGGGTKVEIKRGGGGSGGGGSGGGGSEVQLVESGGGLVQPGGSLRLSCAASGFTFSGRSMNWVRQAPGKGLEWVSYISSDSRTIYYADSVKGRFTISRDNAKNSLYLQMNSLRAEDTAVYYCARGGHGYFDLWGRGTLVTVSSTRGGGSKVAALKEKVAALKEKVAALKEKVAALKE

SEQ ID NO: 12439 - protein, 299 aa, Artificial Sequence
  Synthetic Polypeptide
MALPVTALLLPLALLLHAARPEIVLTQSPGTLSLSPGERATLSCRASQSVSSDYLAWYQQKPGQAPRLLIYGASRRATGIPDRFSGSGSGTDFTLTISRLEPEDFAVYYCQQYVSYWTFGGGTKVEIKRGGGGSGGGGSGGGGSQVQLVESGGGVVQPGRSLRLSCAASGFTFSSYGMHWVRQAPGKGLEWVAGIWWDGSNEKYADSVKGRFTISRDNSKNTLYLQMNSLRAEDTAVYYCAKEAPYYAKDYMDVWGKGTTVTVSSTRGGGSKVAALKEKVAALKEKVAALKEKVAALKE

SEQ ID NO: 12440 - protein, 299 aa, Artificial Sequence
  Synthetic Polypeptide
MALPVTALLLPLALLLHAARPDIQMTQSPSSLSASVGDRVTITCRASQDVNTAVAWYQQKPGKAPKLLIYSASFLYSGVPSRFSGSRSGTDFTLTISSLQPEDFATYYCQQHYTTPPTFGQGTKVEIKRTGGGGSGGGGSGGGGSEVQLVESGGGLVQPGGSLRLSCAASGFNIKDTYIHWVRQAPGKGLEWVARIYPTNGYTRYADSVKGRFTISADTSKNTAYLQMNSLRAEDTAVYYCSRWGGWGFYAMDYWGQGTLVTVSSTRGGGSKVAALKEKVAALKEKVAALKEKVAALKE

SEQ ID NO: 12441 - protein, 294 aa, Artificial Sequence
  Synthetic Polypeptide
MALPVTALLLPLALLLHAARPQVQLVESGGGLVKPGGSLRLSCAASGFTFSDYYMTWIRQAPGKGLEWISYISSSGSTIYYADSVKGRFTISRDNAKNSLYLQMNSLRAEDTAVYYCARDRNSHFDYWGQGTLVTVSSGGGGSGGGGSGGGGSDIQMTQSPSSVSASVGDRVTITCRASQGITRWLAWYQQKPGKAPKLLIYAASVLQSGVPSRFSGSGSGTDFTLTISSLQPEDFATYYCQQSNSFPRTFGQGTKVEIKTRGGGSKVAALKEKVAALKEKVAALKEKVAALKE

SEQ ID NO: 12442 - protein, 294 aa, Artificial Sequence
  Synthetic Polypeptide
MALPVTALLLPLALLLHAARPQVQLVESGGGLVKPGGSLRLSCAASGFTFSDHYMSWIRQAPGKGLEWFSYISSSGGIIYYADSVKGRFTISRDNAKNSLYLQMNSLRAEDTAVYYCARDVGSHFDYWGQGTLVTVSSGGGGSGGGGSGGGGSDIQMTQSPSSVSASVGDRVTITCRASQDISRWLAWYQQKPGKAPKLLISAASRLQSGVPSRFSGSGSGTDFTLTISSLQPEDFAIYYCQQAKSFPRTFGQGTKVEIKTRGGGSKVAALKEKVAALKEKVAALKEKVAALKE

SEQ ID NO: 12443 - protein, 306 aa, Artificial Sequence
  Synthetic Polypeptide
MALPVTALLLPLALLLHAARPQVQLVESGGGVVQSGRSLRLSCAASGFTFRNYGMHWVRQAPGKGLEWVAVIWYDGSDKYYADSVRGRFTISRDNSKNTLYLQMNSLRAEDTAVYYCARDGYDILTGNPRDFDYWGQGTLVTVSSGGGGSGGGGSGGGGSDTVMTQTPLSSHVTLGQPASISCRSSQSLVHSDGNTYLSWLQQRPGQPPRLLIYRISRRFSGVPDRFSGSGAGTDFTLEISRVEAEDVGVYYCMQSTHVPRTFGQGTKVEIKTRGGGSKVAALKEKVAALKEKVAALKEKVAALKE

SEQ ID NO: 12444 - protein, 299 aa, Artificial Sequence
  Synthetic Polypeptide
MALPVTALLLPLALLLHAARPEVQLVESGGGLVQPGGSLRLSCAASGFPFSSYDMHWVRQATGKGLEWVSAIGTAGATYYPGSVKGRFTISRENAKNSLYLQMNSLRAGDTAVYYCARGDYVWGTYRPLFDYWGQGTLVTVSSGGGGSGGGGSGGGGSDIQLTQSPSFLSASVGDRVTITCWASQGINNYLAWYQQKPGKAPKLLIYAASTLQTGVPSRFSGSGSGTEFTLTISSLQPEDFATYYCQQLNSYPLTFGGGTKVEIKTRGGGSKVAALKEKVAALKEKVAALKEKVAALKE

SEQ ID NO: 12445 - protein, 296 aa, Artificial Sequence
  Synthetic Polypeptide
MALPVTALLLPLALLLHAARPQVQLQESGPGLVKPSETLSLTCTVSGASISSFYWSWIRQPPGKGLEWIGYIYYSGTTNYNPSLKSRVTISVDTSKNQFSLKLSSVTAADTAVYYCARIAVAGFFFDYWGQGTLVTVSSGGGGSGGGGSGGGGSEIVLTQSPGTLSLSPGERATLSCRASQSVNKNYLAWYQQKPGQAPRLLIYGASSRATGIPDRFSGSGSGTDFTLTISRLEPEDFAVYYCQQYDRSPLTFGGGTKVEIKTRGGGSKVAALKEKVAALKEKVAALKEKVAALKE

SEQ ID NO: 12446 - protein, 305 aa, Artificial Sequence
  Synthetic Polypeptide
MALPVTALLLPLALLLHAARPQVQLVQSGAEVKKPGASVKVSCKASGYTFTNYYMHWVRQAPGLGLEWMGIINPSDGSTSYAQKFQGRVTMTRDTSTNTVYMDLSSLRSEDTAVYYCARGGNSAFYSYYDMDVWGQGTTVTVSSGGGGSGGGGSGGGGSDVVMTQTPLSLPVTLGQPASISCRSSQSLVYRDGNTYLSWFQQRPGQSPRRLIYKVSNWQSGVPDRFSGGGSGTDFTLKISRVEAEDVGVYYCMQGTHWPPTFGQGTKVEIKTRGGGSKVAALKEKVAALKEKVAALKEKVAALKE

SEQ ID NO: 12447 - protein, 292 aa, Artificial Sequence
  Synthetic Polypeptide
MALPVTALLLPLALLLHAARPQVQLQQSGPELVKPGASVRISCKASGYTFTTYYIHWVKQRPGQGLEWIGWIYPGNVNTNYNEKFKGKATLTADKSSSTAYMQLTSLTSEDSAVYFCARGVYYFDYWGQGTILTVSSGGGGSGGGGSGGGGSIVMTQTPKFLLVSAGDRVTITCKASQSVNNDVSWFQQKPGQSPTLLIYYASNRYTGVPDRFTGSGYGTDFTFTISTVQAEDLAVYFCQQDYSSPYTFGGGTKLEIKTRGGGSKVAALKEKVAALKEKVAALKEKVAALKE

SEQ ID NO: 12448 - protein, 295 aa, Artificial Sequence
  Synthetic Polypeptide
MALPVTALLLPLALLLHAARPQVQLQESGPGLVKPSQTLSLTCTVSGGSINNNNYYWTWIRQHPGKGLEWIGYIYYSGSTFYNPSLKSRVTISVDTSKTQFSLKLSSVTAADTAVYYCAREDTMTGLDVWGQGTTVTVSSGGGGSGGGGSGGGGSDIQMTQSPSSLSASVGDRVTITCRASQSINNYLNWYQQKPGKAPTLLIYAASSLQSGVPSRFSGSRSGTDFTLTISSLQPEDFAAYFCQQTYSNPTFGQGTKVEVKTRGGGSKVAALKEKVAALKEKVAALKEKVAALKE

SEQ ID NO: 12449 - protein, 300 aa, Artificial Sequence
  Synthetic Polypeptide
MALPVTALLLPLALLLHAARPSYELTQPPSVSVSPGQTASITCSGDKLGDKYASWYQQKPGQSPVLVIYQDNRRPSGIPERFSGSNSGNTATLTISGTQAMDEADYYCQAWDSDTYVFGTGTKVTVLGQGGGGSGGGGSGGGGSEVQLVQSGAEVKKPGASVKVSCKASGDTFKRYYVHWVRQAPGQGLEWMGIINPSGVSTTYAQKFQGRVTMTRDTSTSTVYMELSSLRSEDTAVYYCAEVRGSGFNYFGMDVWGQGTLVTVSSTRGGGSKVAALKEKVAALKEKVAALKEKVAALKE

SEQ ID NO: 12450 - protein, 299 aa, Artificial Sequence
  Synthetic Polypeptide
MALPVTALLLPLALLLHAARPEVQLLESGGGLVQPGGSLRLSCAASGFTFSSYAMSWVRQAPGKGLEVVVSAISGGGGRTYYADSVKGRFTISRDNSKNTLYLQMNSLRAEDTAVYYCAREEMAFRAYRFDIWGQGTLVTVSSGGGGSGGGGSGGGGSDIQMTQSPSSLSASVGDRVTITCRASQSISSYLNWYQQKPGKAPKLLIYAASSLQSGVPSRFSGSGSGTDFTLTISSLQPEDFATYYCQQSYITPLTFGGGTKVEIKTRGGGSKVAALKEKVAALKEKVAALKEKVAALKE

SEQ ID NO: 12451 - protein, 307 aa, Artificial Sequence
  Synthetic Polypeptide
MALPVTALLLPLALLLHAARPDIVLTQSPASLAVSLGQGATISCRASKSVSTSGYTYMHWYQQKPGQPPKLLIYLASNLESGVPARFSGSGSGTDFTLNIHPVEEEDAATYYCQHSGELPPSFGGGTKLEIKRAGGGGSGGGGSGGGGSEVQLVESGGDLVKPGGSLKLSCAVSGFTFSSYGMSWVRQTPDKRLEWVATVSSGGTYTYYPDSVKGRFTISRDNAKNTLYLQMSSLKSEDSAMYYCARHRGNYYATYYYAMDYWGQGTSVTVSSTRGGGSKVAALKEKVAALKEKVAALKEKVAALKE

SEQ ID NO: 12452 - protein, 301 aa, Artificial Sequence
  Synthetic Polypeptide
MALPVTALLLPLALLLHAARPDIQMTQSPSSLSASVGDRVTITCSASQGIRNYLNWYQQKPGKVPKLLIYYTSRLHSGVPSRFSGSGSGTDFTLTISSLQPEDVATYYCQQYGKLPYTFGQGTKLEIKRTVAAGGGGSGGGGSGGGGSEVQLVESGGGLVQPGGSLRLSCAASGFTFSDAWMDWVRQAPGKGLEWVGEIRSKVNNHETYYAESVKGRFTISRDDSKNSLYLQMNSLKTEDTAVYYCARNDYFDYWGQGTTVTVSSASTRGGGSKVAALKEKVAALKEKVAALKEKVAALKE

SEQ ID NO: 12453 - protein, 309 aa, Artificial Sequence
  Synthetic Polypeptide
MALPVTALLLPLALLLHAARPEVQLQESGAEVKKPGSSVKVSCKASGFNIKDTYMHWVRQAPGQGLEWMGRIDPANGNSKYVPKFQGRVTITADESTSTAYMELSSLRSEDTAVYYCAPFGYYVSDYAMAYWGQGTTVTVSSASGGGGSGGGGSGGGGSDIVMTQSPDSLAVSLGERATINCRAGESVDIFGVGFLHWYQQKPGQPPKLLIYRASNLESGVPDRFSGSGSGTDFTLTIRPLQAEDVAVYYCQQTNEDPYTFGQGTKLEIKRTVAATRGGGSKVAALKEKVAALKEKVAALKEKVAALKE

SEQ ID NO: 12454 - protein, 302 aa, Artificial Sequence
  Synthetic Polypeptide
MALPVTALLLPLALLLHAARPQVQLVQSGAEVKKPGSSVKVSCKASGGTFSSYAISWVRQAPGQGLEWMGLIIPRYGKARYAQKFQGRVTITADESTSTAYMELSSLRSEDTAVYYCARNWPYYYMDFWGQGTLVTVSSASGGGGSGGGGSGGGGSDIVLTQSPATLSLSPGERATLSCRASQNIVFNLAWYQQKPGQAPRLLIYDASNRATGVPARFSGSGSGTDFTLTISSLEPEDFAVYYCQQKKSMPLTFGQGTKVEIKRTVAATRGGGSKVAALKEKVAALKEKVAALKEKVAALKE

SEQ ID NO: 12455 - protein, 305 aa, Artificial Sequence
  Synthetic Polypeptide
MALPVTALLLPLALLLHAARPEVQLVESGGGLVKPGGSLRLSCAASGFTFSNAWMSWVRQAPGKGLEWVGRIKSKTEGGTTDYAAPVKGRFTISRDDSKNTLYLQMNSLKTEDTAVYYCTTPYEWSWYDYWGQGTLVTVSSASGGGGSGGGGSGGGGSQTVVTQEPSLTVSPGGTVTLTCGSSTGAVTTSNYANWVQQKPGQAPRGLIGGTNKRAPGTPARFSGSLLGGKAALTLSGVQPEDEAEYYCALWYSNLWVFGGGTKLTVLTVAATRGGGSKVAALKEKVAALKEKVAALKEKVAALKE

SEQ ID NO: 12456 - protein, 305 aa, Artificial Sequence
  Synthetic Polypeptide
MALPVTALLLPLALLLHAARPQVQLVQSGAEVKKPGASVKVSCKASGYTFTSYYMHWVRQAPGQGLEWMGIINPSGGSTSYAQKFQGRVTMTHDTSTSTVYMELSSLRSEDTAVYYCARSFFTGFHLDYWGQGTLVTVSSASGGGGSGGGGSGGGGSEIVLTQSPGTLSLSPGERATLSCRASQSVSSSYLAWYQQKPGQAPRLLIYGASSRATGIPDRFSGSGSGTDFTLTISRLEPEDFAVYYCQQYTNEHYYTFGQGTKVEIKRTVAATRGGGSKVAALKEKVAALKEKVAALKEKVAALKE

SEQ ID NO: 12457 - protein, 311 aa, Artificial Sequence
  Synthetic Polypeptide
MALPVTALLLPLALLLHAARPEIVLTQSPATLSLSPGERATLSCSVSSSISSSNLHWYQQKPGQAPRLLIYGTSNLASGIPARFSGSGSGTDFTLTISSLEPEDFAVYYCQQWSSYPHTFGGGTKVEIKRTVAAGGGGSGGGGSGGGGSQVQLVQSGAEVKKPGASVKVSCKASGYTFTNYLIEWVRQAPGQGLEWMGLINPGSGGTNYNEKFKGRVTMTTDTSTSTAYMELRSLRSDDTAVYYCARRSPLGSWIYYAYDGVAYWGQGTLVTVSSASTRGGGSKVAALKEKVAALKEKVAALKEKVAALKE

SEQ ID NO: 12458 - protein, 296 aa, Artificial Sequence
  Synthetic Polypeptide
MALPVTALLLPLALLLHAARPDIQMTQSPSSLSASVGDRVTITCKAGQNVGTSVAWYQQKPGKAPKLLIYSASYRYSGVPSRFSGSGSGTDFTLTISSLQPEDFATYYCQQYITYPYTFGQGTKVEIKRTVAAGGGGSGGGGSGGGGSEVQLVESGGGLVQPGGSLRLSCAASGFTFSRYWMSWVRQAPGKGLEWVAEINPDSSTIQYTPSLKARFTLSVDRSKNTLYLQMNSLRAEDTAVYYCARPAYWGQGTLVTVSSASTRGGGSKVAALKEKVAALKEKVAALKEKVAALKE

SEQ ID NO: 12459 - protein, 303 aa, Artificial Sequence
  Synthetic Polypeptide
MALPVTALLLPLALLLHAARPDIQMTQSPSSLSASVGDRVTITCSASQDIGNFLNWYQQKPGKAPKLLIYYTSSLYSGVPSRFSGSGSGTDFTLTISSLQPEDFATYYCQQYSKLPLTFGQGTKLEIKRTVAAGGGGSGGGGSGGGGSQVQLVQSGAEVKKPGASVKVSCKASGYTFTGYNIHWVRQAPGQRLEWMGAIYPGNGDTSYKQKFRGRVTITRDTSASTAYMELSSLRSEDTAVYYCARGETARATFAYWGQGTLVTVSSASTRGGGSKVAALKEKVAALKEKVAALKEKVAALKE

SEQ ID NO: 12460 - protein, 167 aa, Artificial Sequence
  Synthetic Polypeptide
MALPVTALLLPLALLLHAARPDVQVTQSPSSLSASVGDRVTITCRSSQSLANSYGNTFLSWYLHKPGKAPQLLIYGISNRFSGVPDRFSGSGSGTDFTLTISSLQPEDFATYYCLQGTHQPYTFGQGTKVEIKTRGGGSKVAALKEKVAALKEKVAALKEKVAALKE

SEQ ID NO: 12461 - protein, 162 aa, Artificial Sequence
  Synthetic Polypeptide
MALPVTALLLPLALLLHAARPDIQMTQSPSSLSASVGDRVTITCRASQDISNYLNWYQQKPGKAVKLLIYYTSILHSGVPSRFSGSGSGTDYTLTISSLQPEDFATYFCQQGNTLPWTFGGGTKVEIKTRGGGSKVAALKEKVAALKEKVAALKEKVAALKE

SEQ ID NO: 12462 - protein, 163 aa, Artificial Sequence
  Synthetic Polypeptide
MALPVTALLLPLALLLHAARPDIVMTQSQRFMTTSVGDRVSVTCKASQSVDSNVAWYQQKPRQSPKALIFSASLRFSGVPARFTGSGSGTDFTLTISNLQSEDLAEYFCQQYNNYPLTFGAGTKLELKRTRGGGSKVAALKEKVAALKEKVAALKEKVAALKE

SEQ ID NO: 12463 - protein, 163 aa, Artificial Sequence
  Synthetic Polypeptide
MALPVTALLLPLALLLHAARPDIQMTQSPSSLSASVGDRVTITCRASQDISNYLNWYQQKPGKAPKLLIYYTSILHSGVPSRFSGSGSGTDFTLTISSLQPEDFATYYCQQGNTLPWTFGQGTKVEIKRTRGGGSKVAALKEKVAALKEKVAALKEKVAALKE

SEQ ID NO: 12464 - protein, 163 aa, Artificial Sequence
  Synthetic Polypeptide
MALPVTALLLPLALLLHAARPDIQMTQSPSSLSASVGDRVTITCKASDHINNWLAWYQQKPGKAPKLLIYGATTLETGVPSRFSGSGSGTDFTLTISSLQPEDFATYYCQQSWNTPWTFGQGTKVEIKRTRGGGSKVAALKEKVAALKEKVAALKEKVAALKE

SEQ ID NO: 12465 - protein, 163 aa, Artificial Sequence
  Synthetic Polypeptide
MALPVTALLLPLALLLHAARPSYVLTQPPSVSVAPGQTARITCGGNNIGSKSVHWYQQPPGQAPVVVVYDDSDRPSGIPERFSGSNSGNTATLTISRVEAGDEAVYYCQVWDSSSDHVVFGGGTKLTVLTRGGGSKVAALKEKVAALKEKVAALKEKVAALKE

SEQ ID NO: 12466 - protein, 163 aa, Artificial Sequence
  Synthetic Polypeptide
MALPVTALLLPLALLLHAARPDIQMTQSPSSLSASVGDRVTITCMASEDIYIRLAWYQQKPGKAPKLLIYAATSLETGVPSRFSGSGSGTDFTLTISSLQPEDFATYYCQQYWSSPWTFGQGTKVEIKRTRGGGSKVAALKEKVAALKEKVAALKEKVAALKE

SEQ ID NO: 12467 - protein, 167 aa, Artificial Sequence
  Synthetic Polypeptide
MALPVTALLLPLALLLHAARPDIQMTQSPSSVSASVGDRVTITCRASESVDNYGISFMNWYQQKPGKAPKLLISAASNRATGVPSRFSGSGSGTDFTLTISSLQPEDFAIYYCQQSKEVPWTFGQGTKVEIKRTRGGGSKVAALKEKVAALKEKVAALKEKVAALKE

SEQ ID NO: 12468 - protein, 167 aa, Artificial Sequence
  Synthetic Polypeptide
MALPVTALLLPLALLLHAARPDIQLTQSPSSLSASVGDRVTITCRASKSVSTSGYSYMHWYQQKPGKAPKLLIYLVSNLESGVPSRFSGSGSGTDFTLTISSLQPEDFATYYCQQFSELPWTFGQGTKVEIKRTRGGGSKVAALKEKVAALKEKVAALKEKVAALKE

SEQ ID NO: 12469 - protein, 164 aa, Artificial Sequence
  Synthetic Polypeptide
MALPVTALLLPLALLLHAARPDIQMTQSPSSVSASVGDRVTITCRASQFISSSYLSWYQQKPGKAPKLLISGSSSRATGVPSRFSGSGSGTDFTLTISSLQPEDFAIYYCQQLYSSPMTFGQGTKVEIKRTRGGGSKVAALKEKVAALKEKVAALKEKVAALKE

SEQ ID NO: 12470 - protein, 178 aa, Artificial Sequence
  Synthetic Polypeptide
MALPVTALLLPLALLLHAARPQVQLVESGGGLVQAGDSVTLSCTASGRTFSSYALAWFRQRPGKEREFVAGLRWGGPTNYADSVKDRFTISGDSAKHTMYLQMNSLKPEDTAVYYCGYNPGGWAVPSQYEYDSWGQGTQVTVSSTRGGGSKVAALKEKVAALKEKVAALKEKVAALKE

SEQ ID NO: 12471 - protein, 173 aa, Artificial Sequence
  Synthetic Polypeptide
MALPVTALLLPLALLLHAARPQVQLQESGGGLAQAGGSLRLSCAASGRTFSMGWFRQAPGKEREFVAAITYSGGSPYYASSVRGRFTISRDNAKNTVYLQMNSLKPEDTAVYYCAANPTYGSDWNAENWGQGTQVTVSSTRGGGSKVAALKEKVAALKEKVAALKEKVAALKE

SEQ ID NO: 12472 - protein, 171 aa, Artificial Sequence
  Synthetic Polypeptide
MALPVTALLLPLALLLHAARPEVQLVESGGGLVQPGGSLRLSCAASGFSFSDFWMSWVRQAPGKGLEWVATISQAGSEKDYVDSVKGRFTISRDNAKKSLYLQMNSLRAEDTAVYYCASGVYSFDYRGQGTLVTVSSTRGGGSKVAALKEKVAALKEKVAALKEKVAALKE

SEQ ID NO: 12473 - protein, 171 aa, Artificial Sequence
  Synthetic Polypeptide
MALPVTALLLPLALLLHAARPEVQLVESGGGLVQPGGSLRLSCAASGFTFSNYWMSWVRQAPGKGQEWVATINQDGSDKDYVDSVKGRFTISRDNAKKSLYLQMNSLRAEDTAVYYCASGVYSFDYRGQGTLVTVSSTRGGGSKVAALKEKVAALKEKVAALKEKVAALKE

SEQ ID NO: 12474 - protein, 171 aa, Artificial Sequence
  Synthetic Polypeptide
MALPVTALLLPLALLLHAARPEVQLVESGGGLVQPGGSLRLSCAASGIDFSRYWMSWVRQAPGKGLEWVATISQAGSEKDYVDSVKGRFTISRDNAKKSLYLQMNSLRAEDTAVYYCASGVYSFDYRGQGTLVTVSSTRGGGSKVAALKEKVAALKEKVAALKEKVAALKE

SEQ ID NO: 12475 - protein, 171 aa, Artificial Sequence
  Synthetic Polypeptide
MALPVTALLLPLALLLHAARPEVQLVESGGGLVQPGGSLRLSCAASGIDFSRYWMSWVRQAPGKGQEWVATINQDGSDKDYVDSVKGRFTISRDNAKKSLYLQMNSLRAEDTAVYYCASGVYSFDYRGQGTLVTVSSTRGGGSKVAALKEKVAALKEKVAALKEKVAALKE

SEQ ID NO: 12476 - protein, 175 aa, Artificial Sequence
  Synthetic Polypeptide
MALPVTALLLPLALLLHAARPEVQLVESGGGLVQPGGSLRLSCTFSGGTFSSYTMGWFRQAPGKEREFVAEVRWGGVTTYSNSLKDRFSISEDSVKNAVYLQMNSLKPEDTAVYYCAAVRQMYMTVVPDYWGQGTLVTVSSTRGGGSKVAALKEKVAALKEKVAALKEKVAALKE

SEQ ID NO: 12477 - protein, 173 aa, Artificial Sequence
  Synthetic Polypeptide
MALPVTALLLPLALLLHAARPEVQLVESGGGLVQAGGSLRLSCAASGRTFSMGWFRQAPGKEREFVAAITYSGGSPYYADSVKGRFTISRDNAKNTVYLQMNSLKPEDTAVYYCAANPTYGSDWNAENWGQGTQVTVSSTRGGGSKVAALKEKVAALKEKVAALKEKVAALKE

SEQ ID NO: 12478 - protein, 173 aa, Artificial Sequence
  Synthetic Polypeptide
MALPVTALLLPLALLLHAARPQLQLQESGPGLVKPSETLSLTCTVSGGSISSGDYYWGWIRQPPGKGLEWIGHIYYSGATYYNPSLKSRVTISVDTSRNQFSLKLSSVTAADTAVYYCTRDDSSNWRSRGQGTLVTVSSTRGGGSKVAALKEKVAALKEKVAALKEKVAALKE

SEQ ID NO: 12479 - protein, 173 aa, Artificial Sequence
  Synthetic Polypeptide
MALPVTALLLPLALLLHAARPQLQLQESGPGLVKPSETLSLTCTVSGDSISSGDYYWGWIRQPPGKGLEWIGHIYYSGVTYYNPSLKSRVTISVDTSRNQFSLKLSSVTAADTAVYYCTREDSSNWRSRGQGTLVTVSSTRGGGSKVAALKEKVAALKEKVAALKEKVAALKE

SEQ ID NO: 12480 - protein, 173 aa, Artificial Sequence
  Synthetic Polypeptide
MALPVTALLLPLALLLHAARPQLQLQESGPGLVKPSETLSLTCTVSGGSISSGDYYWGWIRQPPGKGLEWIGSISYSGSTYYNPSLKSRVTISVDTSRNQFSLKLSSVTAADTAVYYCTREDSSNWRSRGQGTLVTVSSTRGGGSKVAALKEKVAALKEKVAALKEKVAALKE

SEQ ID NO: 12481 - protein, 179 aa, Artificial Sequence
  Synthetic Polypeptide
MALPVTALLLPLALLLHAARPQLQLQESGPGLVKPSETLALTCNVSGGSISSSSYYWGWIRQPPGKRLEWIGSIYYSGSTYFNPSLKSRVTISVDTSKNQFSLKLSSVTAADTAVYYCAGGDYYGPVGQWPSDYRGQGTLVTVSSTRGGGSKVAALKEKVAALKEKVAALKEKVAALKE

SEQ ID NO: 12482 - protein, 185 aa, Artificial Sequence
  Synthetic Polypeptide
MALPVTALLLPLALLLHAARPEVQLLESGGGLVQPGGSLRLSCAASGFIFSSYAMSWVRQAPGKGQEWVSGVSGTGVNTYYADSVKGRFTISRDNSKNTLYLQMNSLRAEDTAVYYCASGKGWDSGSWYEDYRGQGTLVTVSSTRPRLCLLTRGGGSKVAALKEKVAALKEKVAALKEKVAALKE

SEQ ID NO: 12483 - protein, 179 aa, Artificial Sequence
  Synthetic Polypeptide
MALPVTALLLPLALLLHAARPQLQLQESGPGLVKPSETLSLTCTVSGGSVSSSSYYWGWIRQPPGKRLELIGSIYYGGSTYFNPSLKSRVTISVDTSKNQFSLKLSSVTAADTAVYYCAGGDTYGPVGQWPSDYRGQGTLVTVSSTRGGGSKVAALKEKVAALKEKVAALKEKVAALKE

SEQ ID NO: 12484 - protein, 177 aa, Artificial Sequence
  Synthetic Polypeptide
MALPVTALLLPLALLLHAARPEVQLLESGGGLVQPGGSLRLSCAASGFIFSIYAMSWVRQAPGKGLEWVSGISGSGVNTYYADSVKGRFIISRDNSRNTVYLQMNSLRADDTAVYHCANGKGWDGNTWYEDYRGQGTLVTVSSTRGGGSKVAALKEKVAALKEKVAALKEKVAALKE

SEQ ID NO: 12485 - protein, 172 aa, Artificial Sequence
  Synthetic Polypeptide
MALPVTALLLPLALLLHAARPEVQVLESGGGLVQPGGSLRLSCAASGFTFSNFAMSWVRQAPGKGLEWVSTISGSAGTTDYADSVKGRFTISRDNSKKTLYLQMNSLRVEDTAVYYCADGRGPFFDYRGQGTLVTVSSTRGGGSKVAALKEKVAALKEKVAALKEKVAALKE

SEQ ID NO: 12486 - protein, 174 aa, Artificial Sequence
  Synthetic Polypeptide
MALPVTALLLPLALLLHAARPEVQLVESGGGLVQPGGSLRLSCAASGFNIKDTCIGWVRRAPGKEEELVAKICKYSGHTRYADSVKGRFTISADTSKNTAYLQMNSLRAEDTAVYYCAAVSVRDGHYNYWGQGTTVTVSSTRGGGSKVAALKEKVAALKEKVAALKEKVAALKE

SEQ ID NO: 12487 - protein, 174 aa, Artificial Sequence
  Synthetic Polypeptide
MALPVTALLLPLALLLHAARPEVQLVESGGGLVQPGGSLRLSCAASGFNIKDTCIGWVRRAPGKEEELVADICPYKGSTRYADSVKGRFTISADTSKNTAYLQMNSLRAEDTAVYYCAIVSARDGYYNYWGQGTTVTVSSTRGGGSKVAALKEKVAALKEKVAALKEKVAALKE

SEQ ID NO: 12488 - protein, 174 aa, Artificial Sequence
  Synthetic Polypeptide
MALPVTALLLPLALLLHAARPEVQLLESGGGLVQPGGSLRLSCAASGFTFSSYAMSWVRQAPGKGLEWVSAITGSGGSTYYADSVKGRFTISRDNSKNTLYLQMNSLRAEDTAVYYCAKDEDGGSLLGHRGQGTLVTVSSTRGGGSKVAALKEKVAALKEKVAALKEKVAALKE

SEQ ID NO: 12489 - protein, 174 aa, Artificial Sequence
  Synthetic Polypeptide
MALPVTALLLPLALLLHAARPEVQLLESGGGLIQPGGSLRLSCAASGFTFSSHAMTWVRQAPGKGLEWVSAISSGGSYTYYADSVKGRFTISRDNSKNTLYLQMNSLRAEDTAVYYCAKDEDGGSLLGHRGQGTLVTVSSTRGGGSKVAALKEKVAALKEKVAALKEKVAALKE

SEQ ID NO: 12490 - protein, 174 aa, Artificial Sequence
  Synthetic Polypeptide
MALPVTALLLPLALLLHAARPEVQLVESGGGLVQPGGSLRLSCAASGFSFSDFWMSWVRQAPGKGLEWVSAISGSGDYTHYADSVKGRFTISRDNSKNTVYLQMNSLRAEDSAVYYCAKDEDGGSLLGHRGQGTLVTVSSTRGGGSKVAALKEKVAALKEKVAALKEKVAALKE

SEQ ID NO: 12491 - protein, 176 aa, Artificial Sequence
  Synthetic Polypeptide
MALPVTALLLPLALLLHAARPEVQLLESGGGLVQPGGSLRLSCAASGFAFSIYDMSWVRQAPGKGLEWVSSISGSGDYIYYADSVKGRFTISRDISKNTLYLQMNSLRAEDTAVYYCAKEGTGANSSLADYRGQGTLVTVSSTRGGGSKVAALKEKVAALKEKVAALKEKVAALKE

SEQ ID NO: 12492 - protein, 176 aa, Artificial Sequence
  Synthetic Polypeptide
MALPVTALLLPLALLLHAARPEVQLLESGGGLVQPGGSLRLSCAASGFTFSSYAMSWVRQAPGKGLEWVSSISGSGDYIYYADSVKGRFTISRDISKNTLYLQMNSLRAEDTAVYYCAKEGTGANSSLADYRGQGTLVTVSSTRGGGSKVAALKEKVAALKEKVAALKEKVAALKE

SEQ ID NO: 12493 - protein, 173 aa, Artificial Sequence
  Synthetic Polypeptide
MALPVTALLLPLALLLHAARPQVQLVESGGGLVQPGGSLRLSCAASGFTFTNHAMSWVRQAPGKGLELVSSISGNGRTTYYADSVKGRFTISRDISKNTLDLQMNSLRAEDTAVYYCAKDGGETLVDSRGQGTLVTVSSTRGGGSKVAALKEKVAALKEKVAALKEKVAALKE

SEQ ID NO: 12494 - protein, 174 aa, Artificial Sequence
  Synthetic Polypeptide
MALPVTALLLPLALLLHAARPEVQLLESGGGLIQPGGSLRLSCAASGFTFSSHAMTWVRQAPGKGLEWVSAISGSGDYTHYADSVKGRFTISRDNSKNTVYLQMNSLRAEDSAVYYCAKDEDGGSLLGHRGQGTLVTVSSTRGGGSKVAALKEKVAALKEKVAALKEKVAALKE

SEQ ID NO: 12495 - protein, 175 aa, Artificial Sequence
  Synthetic Polypeptide
MALPVTALLLPLALLLHAARPQVQLQESGGGLVQAGDSLRLSCAASGRAVSSLFMGWFRRAPGKERELVAAISRYSLYTYYADSVKGRFTISADNAKNAVYLQMNSLKPEDTAVYYCASKLEYTSNDYDSWGQGTQVTVSSTRGGGSKVAALKEKVAALKEKVAALKEKVAALKE

SEQ ID NO: 12496 - protein, 175 aa, Artificial Sequence
  Synthetic Polypeptide
MALPVTALLLPLALLLHAARPEVQLQESGGGLVQPGGSLRLSCAASGRTFSSLFMGWFRQAPGKERELVAAISRYSLYTYYADSVKGRFTISADNAKNAVYLQMNSLKPEDTAVYYCASKLEYTSNDYDSWGQGTQVTVSSTRGGGSKVAALKEKVAALKEKVAALKEKVAALKE

SEQ ID NO: 12497 - protein, 175 aa, Artificial Sequence
  Synthetic Polypeptide
MALPVTALLLPLALLLHAARPEVQLQESGGGLVQPGGSLRLSCAASGRTFSSLFMGWVRQAPGKGLELVSAISRYSLYTYYADSVKGRFTISRDNAKNTLYLQMNSLRPEDTAVYYCASKLEYTSNDYDSWGQGTLVTVSSTRGGGSKVAALKEKVAALKEKVAALKEKVAALKE

SEQ ID NO: 12498 - protein, 183 aa, Artificial Sequence
  Synthetic Polypeptide
MALPVTALLLPLALLLHAARPEVQLVESGGGLVQPGGSLRLSCEASGFASDDYIIGWFRQAPGKEREGVSCISSKYANTVYTDSVKGRFRLSRGTAKNTVYLQMSALKPEDTAVYYCAMDSRRVTCPEISTMHRNFDSWGQGTLVTVSSTRGGGSKVAALKEKVAALKEKVAALKEKVAALKE

SEQ ID NO: 12499 - protein, 183 aa, Artificial Sequence
  Synthetic Polypeptide
MALPVTALLLPLALLLHAARPEVQLVESGGGLVQPGGSLRLSCAASGFASDYYIIGWFRQAPGKEREGVSCISSRYANTNYADSVKGRFTISRDNAKNTVYLQMNSLKPEDTAVYYCAADTRRYTCPDIATMHRNFDSWGQGTLVTVSSTRGGGSKVAALKEKVAALKEKVAALKEKVAALKE

SEQ ID NO: 12500 - protein, 179 aa, Artificial Sequence
  Synthetic Polypeptide
MALPVTALLLPLALLLHAARPEVQLVESGGSLVQPGGSLRLSCAASGFTFDDYAMSWVRQVPGKGLEWVSSINWSGTHTDYADSVKGRFTISRNNANNTLYLQMNSLKSEDTAVYYCAKNWRDAGTTWFEKSGSAGQGTQVTVSSTRGGGSKVAALKEKVAALKEKVAALKEKVAALKE

SEQ ID NO: 12501 - protein, 173 aa, Artificial Sequence
  Synthetic Polypeptide
MALPVTALLLPLALLLHAARPEVQLVESGGGLVQAGGSLRLSCAASGITFSINTMGWYRQAPGKQRELVALISSIGDTYYADSVKGRFTISRDNAKNTVYLQMNSLKPEDTAVYYCKRFRTAAQGTDYWGQGTQVTVSSTRGGGSKVAALKEKVAALKEKVAALKEKVAALKE

SEQ ID NO: 12502 - protein, 174 aa, Artificial Sequence
  Synthetic Polypeptide
MALPVTALLLPLALLLHAARPEVQLVESGGGLVQPGGSLRLSCAASGSIFGFNDMAWYRQAPGKQRELVALISRVGVTSSADSVKGRFTISRVNAKDTVYLQMNSLKPEDTAVYYCYMDQRLDGSTLAYWGQGTQVTVSSTRGGGSKVAALKEKVAALKEKVAALKEKVAALKE

SEQ ID NO: 12503 - protein, 175 aa, Artificial Sequence
  Synthetic Polypeptide
MALPVTALLLPLALLLHAARPDVQLVESGGGLVQPGGSLRLSCAASGSIGGLNAMAWYRQAPGKERELVAGIFGVGSTRYADSVKGRFTISRDNSKNTVYLQMNSLRPEDTAVYYCRMSSVTRGSSDYWGQGTLVTVSSLETRGGGSKVAALKEKVAALKEKVAALKEKVAALKE

SEQ ID NO: 12504 - protein, 180 aa, Artificial Sequence
  Synthetic Polypeptide
MALPVTALLLPLALLLHAARPEVQLVESGGGLVQPGGSLRLSCAASGRTYYLNAMGWFRQAPGKEREFVAAIDWSEGNKDYADSVKGRFTISRDNSKNTVYLQMNSLRPEDTAVYYCAADTPPWGPLIYIESYDSWGQGTLVTVSSTRGGGSKVAALKEKVAALKEKVAALKEKVAALKE

SEQ ID NO: 12505 - protein, 178 aa, Artificial Sequence
  Synthetic Polypeptide
MALPVTALLLPLALLLHAARPEVQLVESGGGSVQAGGSLRLSCAASGDTYGSYWMGWFRQAPGKEREGVAAINRGGGYTVYADSVKGRFTISRDTAKNTVYLQMNSLRPDDTADYYCAASGVLGGLHEDWFNYWGQGTLVTVSSTRGGGSKVAALKEKVAALKEKVAALKEKVAALKE

SEQ ID NO: 12506 - protein, 177 aa, Artificial Sequence
  Synthetic Polypeptide
MALPVTALLLPLALLLHAARPVQLVESGGGSVQAGGSLRLSCAASGDTYGSYWMGWFRQAPGQEREAVAAINRGGGYTVYADSVKGRFTISRDNAKNTLYLQMNSLRPDDTADYYCAASGVLGGLHEDWFNYWGQGTLVTVSSTRGGGSKVAALKEKVAALKEKVAALKEKVAALKE

SEQ ID NO: 12507 - protein, 179 aa, Artificial Sequence
  Synthetic Polypeptide
MALPVTALLLPLALLLHAARPEVQLVESGGGSVQTGGSLRLTCAASGRTSRSYGMGWFRQAPGKEREFVSGISWRGDSTGYADSVKGRFTISRDNAKNTVDLQMNSLKPEDTAIYYCAAAAGSAWYGTLYEYDYWGQGTLVTVSSTRGGGSKVAALKEKVAALKEKVAALKEKVAALKE

SEQ ID NO: 12508 - protein, 179 aa, Artificial Sequence
  Synthetic Polypeptide
MALPVTALLLPLALLLHAARPEVQLVESGGGSVQAGGSLRLTCAASGSTSRSYGMGWFRQAPGKEREFVSGISWRGDSTGYADSVKGRFTISRDNAKNTVDLQMNSLKPEDTAIYYCAAAAGSTWYGTLYEYDYWGQGTLVTVSSTRGGGSKVAALKEKVAALKEKVAALKEKVAALKE

SEQ ID NO: 12509 - protein, 180 aa, Artificial Sequence
  Synthetic Polypeptide
MALPVTALLLPLALLLHAARPDVQLVESGGGLVQPGGSLRLSCAASGFILDYYAIGWFRQAPGKEREGVLCIDASDDITYYADSVKGRFTISRDNSKNTVYLQMNSLRPEDTAVYYCATPIGLSSSCLLEYDYDYWGQGTLVTVSSTRGGGSKVAALKEKVAALKEKVAALKEKVAALKE

SEQ ID NO: 12510 - protein, 181 aa, Artificial Sequence
  Synthetic Polypeptide
MALPVTALLLPLALLLHAARPEVQLVESGGGLVQAGDSLRLSCAASGRAFSRYAMGWFRQAPGKEREFVAAIGWGPSKTNYADSVKGRFTISRDNAKNTVYLQMNTLKPEDTAVYSCAAKFVNTDSTWSRSEMYTYWGQGTLVTVSSTRGGGSKVAALKEKVAALKEKVAALKEKVAALKE

SEQ ID NO: 12511 - protein, 177 aa, Artificial Sequence
  Synthetic Polypeptide
MALPVTALLLPLALLLHAARPEVQLVESGGGLVQAGGSLRLSCVASGISSSKRNMGWYRQAPGKQRESVATISSGGNKDYTDAVKDRFTISRDTTKNTVYLQMNSLKPEDTAVYYCKIEAGTGWATRRGYTYWGQGTLVTVSSTRGGGSKVAALKEKVAALKEKVAALKEKVAALKE

SEQ ID NO: 12512 - protein, 167 aa, Artificial Sequence
  Synthetic Polypeptide
MALPVTALLLPLALLLHAARPQVQLVQSGGGLVQPGGSLRLSCAASDFDFAAYEMSWVRQAPGQGLEWVAIISHDGIDKYYTDSVKGRFTISRDNSKNTLYLQMNTLRAEDTATYYCLRLGAVGQGTLVTVSSTRGGGSKVAALKEKVAALKEKVAALKEKVAALKE

SEQ ID NO: 12513 - protein, 175 aa, Artificial Sequence
  Synthetic Polypeptide
MALPVTALLLPLALLLHAARPQVQLVQSGGGLVQPGGSLRLSCAASDFAFDDYEMSWVRQAPGKALEWIGDINHSGTTIYNPSLKSRVTISRDNSKNTLYLQMNTLRAEDTAIYYCARPHYGDYSDAFDIWGQGTMVTVSSTRGGGSKVAALKEKVAALKEKVAALKEKVAALKE

SEQ ID NO: 12514 - protein, 170 aa, Artificial Sequence
  Synthetic Polypeptide
MALPVTALLLPLALLLHAARPEVQLVESGGGLVQPGNSLRLSCAASGFTFSSFGMSWVRQAPGKGLEWVSSISGSGSDTLYADSVKGRFTISRDNAKTTLYLQMNSLRPEDTAVYYCTIGGSLSRSSQGTLVTVSSTRGGGSKVAALKEKVAALKEKVAALKEKVAALKE

SEQ ID NO: 12515 - protein, 171 aa, Artificial Sequence
  Synthetic Polypeptide
MALPVTALLLPLALLLHAARPEVQLVESGGGLVQAGGSLRLSCAASGSIFSGNVMGWYRRQAPGKEREWVAAIASGGSIYYRDSVKGRFTISRDNAKNTVYLQMNSLKPEDTAVYYCNSHPPTLPYWGLGTQVTVSSTRGGGSKVAALKEKVAALKEKVAALKEKVAALKE

SEQ ID NO: 12516 - protein, 181 aa, Artificial Sequence
  Synthetic Polypeptide
MALPVTALLLPLALLLHAARPEVQLVESGGGSVQAGGSLRLSCTTSGRALNMYVMGWFRQAPGNEREFVAATSSSGGSTSYPDSVKGRFTISRDNAKNTVYLQMNSLKPEDTAAYRCAASPYVSTPTMNILEEYRYWGLGTQVTVSSTRGGGSKVAALKEKVAALKEKVAALKEKVAALKE

SEQ ID NO: 12517 - protein, 176 aa, Artificial Sequence
  Synthetic Polypeptide
MALPVTALLLPLALLLHAARPEVQLVESGGGLVQPGGSLRLSCAASGSVFKINVMAWYRQAPGKGRELVAGIISGGSTSYADSVKGRFTISRDNAKNTLYLQMNSLRPEDTAVYYCAFITTESDYDLGRRYWGQGTLVTVSSTRGGGSKVAALKEKVAALKEKVAALKEKVAALKE

SEQ ID NO: 12518 - protein, 321 aa, Artificial Sequence
  Synthetic Polypeptide
MALPVTALLLPLALLLHAARPEVQLVESGGGSVQTGGSLRLTCAASGRTSRSYGMGWFRQAPGKEREFVSGISWRGDSTGYADSVKGRFTISRDNAKNTVDLQMNSLKPEDTAIYYCAAAAGSAWYGTLYEYDYWGQGTLVTVSSLEGGGGSGGGGSGGGGSFEEVQLVESGGGSVQAGGSLRLSCAASGDTYGSYWMGWFRQAPGKEREGVAAINRGGGYTVYADSVKGRFTISRDTAKNTVYLQMNSLRPDDTADYYCAASGVLGGLHEDWFNYWGQGTLVTVSSTRGGGSKVAALKEKVAALKEKVAALKEKVAALKE

SEQ ID NO: 12519 - protein, 340 aa, Artificial Sequence
  Synthetic Polypeptide
MALPVTALLLPLALLLHAARPEVQLVESGGGSVQAGGSLRLTCAASGSTSRSYGMGWFRQAPGKEREFVSGISWRGDSTGYADSVKGRFTISRDNAKNTVDLQMNSLKPEDTAIYYCAAAAGSTWYGTLYEYDYWGQGTLVTVSSLEGGGGSGGGGSGGGGSGSGGSGSGGSGSGGSGSGGSFEVQLVESGGGSVQAGGSLRLSCAASGDTYGSYWMGWFRQAPGQEREAVAAINRGGGYTVYADSVKGRFTISRDNAKNTLYLQMNSLRPDDTADYYCAASGVLGGLHEDWFNYWGQGTLVTVSSTRGGGSKVAALKEKVAALKEKVAALKEKVAALKE

SEQ ID NO: 12520 - protein, 330 aa, Artificial Sequence
  Synthetic Polypeptide
MALPVTALLLPLALLLHAARPEVQLVESGGGLVQAGGSLRLSCAASGITFSINTMGWYRQAPGKQRELVALISSIGDTYYADSVKGRFTISRDNAKNTVYLQMNSLKPEDTAVYYCKRFRTAAQGTDYWGQGTQVTVSSLEGGGGSGGGGSGGGGSGSGGSGSGGSGSGGSGSGGSFEVQLVESGGGLVQPGGSLRLSCAASGSIFGFNDMAWYRQAPGKQRELVALISRVGVTSSADSVKGRFTISRVNAKDTVYLQMNSLKPEDTAVYYCYMDQRLDGSTLAYWGQGTQVTVSSTRGGGSKVAALKEKVAALKEKVAALKEKVAALKE

SEQ ID NO: 12521 - protein, 297 aa, Artificial Sequence; identical to SEQ ID NO: 12336
  Synthetic Polypeptide

SEQ ID NO: 12522 - protein, 335 aa, Artificial Sequence
  Synthetic Polypeptide
MALPVTALLLPLALLLHAARPDVQLVESGGGLVQPGGSLRLSCAASGSIGGLNAMAWYRQAPGKERELVAGIFGVGSTRYADSVKGRFTISRDNSKNTVYLQMNSLRPEDTAVYYCRMSSVTRGSSDYWGQGTLVTVSSLEGGGGSGGGGSGGGGSGSGGSGSGGSGSGGSGSGGSFEVQLVESGGSLVQPGGSLRLSCAASGFTFDDYAMSWVRQVPGKGLEWVSSINWSGTHTDYADSVKGRFTISRNNANNTLYLQMNSLKSEDTAVYYCAKNWRDAGTTWFEKSGSAGQGTQVTVSSTRGGGSKVAALKEKVAALKEKVAALKEKVAALKE

SEQ ID NO: 12523 - protein, 343 aa, Artificial Sequence
  Synthetic Polypeptide
MALPVTALLLPLALLLHAARPDVQLVESGGGLVQPGGSLRLSCAASGFILDYYAIGWFRQAPGKEREGVLCIDASDDITYYADSVKGRFTISRDNSKNTVYLQMNSLRPEDTAVYYCATPIGLSSSCLLEYDYDYWGQGTLVTVSSLEGGSGSGGGGSGGGGSGSGGSGSGGSGSGGSGSGGSFEVQLVESGGGLVQPGGSLRLSCAASGRTYYLNAMGWFRQAPGKEREFVAAIDWSEGNKDYADSVKGRFTISRDNSKNTVYLQMNSLRPEDTAVYYCAADTPPWGPLIYIESYDSWGQGTLVTVSSTRGGGSKVAALKEKVAALKEKVAALKEKVAALKE

SEQ ID NO: 12524 - protein, 326 aa, Artificial Sequence
  Synthetic Polypeptide
MALPVTALLLPLALLLHAARPQVQLVQSGGGLVQPGGSLRLSCAASDFDFAAYEMSWVRQAPGQGLEWVAIISHDGIDKYYTDSVKGRFTISRDNSKNTLYLQMNTLRAEDTATYYCLRLGAVGQGTLVTVSSLEGGGGSGGGGSGGGGSGSGGSGSGGSGSGGSGSGGSFEQVQLVQSGGGLVQPGGSLRLSCAASDFAFDDYEMSWVRQAPGKALEWIGDINHSGTTIYNPSLKSRVTISRDNSKNTLYLQMNTLRAEDTAIYYCARPHYGDYSDAFDIWGQGTMVTVSSTRGGGSKVAALKEKVAALKEKVAALKEKVAALKE

SEQ ID NO: 12525 - protein, 174 aa, Artificial Sequence
  Synthetic Polypeptide
MALPVTALLLPLALLLHAARPQVKLEESGGGLVQAGRSLRLSCAASEHTFSSHVMGWFRQAPGKERESVAVIGWRDISTSYADSVKGRFTISRDNAKKTLYLQMNSLKPEDTAVYYCAARRIDAADFDSWGQGTQVTVSSTRGGGSKVAALKEKVAALKEKVAALKEKVAALKE

SEQ ID NO: 12526 - protein, 173 aa, Artificial Sequence
  Synthetic Polypeptide
MALPVTALLLPLALLLHAARPEVQLVESGGGLVQAGGSLRLSCAASGRTFTMGWFRQAPGKEREFVAAISLSPTLAYYAESVKGRFTISRDNAKNTVVLQMNSLKPEDTALYYCAADRKSVMSIRPDYWGQGTQVTVSSTRGGGSKVAALKEKVAALKEKVAALKEKVAALKE

SEQ ID NO: 12527 - protein, 307 aa, Artificial Sequence
  Synthetic Polypeptide
MALPVTALLLPLALLLHAARPQVKLEESGGGLVQAGRSLRLSCAASEHTFSSHVMGWFRQAPGKERESVAVIGWRDISTSYADSVKGRFTISRDNAKKTLYLQMNSLKPEDTAVYYCAARRIDAADFDSWGQGTQVTVSSGGGGSGGGGSGGGGSEVQLVESGGGLVQAGGSLRLSCAASGRTFTMGWFRQAPGKEREFVAAISLSPTLAYYAESVKGRFTISRDNAKNTVVLQMNSLKPEDTALYYCAADRKSVMSIRPDYWGQGTQVTVSSTRGGGSKVAALKEKVAALKEKVAALKEKVAALKE

SEQ ID NO: 12528 - protein, 171 aa, Artificial Sequence
  Synthetic Polypeptide
MALPVTALLLPLALLLHAARPEVQLVESGGGLVQAGGSLRLSCIATGKVFSIYDMGWYRQAPGKQRELVAEITSSGTTHYDDFVSGRFTISRDNAKNTVYLQMNTLKAEDTAVYYCRANHVFGGSYWGQGTQVTVSSTRGGGSKVAALKEKVAALKEKVAALKEKVAALKE

SEQ ID NO: 12529 - protein, 177 aa, Artificial Sequence
  Synthetic Polypeptide
MALPVTALLLPLALLLHAARPQVQLVESGGGLVQPGGSLRLSCEASGFTLDYYAIGWFRQAPGKEREGVICISRSDGSTYYADSVKGRFTISRDNAKKTVYLQMISLKPEDTAAYYCAAGADCSGYLRDYEFRGQGTQVTVSSTRGGGSKVAALKEKVAALKEKVAALKEKVAALKE

SEQ ID NO: 12530 - protein, 300 aa, Artificial Sequence
  Synthetic Polypeptide
MALPVTALLLPLALLLHAARPEVQLVESGGGLVQAGGSLRLSCIATGKVFSIYDMGWYRQAPGKQRELVAEITSSGTTHYDDFVSGRFTISRDNAKNTVYLQMNTLKAEDTAVYYCRANHVFGGSYWGQGTQVTVSSEVAALEKQVQLVESGGGLVQPGGSLRLSCEASGFTLDYYAIGWFRQAPGKEREGVICISRSDGSTYYADSVKGRFTISRDNAKKTVYLQMISLKPEDTAAYYCAAGADCSGYLRDYEFRGQGTQVTVSSTRGGGSKVAALKEKVAALKEKVAALKEKVAALKE

SEQ ID NO: 12531 - protein, 183 aa, Artificial Sequence
  Synthetic Polypeptide
MALPVTALLLPLALLLHAARPQVKLEESGGRLVQPRGSLRLSCAGSGRTFSTYGMAWFRQAPGKEREFVASKASMNYSGRTYYADSVKGRFTIARDNAKNMVFLQMNNLKPEDTAVYYCAAGTGCSTYGCFDAQIIDYWGKGTLVTVSSTRGGGSKVAALKEKVAALKEKVAALKEKVAALKE

SEQ ID NO: 12532 - protein, 174 aa, Artificial Sequence
  Synthetic Polypeptide
MALPVTALLLPLALLLHAARPQVKLEESGGGLVQPGESLRLSCSASGSIFKVFRVFAMSWYRQGPGKQRELVASISSGETTTYADSVKGRFTISRDNAKNTAYLQMDSLKPEDTAVYYCNADHTFTGDFWGQGTQVTVSSTRGGGSKVAALKEKVAALKEKVAALKEKVAALKE

SEQ ID NO: 12533 - protein, 309 aa, Artificial Sequence
  Synthetic Polypeptide
MALPVTALLLPLALLLHAARPQVKLEESGGRLVQPRGSLRLSCAGSGRTFSTYGMAWFRQAPGKEREFVASKASMNYSGRTYYADSVKGRFTIARDNAKNMVFLQMNNLKPEDTAVYYCAAGTGCSTYGCFDAQIIDYWGKGTLVTVSSEVAALEKQVKLEESGGGLVQPGESLRLSCSASGSIFKVFRVFAMSWYRQGPGKQRELVASISSGETTTYADSVKGRFTISRDNAKNTAYLQMDSLKPEDTAVYYCNADHTFTGDFWGQGTQVTVSSTRGGGSKVAALKEKVAALKEKVAALKEKVAALKE

SEQ ID NO: 12534 - protein, 172 aa, Artificial Sequence
  Synthetic Polypeptide
MALPVTALLLPLALLLHAARPQVKLEESGGELVQPGGPLRLSCAASGNIFSINRMGWYRQAPGKQRAFVASITVRGITNYADSVKGRFTISVDKSKNTIYLQMNALKPEDTAVYYCNAVSSNRDPDYWGQGTQVTVSSTRGGGSKVAALKEKVAALKEKVAALKEKVAALKE

SEQ ID NO: 12535 - protein, 184 aa, Artificial Sequence
  Synthetic Polypeptide
MALPVTALLLPLALLLHAARPPVQLVESGGGLVQAGDSLRLSCAASGRTFGIGTMGWFRQPPGKEREFVAAIRWSTGGTRYADSVKGRFTISRDNAKLTVDLQMDSLKPEDTAVYYCAADRLSLDLSGRYHYNPAVYDYWGQGTQVTVSSTRGGGSKVAALKEKVAALKEKVAALKEKVAALKE

SEQ ID NO: 12536 - protein, 316 aa, Artificial Sequence
  Synthetic Polypeptide
MALPVTALLLPLALLLHAARPQVKLEESGGELVQPGGPLRLSCAASGNIFSINRMGWYRQAPGKQRAFVASITVRGITNYADSVKGRFTISVDKSKNTIYLQMNALKPEDTAVYYCNAVSSNRDPDYWGQGTQVTVSSGGGGSGGGGSGGGGSPVQLVESGGGLVQAGDSLRLSCAASGRTFGIGTMGWFRQPPGKEREFVAAIRWSTGGTRYADSVKGRFTISRDNAKLTVDLQMDSLKPEDTAVYYCAADRLSLDLSGRYHYNPAVYDYWGQGTQVTVSSTRGGGSKVAALKEKVAALKEKVAALKEKVAALKE

SEQ ID NO: 12537 - protein, 174 aa, Artificial Sequence
  Synthetic Polypeptide
MALPVTALLLPLALLLHAARPAVQLVESGGGLVQAGDSLRLTCTASGRAFSTYFMAWFRQAPGKEREFVAGIAWSGGSTAYADSVKGRFTISRDNAKNTVYLQMNSLKSEDTAVYYCASRGIEVEEFGAWGQGTQVTVSSTRGGGSKVAALKEKVAALKEKVAALKEKVAALKE

SEQ ID NO: 12538 - protein, 175 aa, Artificial Sequence
  Synthetic Polypeptide
MALPVTALLLPLALLLHAARPQVQLVESGGGLVQAGGSLRLSCAASGGTLSKNTVAWFRQAPGKERGFVASITWDGRTTYYADSVKGRFTISRDNAKNTVYLQMNSLKPEDTAVYVCADLGKWPAGPADYWGQGTQVTVSSTRGGGSKVAALKEKVAALKEKVAALKEKVAALKE

SEQ ID NO: 12539 - protein, 754 aa, Artificial Sequence
  Synthetic Polypeptide
MALPVTALLLPLALLLHAARPEVQLVESGGGLVQPGGSLRLSCAASGFSFSDFWMSWVRQAPGKGLEWVATISQAGSEKDYVDSVKGRFTISRDNAKKSLYLQMNSLRAEDTAVYYCASGVYSFDYRGQGTLVTVSSGTGGGGSGGGGSGGGGSEFDIQMTQTTSSLSASLGDRVTISCRASQDISKYLNWYQQKPDGTVKLLIYHTSRLHSGVPSRFSGSGSGTDYSLTISNLEQEDIATYFCQQGNTLPYTFGGGTKLEITLEDLKNVFPPEVAVFEPSEAEISHTQKATLVCLATGFYPDHVELSWWVNGKEVHSGVCTDPQPLKEQPALNDSRYCLSSRLRVSATFWQNPRNHFRCQVQFYGLSENDEWTQDRAKPVTQIVSAEAWGRADCGFTSESYQQGVLSATILYEILLGKATLYAVLVSALVLMAMVKRKDSRGRAKRSGSGATNFSLLKQAGDVEENPGPTSMDWIWRILFLVGAATGAHSFEVKLQESGPGLVAPSQSLSVTCTVSGVSLPDYGVSWIRQPPRKGLEWLGVIWGSETTYYNSALKSRLTIIKDNSKSQVFLKMNSLQTDDTAIYYCAKHYYYGGSYAMDYWGQGTSVTVSSTRIQNPDPAVYQLRDSKSSDKSVCLFTDFDSQTNVSQSKDSDVYITDKCVLDMRSMDFKSNSAVAWSNKSDFACANAFNNSIIPEDTFFPSPESSCDVKLVEKSFETDTNLNFQNLSVIGFRILLLKVAGFNLLMTLRLWSS

SEQ ID NO: 12540 - protein, 755 aa, Artificial Sequence
  Synthetic Polypeptide
MALPVTALLLPLALLLHAARPEVQLVESGGGLVQPGGSLRLSCAASGFSFSDFWMSWVRQAPGKGLEWVATISQAGSEKDYVDSVKGRFTISRDNAKKSLYLQMNSLRAEDTAVYYCASGVYSFDYRGQGTLVTVSSGTGGGGSGGGGSGGGGSEFEIVMTQSPATLSLSPGERATLSCRASQDISKYLNWYQQKPGQAPRLLIYHTSRLHSGIPARFSGSGSGTDYTLTISSLQPEDFAVYFCQQGNTLPYTFGQGTKLEIKLEDLKNVFPPEVAVFEPSEAEISHTQKATLVCLATGFYPDHVELSWWVNGKEVHSGVCTDPQPLKEQPALNDSRYCLSSRLRVSATFWQNPRNHFRCQVQFYGLSENDEWTQDRAKPVTQIVSAEAWGRADCGFTSESYQQGVLSATILYEILLGKATLYAVLVSALVLMAMVKRKDSRGRAKRSGSGATNFSLLKQAGDVEENPGPTSMDWIWRILFLVGAATGAHSFEQVQLQESGPGLVKPSETLSLTCTVSGVSLPDYGVSWIRQPPGKGLEWIGVIWGSETTYYNSSLKSRVTISKDNSKNQVSLKLSSVTAADTAVYYCAKHYYYGGSYAMDYWGQGTLVTVSSTRIQNPDPAVYQLRDSKSSDKSVCLFTDFDSQTNVSQSKDSDVYITDKCVLDMRSMDFKSNSAVAWSNKSDFACANAFNNSIIPEDTFFPSPESSCDVKLVEKSFETDTNLNFQNLSVIGFRILLLKVAGFNLLMTLRLWSS

SEQ ID NO: 12541 - protein, 756 aa, Artificial Sequence
  Synthetic Polypeptide
MALPVTALLLPLALLLHAARPEVQLVESGGGLVQPGGSLRLSCAASGFSFSDFWMSWVRQAPGKGLEWVATISQAGSEKDYVDSVKGRFTISRDNAKKSLYLQMNSLRAEDTAVYYCASGVYSFDYRGQGTLVTVSSGTGGGGSGGGGSGGGGSEFDEIVLTQSPATLSLSPGERATLSCSASSSVSYMHWYQQKPGQAPRLLIYDTSKLASGIPARFSGSGSGTDFTLTISSLEPEDVAVYYCFQGSVYPFTFGQGTKLEIKRLEDLKNVFPPEVAVFEPSEAEISHTQKATLVCLATGFYPDHVELSWWVNGKEVHSGVCTDPQPLKEQPALNDSRYCLSSRLRVSATFWQNPRNHFRCQVQFYGLSENDEWTQDRAKPVTQIVSAEAWGRADCGFTSESYQQGVLSATILYEILLGKATLYAVLVSALVLMAMVKRKDSRGRAKRSGSGATNFSLLKQAGDVEENPGPTSMDWIWRILFLVGAATGAHSFEQVQLQESGPGLVKPSQTLSLTCTVSGGSISTSGMGVGWIRQHPGKGLEWIGHIWWDDDKRYNPALKSRVTISVDTSKNQFSLKLSSVTAADTAVYYCARMELWSYYFDYWGQGTLVTVSSTRIQNPDPAVYQLRDSKSSDKSVCLFTDFDSQTNVSQSKDSDVYITDKCVLDMRSMDFKSNSAVAWSNKSDFACANAFNNSIIPEDTFFPSPESSCDVKLVEKSFETDTNLNFQNLSVIGFRILLLKVAGFNLLMTLRLWSS

SEQ ID NO: 12542 - protein, 754 aa, Artificial Sequence
  Synthetic Polypeptide
MALPVTALLLPLALLLHAARPEVQLVESGGGLVQPGGSLRLSCAASGFSFSDFWMSWVRQAPGKGLEWVATISQAGSEKDYVDSVKGRFTISRDNAKKSLYLQMNSLRAEDTAVYYCASGVYSFDYRGQGTLVTVSSGTGGGGSGGGGSGGGGSEFDYIHVTQSPSSLSVSIGDRVTINCQTSQGVGSDLHWYQHKPGRAPKLLIHHASSVEDGVPSRFSGTGFHTSFNLTINDLQADDIGTYYCQVLQSFGRGSRLDTKLEDLKNVFPPEVAVFEPSEAEISHTQKATLVCLATGFYPDHVELSWWVNGKEVHSGVCTDPQPLKEQPALNDSRYCLSSRLRVSATFWQNPRNHFRCQVQFYGLSENDEWTQDRAKPVTQIVSAEAWGRADCGFTSESYQQGVLSATILYEILLGKATLYAVLVSALVLMAMVKRKDSRGRAKRSGSGATNFSLLKQAGDVEENPGPTSMDWIWRILFLVGAATGAHSFERAHLVQSGTAMKKPGASVRVSCQTSGYTFTAHILFWFRQAPGRGLEWVGWIKPQYGAVNFGGGFRDRVTLTRDVYREIAYMDIRGLKPDDTAVYYCARDRSYGDSSWALDAWGQGTTVVVSATRIQNPDPAVYQLRDSKSSDKSVCLFTDFDSQTNVSQSKDSDVYITDKCVLDMRSMDFKSNSAVAWSNKSDFACANAFNNSIIPEDTFFPSPESSCDVKLVEKSFETDTNLNFQNLSVIGFRILLLKVAGFNLLMTLRLWSS

SEQ ID NO: 12543 - protein, 764 aa, Artificial Sequence
  Synthetic Polypeptide
MALPVTALLLPLALLLHAARPEVQLVESGGGLVQPGGSLRLSCAASGFSFSDFWMSWVRQAPGKGLEWVATISQAGSEKDYVDSVKGRFTISRDNAKKSLYLQMNSLRAEDTAVYYCASGVYSFDYRGQGTLVTVSSGTGGGGSGGGGSGGGGSEFDVQMIQTPDSLAVSLGQRATISCRASESVDNYGISFMHWYQQKPGQSPKLLIYRASNLESGIPARFSGSGSRTDFTLTINPVETDDVATYYCQQNNKDPPTFGGGTKLEIKLEDLKNVFPPEVAVFEPSEAEISHTQKATLVCLATGFYPDHVELSWWVNGKEVHSGVCTDPQPLKEQPALNDSRYCLSSRLRVSATFWQNPRNHFRCQVQFYGLSENDEWTQDRAKPVTQIVSAEAWGRADCGFTSESYQQGVLSATILYEILLGKATLYAVLVSALVLMAMVKRKDSRGRAKRSGSGATNFSLLKQAGDVEENPGPTSMDWIWRILFLVGAATGAHSFEGGGGSQVQLQQSGAELVKPGASVKISCKASGYAFSSYWMNWVKQRPGKGLEWIGQIYPGDGDTTYNGKFKGKATLTADKSSSTVYMQLNSLTSEDSAVYFCVRYYYGSSGYFDYWGQGTTLTVSSTRIQNPDPAVYQLRDSKSSDKSVCLFTDFDSQTNVSQSKDSDVYITDKCVLDMRSMDFKSNSAVAWSNKSDFACANAFNNSIIPEDTFFPSPESSCDVKLVEKSFETDTNLNFQNLSVIGFRILLLKVAGFNLLMTLRLWSS

SEQ ID NO: 12544 - protein, 755 aa, Artificial Sequence
  Synthetic Polypeptide
MALPVTALLLPLALLLHAARPEVQLVESGGGLVQPGGSLRLSCAASGFSFSDFWMSWVRQAPGKGLEWVATISQAGSEKDYVDSVKGRFTISRDNAKKSLYLQMNSLRAEDTAVYYCASGVYSFDYRGQGTLVTVSSGTGGGGSGGGGSGGGGSEFDVQMIQTPSSLSASLGDRVTISCRASQDIGNYLNWYQQKPDGTVKLLIYYTSRLHSGVPSRFSGSGSGTEYSLTISNLEQEDIATYFCQQGSALPPTFGGGTKLEINLEDLKNVFPPEVAVFEPSEAEISHTQKATLVCLATGFYPDHVELSWWVNGKEVHSGVCTDPQPLKEQPALNDSRYCLSSRLRVSATFWQNPRNHFRCQVQFYGLSENDEWTQDRAKPVTQIVSAEAWGRADCGFTSESYQQGVLSATILYEILLGKATLYAVLVSALVLMAMVKRKDSRGRAKRSGSGATNFSLLKQAGDVEENPGPTSMDWIWRILFLVGAATGAHSFEALQLQQSGAELVRPGASVTLSCKASGYTFTDYEMHWVKQTPVHGLEWIGAIDPETGGTAYNQKFEGKAILTADKSSSTAYMELRSLTSEDSPVYYCARRRYYGSSSFDYWGQGTTLTVSSTRIQNPDPAVYQLRDSKSSDKSVCLFTDFDSQTNVSQSKDSDVYITDKCVLDMRSMDFKSNSAVAWSNKSDFACANAFNNSIIPEDTFFPSPESSCDVKLVEKSFETDTNLNFQNLSVIGFRILLLKVAGFNLLMTLRLWSS

SEQ ID NO: 12545 - protein, 759 aa, Artificial Sequence
  Synthetic Polypeptide
MALPVTALLLPLALLLHAARPEVQLVESGGGLVQPGGSLRLSCAASGFSFSDFWMSWVRQAPGKGLEWVATISQAGSEKDYVDSVKGRFTISRDNAKKSLYLQMNSLRAEDTAVYYCASGVYSFDYRGQGTLVTVSSGTGGGGSGGGGSGGGGSEFDIVLTQSPASLAVSLGQRATISCRASKSVSTSGYSYLHWYQQKPGQPPKLLIYLASNLESGVPARFSGSGSGTDFTLNIHPVEEEDAATYYCQHSRELPFTFGSGTKLEIKLEDLKNVFPPEVAVFEPSEAEISHTQKATLVCLATGFYPDHVELSWWVNGKEVHSGVCTDPQPLKEQPALNDSRYCLSSRLRVSATFWQNPRNHFRCQVQFYGLSENDEWTQDRAKPVTQIVSAEAWGRADCGFTSESYQQGVLSATILYEILLGKATLYAVLVSALVLMAMVKRKDSRGRAKRSGSGATNFSLLKQAGDVEENPGPTSMDWIWRILFLVGAATGAHSFEQVQLVESGGGLVQPGGSLKLSCAASGFDFSRYWMSWVRQAPGKGLEWIGEINPTSSTINFTPSLKDKVFISRDNAKNTLYLQMSKVRSEDTALYYCARGNYYRYGDAMDYWGQGTSVTVSTRIQNPDPAVYQLRDSKSSDKSVCLFTDFDSQTNVSQSKDSDVYITDKCVLDMRSMDFKSNSAVAWSNKSDFACANAFNNSIIPEDTFFPSPESSCDVKLVEKSFETDTNLNFQNLSVIGFRILLLKVAGFNLLMTLRLWSS

SEQ ID NO: 12546 - protein, 757 aa, Artificial Sequence
  Synthetic Polypeptide
MALPVTALLLPLALLLHAARPEVQLVESGGGLVQPGGSLRLSCAASGFSFSDFWMSWVRQAPGKGLEWVATISQAGSEKDYVDSVKGRFTISRDNAKKSLYLQMNSLRAEDTAVYYCASGVYSFDYRGQGTLVTVSSGTGGGGSGGGGSGGGGSEFDIQMTQSPSSLSASVGDRVTITCSASQDISNYLNWYQQKPGKAPKLLIYYTSNLHSGVPSRFSGSGSGTDFTLTISSLQPEDFATYYCQQYRKLPWTFGQGTKLEIKRLEDLKNVFPPEVAVFEPSEAEISHTQKATLVCLATGFYPDHVELSWWVNGKEVHSGVCTDPQPLKEQPALNDSRYCLSSRLRVSATFWQNPRNHFRCQVQFYGLSENDEWTQDRAKPVTQIVSAEAWGRADCGFTSESYQQGVLSATILYEILLGKATLYAVLVSALVLMAMVKRKDSRGRAKRSGSGATNFSLLKQAGDVEENPGPTSMDWIWRILFLVGAATGAHSFEQVQLVQSGAEVKKPGSSVKVSCKASGGTFSNYWMHWVRQAPGQGLEWMGATYRGHSDTYYNQKFKGRVTITADKSTSTAYMELSSLRSEDTAVYYCARGAIYDGYDVLDNWGQGTLVTVSSTRIQNPDPAVYQLRDSKSSDKSVCLFTDFDSQTNVSQSKDSDVYITDKCVLDMRSMDFKSNSAVAWSNKSDFACANAFNNSIIPEDTFFPSPESSCDVKLVEKSFETDTNLNFQNLSVIGFRILLLKVAGFNLLMTLRLWSS

SEQ ID NO: 12547 - protein, 757 aa, Artificial Sequence
  Synthetic Polypeptide
MALPVTALLLPLALLLHAARPEVQLVESGGGLVQPGGSLRLSCAASGFSFSDFWMSWVRQAPGKGLEWVATISQAGSEKDYVDSVKGRFTISRDNAKKSLYLQMNSLRAEDTAVYYCASGVYSFDYRGQGTLVTVSSGTGGGGSGGGGSGGGGSEFDIVLTQSPATLSLSPGDRATISCRASESVTILGSHLIYWYQQKPGQPPRLLIQLASNVQTGVPARFSGSGSRTDFTLTISSVEPEDFAVYYCLQSRTIPRTFGQGTKLEIKRLEDLKNVFPPEVAVFEPSEAEISHTQKATLVCLATGFYPDHVELSWWVNGKEVHSGVCTDPQPLKEQPALNDSRYCLSSRLRVSATFWQNPRNHFRCQVQFYGLSENDEWTQDRAKPVTQIVSAEAWGRADCGFTSESYQQGVLSATILYEILLGKATLYAVLVSALVLMAMVKRKDSRGRAKRSGSGATNFSLLKQAGDVEENPGPTSMDWIWRILFLVGAATGAHSFEQVQLVQSGPEVKKPGESVKISCKASGYTFRHYSMNWVKQAPGQGLKWMGRINTESGVPIYADDFKGRFSFTVDTSASTAYLEISSLTSEDTAVYFCSNDYLYSLDFWGQGTTLTVSSTRIQNPDPAVYQLRDSKSSDKSVCLFTDFDSQTNVSQSKDSDVYITDKCVLDMRSMDFKSNSAVAWSNKSDFACANAFNNSIIPEDTFFPSPESSCDVKLVEKSFETDTNLNFQNLSVIGFRILLLKVAGFNLLMTLRLWSS

SEQ ID NO: 12548 - protein, 758 aa, Artificial Sequence
  Synthetic Polypeptide
MALPVTALLLPLALLLHAARPEVQLVESGGGLVQPGGSLRLSCAASGFSFSDFWMSWVRQAPGKGLEWVATISQAGSEKDYVDSVKGRFTISRDNAKKSLYLQMNSLRAEDTAVYYCASGVYSFDYRGQGTLVTVSSGTGGGGSGGGGSGGGGSEFQSVLTQPPSVSGAPGQRVTISCTGSSSNIGAGFDVHWYQQLPGTAPKLLIYGNSNRPSGVPDRFSGSKSGTSASLAITGLQAEDEADYYCQSYDSSLSGYVFGTGTKVTVLGLEDLKNVFPPEVAVFEPSEAEISHTQKATLVCLATGFYPDHVELSWWVNGKEVHSGVCTDPQPLKEQPALNDSRYCLSSRLRVSATFWQNPRNHFRCQVQFYGLSENDEWTQDRAKPVTQIVSAEAWGRADCGFTSESYQQGVLSATILYEILLGKATLYAVLVSALVLMAMVKRKDSRGRAKRSGSGATNFSLLKQAGDVEENPGPTSMDWIWRILFLVGAATGAHSFEQVQLVQSGAEVKKPGASVKVSCKASGYTFTDYYMHWVRQAPGQRLEWMGWINPNSGGTNYAQKFQDRITVTRDTSSNTGYMELTRLRSDDTAVYYCARSPYSGVLDKWGQGTLVTVSSTRIQNPDPAVYQLRDSKSSDKSVCLFTDFDSQTNVSQSKDSDVYITDKCVLDMRSMDFKSNSAVAWSNKSDFACANAFNNSIIPEDTFFPSPESSCDVKLVEKSFETDTNLNFQNLSVIGFRILLLKVAGFNLLMTLRLWSS

SEQ ID NO: 12549 - protein, 755 aa, Artificial Sequence
  Synthetic Polypeptide
MALPVTALLLPLALLLHAARPEVQLVESGGGLVQPGGSLRLSCAASGFSFSDFWMSWVRQAPGKGLEWVATISQAGSEKDYVDSVKGRFTISRDNAKKSLYLQMNSLRAEDTAVYYCASGVYSFDYRGQGTLVTVSSGTGGGGSGGGGSGGGGSEFQAVLTQPPSASGTPGQRVTISCSGSSSNIGSYTVSWYQQLPGTAPKFLIYSNNQRPSGVPDRFSGSKSGTSASLAISGLQSEDEADYYCAAWDDSLNGYVFGTGTKVTVLGLEDLKNVFPPEVAVFEPSEAEISHTQKATLVCLATGFYPDHVELSWWVNGKEVHSGVCTDPQPLKEQPALNDSRYCLSSRLRVSATFWQNPRNHFRCQVQFYGLSENDEWTQDRAKPVTQIVSAEAWGRADCGFTSESYQQGVLSATILYEILLGKATLYAVLVSALVLMAMVKRKDSRGRAKRSGSGATNFSLLKQAGDVEENPGPTSMDWIWRILFLVGAATGAHSFEVQLVQSGAEVKKPGESLKISCKGSGYDFTTYWIGWVRQMPGKGLEWMGIIYPGDSDTRYSPSVRGRVTISADKSINTAYLQWSSLEASDTAMYYCARMWTFSQDGWGQGTLVTVSSTRIQNPDPAVYQLRDSKSSDKSVCLFTDFDSQTNVSQSKDSDVYITDKCVLDMRSMDFKSNSAVAWSNKSDFACANAFNNSIIPEDTFFPSPESSCDVKLVEKSFETDTNLNFQNLSVIGFRILLLKVAGFNLLMTLRLWSS

SEQ ID NO: 12550 - protein, 758 aa, Artificial Sequence
  Synthetic Polypeptide
MALPVTALLLPLALLLHAARPEVQLVESGGGLVQPGGSLRLSCAASGFSFSDFWMSWVRQAPGKGLEWVATISQAGSEKDYVDSVKGRFTISRDNAKKSLYLQMNSLRAEDTAVYYCASGVYSFDYRGQGTLVTVSSGTGGGGSGGGGSGGGGSEFDIVMTQSPDSLAVSLGERATINCKSSQSILYSSNQKNYLAWYQQKPGQSPKLLIYWASTRESGVPDRFSGSGSGTDFTLTISSLQAEDVAVYYCHQYISSYTFGQGTKLEIKLEDLKNVFPPEVAVFEPSEAEISHTQKATLVCLATGFYPDHVELSWWVNGKEVHSGVCTDPQPLKEQPALNDSRYCLSSRLRVSATFWQNPRNHFRCQVQFYGLSENDEWTQDRAKPVTQIVSAEAWGRADCGFTSESYQQGVLSATILYEILLGKATLYAVLVSALVLMAMVKRKDSRGRAKRSGSGATNFSLLKQAGDVEENPGPTSMDWIWRILFLVGAATGAHSFEQVQLVQSGAEVKKPGASVKVSCKASGYTFASQWMHWMRQAPGQGLEWIGWINPGNVNTKYNEKFKGRATLTVDTSTNTAYMELSSLRSEDTAVYYCARSTWYRPLDYWGQGTLVTVSSTRIQNPDPAVYQLRDSKSSDKSVCLFTDFDSQTNVSQSKDSDVYITDKCVLDMRSMDFKSNSAVAWSNKSDFACANAFNNSIIPEDTFFPSPESSCDVKLVEKSFETDTNLNFQNLSVIGFRILLLKVAGFNLLMTLRLWSS

SEQ ID NO: 12551 - protein, 758 aa, Artificial Sequence
  Synthetic Polypeptide
MALPVTALLLPLALLLHAARPEVQLVESGGGLVQPGGSLRLSCAASGFSFSDFWMSWVRQAPGKGLEWVATISQAGSEKDYVDSVKGRFTISRDNAKKSLYLQMNSLRAEDTAVYYCASGVYSFDYRGQGTLVTVSSGTGGGGSGGGGSGGGGSEFDHIVLTQSPSSLSASLGDRVTISCRASQDISTYLNWYQQKPDGTVKLLIFYTSRLHAGVPSRFSGSGSGTHHSLTISNLEQEDIATYFCQQGNSLPFTFGSGTKLEIKRLEDLKNVFPPEVAVFEPSEAEISHTQKATLVCLATGFYPDHVELSWWVNGKEVHSGVCTDPQPLKEQPALNDSRYCLSSRLRVSATFWQNPRNHFRCQVQFYGLSENDEWTQDRAKPVTQIVSAEAWGRADCGFTSESYQQGVLSATILYEILLGKATLYAVLVSALVLMAMVKRKDSRGRAKRSGSGATNFSLLKQAGDVEENPGPTSMDWIWRILFLVGAATGAHSFEQVQLKESGPELEKPGASVKISCKASGYSFTAYSMNWVKQNNGMSLEWIGSIDPYYGDTKYAQKFKGKATLTVDKASSTAYLQLKSLTSEDSAVYYCARRMITTGDWYFDVWGAGTTVTVSSTRIQNPDPAVYQLRDSKSSDKSVCLFTDFDSQTNVSQSKDSDVYITDKCVLDMRSMDFKSNSAVAWSNKSDFACANAFNNSIIPEDTFFPSPESSCDVKLVEKSFETDTNLNFQNLSVIGFRILLLKVAGFNLLMTLRLWSS

SEQ ID NO: 12552 - protein, 758 aa, Artificial Sequence; identical to SEQ ID NO: 12551
  Synthetic Polypeptide

SEQ ID NO: 12553 - protein, 758 aa, Artificial Sequence
  Synthetic Polypeptide
MALPVTALLLPLALLLHAARPEVQLVESGGGLVQPGGSLRLSCAASGFSFSDFWMSWVRQAPGKGLEWVATISQAGSEKDYVDSVKGRFTISRDNAKKSLYLQMNSLRAEDTAVYYCASGVYSFDYRGQGTLVTVSSGTGGGGSGGGGSGGGGSEFDEIVLTQSPATLSLSPGERATLSCRASQSVSSYLAWYQQKPGQAPRLLIYDASNRATGIPARFSGSGSGTDFTLTISSLEPEDFAVYYCQQRSNWPITFGQGTRLEIKLEDLKNVFPPEVAVFEPSEAEISHTQKATLVCLATGFYPDHVELSWWVNGKEVHSGVCTDPQPLKEQPALNDSRYCLSSRLRVSATFWQNPRNHFRCQVQFYGLSENDEWTQDRAKPVTQIVSAEAWGRADCGFTSESYQQGVLSATILYEILLGKATLYAVLVSALVLMAMVKRKDSRGRAKRSGSGATNFSLLKQAGDVEENPGPTSMDWIWRILFLVGAATGAHSFEEVQLVESGGGLVQPGRSLRLSCAASGFTFNDYAMHWVRQAPGKGLEWVSTISWNSGSIGYADSVKGRFTISRDNAKKSLYLQMNSLRAEDTALYYCAKDIQYGNYYYGMDVWGQGTTVTVSSTRIQNPDPAVYQLRDSKSSDKSVCLFTDFDSQTNVSQSKDSDVYITDKCVLDMRSMDFKSNSAVAWSNKSDFACANAFNNSIIPEDTFFPSPESSCDVKLVEKSFETDTNLNFQNLSVIGFRILLLKVAGFNLLMTLRLWSS

SEQ ID NO: 12554 - protein, 760 aa, Artificial Sequence
  Synthetic Polypeptide
MALPVTALLLPLALLLHAARPEVQLVESGGGLVQPGGSLRLSCAASGFSFSDFWMSWVRQAPGKGLEWVATISQAGSEKDYVDSVKGRFTISRDNAKKSLYLQMNSLRAEDTAVYYCASGVYSFDYRGQGTLVTVSSGTGGGGSGGGGSGGGGSEFDIVMTQTPLSLPVTPGEPASISCRSSKSLLHSNGITYLYWYLQKPGQSPQLLIYQMSNLVSGVPDRFSGSGSGTDFTLKISRVEAEDVGVYYCAQNLELPYTFGGGTKVEIKRLEDLKNVFPPEVAVFEPSEAEISHTQKATLVCLATGFYPDHVELSWWVNGKEVHSGVCTDPQPLKEQPALNDSRYCLSSRLRVSATFWQNPRNHFRCQVQFYGLSENDEWTQDRAKPVTQIVSAEAWGRADCGFTSESYQQGVLSATILYEILLGKATLYAVLVSALVLMAMVKRKDSRGRAKRSGSGATNFSLLKQAGDVEENPGPTSMDWIWRILFLVGAATGAHSFEQVQLVQSGAEVKKPGSSVKVSCKASGYAFSYSWINWVRQAPGQGLEWMGRIFPGDGDTDYNGKFKGRVTITADKSTSTAYMELSSLRSEDTAVYYCARNVFDGYWLVYWGQGTLVTVSSTRIQNPDPAVYQLRDSKSSDKSVCLFTDFDSQTNVSQSKDSDVYITDKCVLDMRSMDFKSNSAVAWSNKSDFACANAFNNSIIPEDTFFPSPESSCDVKLVEKSFETDTNLNFQNLSVIGFRILLLKVAGFNLLMTLRLWSS

SEQ ID NO: 12555 - protein, 761 aa, Artificial Sequence
  Synthetic Polypeptide
MALPVTALLLPLALLLHAARPEVQLVESGGGLVQPGGSLRLSCAASGFSFSDFWMSWVRQAPGKGLEWVATISQAGSEKDYVDSVKGRFTISRDNAKKSLYLQMNSLRAEDTAVYYCASGVYSFDYRGQGTLVTVSSGTGGGGSGGGGSGGGGSEFDIQMTQSPSSLSASVGDRVTITCRSSQSIVHSVGNTFLEWYQQKPGKAPKLLIYKVSNRFSGVPSRFSGSGSGTDFTLTISSLQPEDFATYYCFQGSQFPYTFGQGTKVEIKRLEDLKNVFPPEVAVFEPSEAEISHTQKATLVCLATGFYPDHVELSWWVNGKEVHSGVCTDPQPLKEQPALNDSRYCLSSRLRVSATFWQNPRNHFRCQVQFYGLSENDEWTQDRAKPVTQIVSAEAWGRADCGFTSESYQQGVLSATILYEILLGKATLYAVLVSALVLMAMVKRKDSRGRAKRSGSGATNFSLLKQAGDVEENPGPTSMDWIWRILFLVGAATGAHSFEEVQLVESGGGLVQPGGSLRLSCAASGYEFSRSWMNWVRQAPGKGLEWVGRIYPGDGDTNYSGKFKGRFTISADTSKNTAYLQMNSLRAEDTAVYYCARDGSSWDWYFDVWGQGTLVTVSSTRIQNPDPAVYQLRDSKSSDKSVCLFTDFDSQTNVSQSKDSDVYITDKCVLDMRSMDFKSNSAVAWSNKSDFACANAFNNSIIPEDTFFPSPESSCDVKLVEKSFETDTNLNFQNLSVIGFRILLLKVAGFNLLMTLRLWSS

SEQ ID NO: 12556 - protein, 759 aa, Artificial Sequence
  Synthetic Polypeptide
MALPVTALLLPLALLLHAARPEVQLVESGGGLVQPGGSLRLSCAASGFSFSDFWMSWVRQAPGKGLEWVATISQAGSEKDYVDSVKGRFTISRDNAKKSLYLQMNSLRAEDTAVYYCASGVYSFDYRGQGTLVTVSSGTGGGGSGGGGSGGGGSEFDIQMTQSPSSLSASVGDRVTITCRASQTIWSYLNWYQQRPGKAPNLLIYAASSLQSGVPSRFSGRGSGTDFTLTISSLQAEDFATYYCQQSYSIPQIFGQGTKLEIKLEDLKNVFPPEVAVFEPSEAEISHTQKATLVCLATGFYPDHVELSWWVNGKEVHSGVCTDPQPLKEQPALNDSRYCLSSRLRVSATFWQNPRNHFRCQVQFYGLSENDEWTQDRAKPVTQIVSAEAWGRADCGFTSESYQQGVLSATILYEILLGKATLYAVLVSALVLMAMVKRKDSRGRAKRSGSGATNFSLLKQAGDVEENPGPTSMDWIWRILFLVGAATGAHSFEQVQLQQSGPGLVKPSQTLSLTCAISGDSVSSNSAAWNWIRQSPSRGLEWLGRTYYRSKWYNDYAVSVKSRITINPDTSKNQFSLQLNSVTPEDTAVYYCAREVTGDLEDAFDIWGQGTMVTVSSTRIQNPDPAVYQLRDSKSSDKSVCLFTDFDSQTNVSQSKDSDVYITDKCVLDMRSMDFKSNSAVAWSNKSDFACANAFNNSIIPEDTFFPSPESSCDVKLVEKSFETDTNLNFQNLSVIGFRILLLKVAGFNLLMTLRLWSS

SEQ ID NO: 12557 - protein, 752 aa, Artificial Sequence
  Synthetic Polypeptide
MALPVTALLLPLALLLHAARPEVQLVESGGGLVQPGGSLRLSCAASGFSFSDFWMSWVRQAPGKGLEWVATISQAGSEKDYVDSVKGRFTISRDNAKKSLYLQMNSLRAEDTAVYYCASGVYSFDYRGQGTLVTVSSGTGGGGSGGGGSGGGGSEFDIQMTQSPATIENTSLSASVGDRVTITCRASQGISSWLTWYQQKPEKAPKSLIYAASSLQSGVPSRFSGSGSGTDFTLTISSLQPEDFATYYCQQYDSYPITFGQGTRLEIKLEDLKNVFPPEVAVFEPSEAEISHTQKATLVCLATGFYPDHVELSWWVNGKEVHSGVCTDPQPLKEQPALNDSRYCLSSRLRVSATFWQNPRNHFRCQVQFYGLSENDEWTQDRAKPVTQIVSAEAWGRADCGFTSESYQQGVLSATILYEILLGKATLYAVLVSALVLMAMVKRKDSRGRAKRSGSGATNFSLLKQAGDVEENPGPTSMDWIWRILFLVGAATGAHSFEQVQLQQWGAGLLKPSETLSLTCAVYGGSFSAYYWSWIRQPPGKGLEWIGDINHGGGTNYNPSLKSRVTISVDTSKNQFSLKLNSVTAADTAVYYCASLTAYWGQGSLVTVSSTRIQNPDPAVYQLRDSKSSDKSVCLFTDFDSQTNVSQSKDSDVYITDKCVLDMRSMDFKSNSAVAWSNKSDFACANAFNNSIIPEDTFFPSPESSCDVKLVEKSFETDTNLNFQNLSVIGFRILLLKVAGFNLLMTLRLWSS

SEQ ID NO: 12558 - protein, 757 aa, Artificial Sequence
  Synthetic Polypeptide
MALPVTALLLPLALLLHAARPEVQLVESGGGLVQPGGSLRLSCAASGFSFSDFWMSWVRQAPGKGLEWVATISQAGSEKDYVDSVKGRFTISRDNAKKSLYLQMNSLRAEDTAVYYCASGVYSFDYRGQGTLVTVSSGTGGGGSGGGGSGGGGSEFDEIVLTQSPDSLAVSLGERATINCKASQSVDFDGDSYLNWYQQKPGQPPKVLIYAASTLQSGVPSRFSGSGSGTDFTLTINSLEAEDAATYYCQQSNEDPWTFGGGTKVEIKLEDLKNVFPPEVAVFEPSEAEISHTQKATLVCLATGFYPDHVELSWWVNGKEVHSGVCTDPQPLKEQPALNDSRYCLSSRLRVSATFWQNPRNHFRCQVQFYGLSENDEWTQDRAKPVTQIVSAEAWGRADCGFTSESYQQGVLSATILYEILLGKATLYAVLVSALVLMAMVKRKDSRGRAKRSGSGATNFSLLKQAGDVEENPGPTSMDWIWRILFLVGAATGAHSFEQVQLVQSGAEVKKPGASVKVSCKVSGYTFTDYYITWVRQAPGQALEWMGWIYPGSGNTKYSQKFQGRFVFSVDTSASTAYLQLSSLKAEDTAVYYCANYGNYWFAYWGQGTLVTVSSTRIQNPDPAVYQLRDSKSSDKSVCLFTDFDSQTNVSQSKDSDVYITDKCVLDMRSMDFKSNSAVAWSNKSDFACANAFNNSIIPEDTFFPSPESSCDVKLVEKSFETDTNLNFQNLSVIGFRILLLKVAGFNLLMTLRLWSS

SEQ ID NO: 12559 - protein, 754 aa, Artificial Sequence
  Synthetic Polypeptide
MALPVTALLLPLALLLHAARPEVQLVESGGGLVQPGGSLRLSCAASGFSFSDFWMSWVRQAPGKGLEWVATISQAGSEKDYVDSVKGRFTISRDNAKKSLYLQMNSLRAEDTAVYYCASGVYSFDYRGQGTLVTVSSGTGGGGSGGGGSGGGGSEFDIQMTQSPSSLSASVGDRVTITCRASQGISSWLAWYQQKPEKAPKSLIYAASSLQSGVPSRFSGSGSGTDFTLTISSLQPEDFATYYCQQYNSYPPTFGGGTKVEIKLEDLKNVFPPEVAVFEPSEAEISHTQKATLVCLATGFYPDHVELSWWVNGKEVHSGVCTDPQPLKEQPALNDSRYCLSSRLRVSATFWQNPRNHFRCQVQFYGLSENDEWTQDRAKPVTQIVSAEAWGRADCGFTSESYQQGVLSATILYEILLGKATLYAVLVSALVLMAMVKRKDSRGRAKRSGSGATNFSLLKQAGDVEENPGPTSMDWIWRILFLVGAATGAHSFEEVQLVQSGGGLVHPGGSLRLSCAGSGFAFSSSTMHWIRQAPGKGLEWISLIGSGGGIYYGDSVKGRFTISRDNAKNSLYLQMNSLRAEDMAVYYCVRGYFDWVDYFDYWGQGTLVTVSSTRIQNPDPAVYQLRDSKSSDKSVCLFTDFDSQTNVSQSKDSDVYITDKCVLDMRSMDFKSNSAVAWSNKSDFACANAFNNSIIPEDTFFPSPESSCDVKLVEKSFETDTNLNFQNLSVIGFRILLLKVAGFNLLMTLRLWSS

SEQ ID NO: 12560 - protein, 764 aa, Artificial Sequence
  Synthetic Polypeptide
MALPVTALLLPLALLLHAARPEVQLVESGGGLVQPGGSLRLSCAASGFSFSDFWMSWVRQAPGKGLEWVATISQAGSEKDYVDSVKGRFTISRDNAKKSLYLQMNSLRAEDTAVYYCASGVYSFDYRGQGTLVTVSSGTGGGGSGGGGSGGGGSEFDDIVMTQSPDSLTVSLGERTTINCKSSQSVLDSSKNKNSLAWYQQKPGQPPKLLLSWASTRESGIPDRFSGSGSGTDFTLTIDSLQPEDSATYYCQQSAHFPITFGQGTRLEIKLEDLKNVFPPEVAVFEPSEAEISHTQKATLVCLATGFYPDHVELSWWVNGKEVHSGVCTDPQPLKEQPALNDSRYCLSSRLRVSATFWQNPRNHFRCQVQFYGLSENDEWTQDRAKPVTQIVSAEAWGRADCGFTSESYQQGVLSATILYEILLGKATLYAVLVSALVLMAMVKRKDSRGRAKRSGSGATNFSLLKQAGDVEENPGPTSMDWIWRILFLVGAATGAHSFEQVQLVQSGAEVKKPGASVKVSCKASGYTFTNYGMNWVKQAPGQGLKWMGWINTYTGEPTYADDFKGRVTMTSDTSTSTAYLELHNLRSDDTAVYYCARWSWSDGYYVYFDYWGQGTTVTVSSTRIQNPDPAVYQLRDSKSSDKSVCLFTDFDSQTNVSQSKDSDVYITDKCVLDMRSMDFKSNSAVAWSNKSDFACANAFNNSIIPEDTFFPSPESSCDVKLVEKSFETDTNLNFQNLSVIGFRILLLKVAGFNLLMTLRLWSS

SEQ ID NO: 12561 - protein, 760 aa, Artificial Sequence
  Synthetic Polypeptide
MALPVTALLLPLALLLHAARPEVQLVESGGGLVQPGGSLRLSCAASGFSFSDFWMSWVRQAPGKGLEWVATISQAGSEKDYVDSVKGRFTISRDNAKKSLYLQMNSLRAEDTAVYYCASGVYSFDYRGQGTLVTVSSGTGGGGSGGGGSGGGGSEFDEIVLTQSPGSLAVSPGERVTMSCKSSQSVFFSSSQKNYLAWYQQIPGQSPRLLIYWASTRESGVPDRFTGSGSGTDFTLTISSVQPEDLAIYYCHQYLSSRTFGQGTKLEIKRLEDLKNVFPPEVAVFEPSEAEISHTQKATLVCLATGFYPDHVELSWWVNGKEVHSGVCTDPQPLKEQPALNDSRYCLSSRLRVSATFWQNPRNHFRCQVQFYGLSENDEWTQDRAKPVTQIVSAEAWGRADCGFTSESYQQGVLSATILYEILLGKATLYAVLVSALVLMAMVKRKDSRGRAKRSGSGATNFSLLKQAGDVEENPGPTSMDWIWRILFLVGAATGAHSFEQVQLQQPGAEVVKPGASVKMSCKASGYTFTSYYIHWIKQTPGQGLEWVGVIYPGNDDISYNQKFQGKATLTADKSSTTAYMQLSSLTSEDSAVYYCAREVRLRYFDVWGQGTTVTVSSTRIQNPDPAVYQLRDSKSSDKSVCLFTDFDSQTNVSQSKDSDVYITDKCVLDMRSMDFKSNSAVAWSNKSDFACANAFNNSIIPEDTFFPSPESSCDVKLVEKSFETDTNLNFQNLSVIGFRILLLKVAGFNLLMTLRLWSS

SEQ ID NO: 12562 - protein, 764 aa, Artificial Sequence
  Synthetic Polypeptide
MALPVTALLLPLALLLHAARPEVQLVESGGGLVQPGGSLRLSCAASGFSFSDFWMSWVRQAPGKGLEWVATISQAGSEKDYVDSVKGRFTISRDNAKKSLYLQMNSLRAEDTAVYYCASGVYSFDYRGQGTLVTVSSGTGGGGSGGGGSGGGGSEFDVLLTQSPLSLPVTLGQPASISCRSSQTIVHSNGNTYLEWFQQRPGQSPRLLIYQVSNRFSGVPDRFSGSGSGTDFTLKISRVEAEDVGVYYCFQGSHVPRTFGGGTKVEIKRALEDLKNVFPPEVAVFEPSEAEISHTQKATLVCLATGFYPDHVELSWWVNGKEVHSGVCTDPQPLKEQPALNDSRYCLSSRLRVSATFWQNPRNHFRCQVQFYGLSENDEWTQDRAKPVTQIVSAEAWGRADCGFTSESYQQGVLSATILYEILLGKATLYAVLVSALVLMAMVKRKDSRGRAKRSGSGATNFSLLKQAGDVEENPGPTSMDWIWRILFLVGAATGAHSFEQIQLVQSGSELKKPGASVKVSCKASGYTFTNYGMNWVRQAPGQGLKWMGWINTNTGEPKYAEEFKGRFALSLDTSVSTAYLQINSLKAEDTAVYFCARGYGNYARGAWLAYWGQGTLVTVSSTRIQNPDPAVYQLRDSKSSDKSVCLFTDFDSQTNVSQSKDSDVYITDKCVLDMRSMDFKSNSAVAWSNKSDFACANAFNNSIIPEDTFFPSPESSCDVKLVEKSFETDTNLNFQNLSVIGFRILLLKVAGFNLLMTLRLWSS

SEQ ID NO: 12563 - protein, 749 aa, Artificial Sequence
  Synthetic Polypeptide
MALPVTALLLPLALLLHAARPEVQLVESGGGLVQPGGSLRLSCAASGFSFSDFWMSWVRQAPGKGLEWVATISQAGSEKDYVDSVKGRFTISRDNAKKSLYLQMNSLRAEDTAVYYCASGVYSFDYRGQGTLVTVSSGTGGGGSGGGGSGGGGSEFDEIVLTQSPATLSLSPGERATLSCSASSSINYIYWLQQKPGQAPRILIYLTSNLASGVPARFSGSGSGTDFTLTISSLEPEDFAVYYCLQWSSNPLTFGGGTKVEIKLEDLKNVFPPEVAVFEPSEAEISHTQKATLVCLATGFYPDHVELSWWVNGKEVHSGVCTDPQPLKEQPALNDSRYCLSSRLRVSATFWQNPRNHFRCQVQFYGLSENDEWTQDRAKPVTQIVSAEAWGRADCGFTSESYQQGVLSATILYEILLGKATLYAVLVSALVLMAMVKRKDSRGRAKRSGSGATNFSLLKQAGDVEENPGPTSMDWIWRILFLVGAATGAHSFEEVQLVESGGGLVKPGGSLRLSCAASGFTFSSYDMSWVRQAPGKGLEWVSTISSGGSYTYYLDSIKGRFTISRDNAKNSLYLQMNSLRAEDTAVYYCARQGLDYWGRGTLVTVSSTRIQNPDPAVYQLRDSKSSDKSVCLFTDFDSQTNVSQSKDSDVYITDKCVLDMRSMDFKSNSAVAWSNKSDFACANAFNNSIIPEDTFFPSPESSCDVKLVEKSFETDTNLNFQNLSVIGFRILLLKVAGFNLLMTLRLWSS

SEQ ID NO: 12564 - protein, 758 aa, Artificial Sequence
  Synthetic Polypeptide
MALPVTALLLPLALLLHAARPEVQLVESGGGLVQPGGSLRLSCAASGFSFSDFWMSWVRQAPGKGLEWVATISQAGSEKDYVDSVKGRFTISRDNAKKSLYLQMNSLRAEDTAVYYCASGVYSFDYRGQGTLVTVSSGTGGGGSGGGGSGGGGSEFDIVMTQSPDSLAVSLGERATINCRASKSVSTSGYSFMHWYQQKPGQPPKLLIYLASNLESGVPDRFSGSGSGTDFTLTISSLQAEDVAVYYCQHSREVPWTFGQGTKVEIKRLEDLKNVFPPEVAVFEPSEAEISHTQKATLVCLATGFYPDHVELSWWVNGKEVHSGVCTDPQPLKEQPALNDSRYCLSSRLRVSATFWQNPRNHFRCQVQFYGLSENDEWTQDRAKPVTQIVSAEAWGRADCGFTSESYQQGVLSATILYEILLGKATLYAVLVSALVLMAMVKRKDSRGRAKRSGSGATNFSLLKQAGDVEENPGPTSMDWIWRILFLVGAATGAHSFEQVQLVQSGAEVKKPGASVKVSCKASGYTFTNYGMNWVRQAPGQGLEWMGWINTYTGEPTYADAFKGRFAFSLDTSTSTAYLQINSLRSDDTAVYYCARDYGDYGMDYWGQGTTVTVSSTRIQNPDPAVYQLRDSKSSDKSVCLFTDFDSQTNVSQSKDSDVYITDKCVLDMRSMDFKSNSAVAWSNKSDFACANAFNNSIIPEDTFFPSPESSCDVKLVEKSFETDTNLNFQNLSVIGFRILLLKVAGFNLLMTLRLWSS

SEQ ID NO: 12565 - protein, 754 aa, Artificial Sequence
  Synthetic Polypeptide
MALPVTALLLPLALLLHAARPEVQLVESGGGLVQPGGSLRLSCAASGFSFSDFWMSWVRQAPGKGLEWVATISQAGSEKDYVDSVKGRFTISRDNAKKSLYLQMNSLRAEDTAVYYCASGVYSFDYRGQGTLVTVSSGTGGGGSGGGGSGGGGSEFDIVMTQTPLTLSVTIGQPASISCKSSQSLLDSDGKTYLNWLLQRPGQSPERLIYLVSKLDSGVPDRFTGSGSGTDFTLKISRVEAEDLGVYCCWQGTHFPYTFGGGTKVEIKGLEDLKNVFPPEVAVFEPSEAEISHTQKATLVCLATGFYPDHVELSWWVNGKEVHSGVCTDPQPLKEQPALNDSRYCLSSRLRVSATFWQNPRNHFRCQVQFYGLSENDEWTQDRAKPVTQIVSAEAWGRADCGFTSESYQQGVLSATILYEILLGKATLYAVLVSALVLMAMVKRKDSRGRAKRSGSGATNFSLLKQAGDVEENPGPTSMDWIWRILFLVGAATGAHSFEQVQLQQPGAELVRPGASVKLSCKASGYTFTSYWMNWVKQRPGQGLEWIGMIDPSDSETHYNHIFKDKATLTVDKSSSTAYLQLSSLTSEDSAVYYCARNLYLWGQGTSVTVSSTRIQNPDPAVYQLRDSKSSDKSVCLFTDFDSQTNVSQSKDSDVYITDKCVLDMRSMDFKSNSAVAWSNKSDFACANAFNNSIIPEDTFFPSPESSCDVKLVEKSFETDTNLNFQNLSVIGFRILLLKVAGFNLLMTLRLWSS

SEQ ID NO: 12566 - protein, 762 aa, Artificial Sequence
  Synthetic Polypeptide
MALPVTALLLPLALLLHAARPEVQLVESGGGLVQPGGSLRLSCAASGFSFSDFWMSWVRQAPGKGLEWVATISQAGSEKDYVDSVKGRFTISRDNAKKSLYLQMNSLRAEDTAVYYCASGVYSFDYRGQGTLVTVSSGTGGGGSGGGGSGGGGSEFDIVMTQSPDSLAVSLGERATINCESSQSLLNSGNQKNYLTWYQQKPGQPPKPLIYWASTRESGVPDRFSGSGSGTDFTLTISSLQAEDVAVYYCQNDYSYPYTFGQGTKLEIKRLEDLKNVFPPEVAVFEPSEAEISHTQKATLVCLATGFYPDHVELSWWVNGKEVHSGVCTDPQPLKEQPALNDSRYCLSSRLRVSATFWQNPRNHFRCQVQFYGLSENDEWTQDRAKPVTQIVSAEAWGRADCGFTSESYQQGVLSATILYEILLGKATLYAVLVSALVLMAMVKRKDSRGRAKRSGSGATNFSLLKQAGDVEENPGPTSMDWIWRILFLVGAATGAHSFEEVQLVQSGAEVKKPGESLKISCKGSGYSFTDYYMKWARQMPGKGLEWMGDIIPSNGATFYNQKFKGQVTISADKSISTTYLQWSSLKASDTAMYYCARSHLLRASWFAYWGQGTMVTVSSTRIQNPDPAVYQLRDSKSSDKSVCLFTDFDSQTNVSQSKDSDVYITDKCVLDMRSMDFKSNSAVAWSNKSDFACANAFNNSIIPEDTFFPSPESSCDVKLVEKSFETDTNLNFQNLSVIGFRILLLKVAGFNLLMTLRLWSS

SEQ ID NO: 12567 - protein, 757 aa, Artificial Sequence
  Synthetic Polypeptide
MALPVTALLLPLALLLHAARPEVQLVESGGGLVQPGGSLRLSCAASGFSFSDFWMSWVRQAPGKGLEWVATISQAGSEKDYVDSVKGRFTISRDNAKKSLYLQMNSLRAEDTAVYYCASGVYSFDYRGQGTLVTVSSGTGGGGSGGGGSGGGGSEFDIQMTQSTSSLSASLGDRVTISCSASQGINNYLNWYQQKPDGTVELLIYYTSTLQSGVPSRFSGSGSGTDYSLTISNLEPEDIGTYYCQQYSKLPRTFGGGTKLEIKLEDLKNVFPPEVAVFEPSEAEISHTQKATLVCLATGFYPDHVELSWWVNGKEVHSGVCTDPQPLKEQPALNDSRYCLSSRLRVSATFWQNPRNHFRCQVQFYGLSENDEWTQDRAKPVTQIVSAEAWGRADCGFTSESYQQGVLSATILYEILLGKATLYAVLVSALVLMAMVKRKDSRGRAKRSGSGATNFSLLKQAGDVEENPGPTSMDWIWRILFLVGAATGAHSFEQVQLQQSGSELMMPGASVKISCKATGYTFSNYWIEWVKQRPGHGLEWIGEILPGTGRTIYNEKFKGKATFTADISSNTVQMQLSSLTSEDSAVYYCARRDYYGNFYYAMDYWGQGTSVTVSSTRIQNPDPAVYQLRDSKSSDKSVCLFTDFDSQTNVSQSKDSDVYITDKCVLDMRSMDFKSNSAVAWSNKSDFACANAFNNSIIPEDTFFPSPESSCDVKLVEKSFETDTNLNFQNLSVIGFRILLLKVAGFNLLMTLRLWSS

SEQ ID NO: 12568 - protein, 752 aa, Artificial Sequence
  Synthetic Polypeptide
MALPVTALLLPLALLLHAARPEVQLVESGGGLVQPGGSLRLSCAASGFSFSDFWMSWVRQAPGKGLEWVATISQAGSEKDYVDSVKGRFTISRDNAKKSLYLQMNSLRAEDTAVYYCASGVYSFDYRGQGTLVTVSSGTGGGGSGGGGSGGGGSEFDIQMTQSPASLSVSVGETVTITCRASENIYSNLAWYQQKQGKSPQLLVYAATNLADGVPSRFSGSGSGTQYSLKINSLQSEDFGSYYCQHFWGTWTFGGGTTLEIKLEDLKNVFPPEVAVFEPSEAEISHTQKATLVCLATGFYPDHVELSWWVNGKEVHSGVCTDPQPLKEQPALNDSRYCLSSRLRVSATFWQNPRNHFRCQVQFYGLSENDEWTQDRAKPVTQIVSAEAWGRADCGFTSESYQQGVLSATILYEILLGKATLYAVLVSALVLMAMVKRKDSRGRAKRSGSGATNFSLLKQAGDVEENPGPTSMDWIWRILFLVGAATGAHSFEEVQLQQSGPELVKPGASVKMSCKASGYTFTDYYMKWMKQSHGKSLEWIGDINPNNGGTTYNQKFKGKATLTVDKSSSTAYMQLNSLTSEDSAVYYCARDYGYGYFDYWGQGTTLTVSSTRIQNPDPAVYQLRDSKSSDKSVCLFTDFDSQTNVSQSKDSDVYITDKCVLDMRSMDFKSNSAVAWSNKSDFACANAFNNSIIPEDTFFPSPESSCDVKLVEKSFETDTNLNFQNLSVIGFRILLLKVAGFNLLMTLRLWSS

SEQ ID NO: 12569 - protein, 755 aa, Artificial Sequence
  Synthetic Polypeptide
MALPVTALLLPLALLLHAARPEVQLVESGGGLVQPGGSLRLSCAASGFSFSDFWMSWVRQAPGKGLEWVATISQAGSEKDYVDSVKGRFTISRDNAKKSLYLQMNSLRAEDTAVYYCASGVYSFDYRGQGTLVTVSSGTGGGGSGGGGSGGGGSEFEIVLTQSPGTLSLSPGERATLSCRASQSVGGYLAWYQQKPGQAPRLLIYDASNRATGIPARFSGSGSGTDFTLTISSLEPEDFAVYYCQQRNNWPPMYTFGQGTKLEIKRLEDLKNVFPPEVAVFEPSEAEISHTQKATLVCLATGFYPDHVELSWWVNGKEVHSGVCTDPQPLKEQPALNDSRYCLSSRLRVSATFWQNPRNHFRCQVQFYGLSENDEWTQDRAKPVTQIVSAEAWGRADCGFTSESYQQGVLSATILYEILLGKATLYAVLVSALVLMAMVKRKDSRGRAKRSGSGATNFSLLKQAGDVEENPGPTSMDWIWRILFLVGAATGAHSFEQVQLVQSGAEVKKPGSSVKVSCKASGGTFSSYAISWVRQAPGQGLEWMGGIIPILGTANYAQKFQGRVTITADESTSTAYMELSSLRSEDTAVYYCARWGGGAFDIWGQGTMVTVSSTRIQNPDPAVYQLRDSKSSDKSVCLFTDFDSQTNVSQSKDSDVYITDKCVLDMRSMDFKSNSAVAWSNKSDFACANAFNNSIIPEDTFFPSPESSCDVKLVEKSFETDTNLNFQNLSVIGFRILLLKVAGFNLLMTLRLWSS

SEQ ID NO: 12570 - protein, 750 aa, Artificial Sequence
  Synthetic Polypeptide
MALPVTALLLPLALLLHAARPEVQLVESGGGLVQPGGSLRLSCAASGFSFSDFWMSWVRQAPGKGLEWVATISQAGSEKDYVDSVKGRFTISRDNAKKSLYLQMNSLRAEDTAVYYCASGVYSFDYRGQGTLVTVSSGTGGGGSGGGGSGGGGSEFQIVLTQSPALMSASPGEKVTMTCSASSSVRYMYWYQQKPRSSPKPWIHLTSNLASGVPARFSGSGSGTSYSLTISSMEAEDAATYYCQQWSSHPFTFGSGTKLEIKLEDLKNVFPPEVAVFEPSEAEISHTQKATLVCLATGFYPDHVELSWWVNGKEVHSGVCTDPQPLKEQPALNDSRYCLSSRLRVSATFWQNPRNHFRCQVQFYGLSENDEWTQDRAKPVTQIVSAEAWGRADCGFTSESYQQGVLSATILYEILLGKATLYAVLVSALVLMAMVKRKDSRGRAKRSGSGATNFSLLKQAGDVEENPGPTSMDWIWRILFLVGAATGAHSFEDVQLQESGPGLVKPSQSLSLTCTVTGFSITSDYSWNWIRQFPGNKLEWMGYISYSGHTSYNPSLESRISITRDTSKNQFFLQLNSVTTEDTATYYCTRGNWDVVYWGQGTLVTVSATRIQNPDPAVYQLRDSKSSDKSVCLFTDFDSQTNVSQSKDSDVYITDKCVLDMRSMDFKSNSAVAWSNKSDFACANAFNNSIIPEDTFFPSPESSCDVKLVEKSFETDTNLNFQNLSVIGFRILLLKVAGFNLLMTLRLWSS

SEQ ID NO: 12571 - protein, 760 aa, Artificial Sequence
  Synthetic Polypeptide
MALPVTALLLPLALLLHAARPEVQLVESGGGLVQPGGSLRLSCAASGFSFSDFWMSWVRQAPGKGLEWVATISQAGSEKDYVDSVKGRFTISRDNAKKSLYLQMNSLRAEDTAVYYCASGVYSFDYRGQGTLVTVSSGTGGGGSGGGGSGGGGSEFDVVMTQSPLSLPVTLGQPASISCRSSQSIVHSDGNTYLEWYQQRPGQSPRRLIYKVSNRFSGVPDRFSGSGSGTDFTLKISRVEAEDVGVYYCFQGSHAPWTFGGGTKVEIKLEDLKNVFPPEVAVFEPSEAEISHTQKATLVCLATGFYPDHVELSWWVNGKEVHSGVCTDPQPLKEQPALNDSRYCLSSRLRVSATFWQNPRNHFRCQVQFYGLSENDEWTQDRAKPVTQIVSAEAWGRADCGFTSESYQQGVLSATILYEILLGKATLYAVLVSALVLMAMVKRKDSRGRAKRSGSGATNFSLLKQAGDVEENPGPTSMDWIWRILFLVGAATGAHSFEEVQLVESGGGLVQPGGSLRLSCAASGFTFSSYGMHWVRQAPGKGLEWVAYITTRSSTIYYADSVKGRFTISRDNAKNSLYLQMNSLRAEDTAVYYCTREPLTGYYAMDYWGQGTSVTVSSTRIQNPDPAVYQLRDSKSSDKSVCLFTDFDSQTNVSQSKDSDVYITDKCVLDMRSMDFKSNSAVAWSNKSDFACANAFNNSIIPEDTFFPSPESSCDVKLVEKSFETDTNLNFQNLSVIGFRILLLKVAGFNLLMTLRLWSS

SEQ ID NO: 12572 - protein, 752 aa, Artificial Sequence
  Synthetic Polypeptide
MALPVTALLLPLALLLHAARPEVQLVESGGGLVQPGGSLRLSCAASGFSFSDFWMSWVRQAPGKGLEWVATISQAGSEKDYVDSVKGRFTISRDNAKKSLYLQMNSLRAEDTAVYYCASGVYSFDYRGQGTLVTVSSGTGGGGSGGGGSGGGGSEFDIQMTQSPSSLSASVGDRVTITCRASQSISLWLNWYQQKPGKAPKLLIYAASTLQSGVPSRFSGSGSGTDFTLTISSLQPEDFATYYCQQYYTSPYTFGQGTKVEIKRLEDLKNVFPPEVAVFEPSEAEISHTQKATLVCLATGFYPDHVELSWWVNGKEVHSGVCTDPQPLKEQPALNDSRYCLSSRLRVSATFWQNPRNHFRCQVQFYGLSENDEWTQDRAKPVTQIVSAEAWGRADCGFTSESYQQGVLSATILYEILLGKATLYAVLVSALVLMAMVKRKDSRGRAKRSGSGATNFSLLKQAGDVEENPGPTSMDWIWRILFLVGAATGAHSFEQVQLLESGGGLVQPGGSLRLSCAASGFTFSSYAMSWVRQAPGKGLEWVSVIRSSGSSTYYADSVKGRFTISRDNSKNTLYLQMNSLRAEDTAVYYCARGGGYFDYWGQGTLVTVSSTRIQNPDPAVYQLRDSKSSDKSVCLFTDFDSQTNVSQSKDSDVYITDKCVLDMRSMDFKSNSAVAWSNKSDFACANAFNNSIIPEDTFFPSPESSCDVKLVEKSFETDTNLNFQNLSVIGFRILLLKVAGFNLLMTLRLWSS

SEQ ID NO: 12573 - protein, 755 aa, Artificial Sequence
  Synthetic Polypeptide
MALPVTALLLPLALLLHAARPEVQLVESGGGLVQPGGSLRLSCAASGFSFSDFWMSWVRQAPGKGLEWVATISQAGSEKDYVDSVKGRFTISRDNAKKSLYLQMNSLRAEDTAVYYCASGVYSFDYRGQGTLVTVSSGTGGGGSGGGGSGGGGSEFDIQMTQSPSSLSASVGDRVTITCRASQSISSYLNWYQQKPGKAPKLLIYAVSTLQSGVPSRFSGSGSGTDFTLTISSLQPEDFATYYCQQSGTFPPTTFGQGTKVEIKRLEDLKNVFPPEVAVFEPSEAEISHTQKATLVCLATGFYPDHVELSWWVNGKEVHSGVCTDPQPLKEQPALNDSRYCLSSRLRVSATFWQNPRNHFRCQVQFYGLSENDEWTQDRAKPVTQIVSAEAWGRADCGFTSESYQQGVLSATILYEILLGKATLYAVLVSALVLMAMVKRKDSRGRAKRSGSGATNFSLLKQAGDVEENPGPTSMDWIWRILFLVGAATGAHSFEQVQLLESGGGLVQPGGSLRLSCAASGFTFSSHGMHWVRQAPGKGLEWVSVISGSGSNTGYADSVKGRFTISRDNSKNTLYLQMNSLRAEDTAVYYCARQWGSYAFDSWGQGTLVTVSSTRIQNPDPAVYQLRDSKSSDKSVCLFTDFDSQTNVSQSKDSDVYITDKCVLDMRSMDFKSNSAVAWSNKSDFACANAFNNSIIPEDTFFPSPESSCDVKLVEKSFETDTNLNFQNLSVIGFRILLLKVAGFNLLMTLRLWSS

SEQ ID NO: 12574 - protein, 765 aa, Artificial Sequence
  Synthetic Polypeptide
MALPVTALLLPLALLLHAARPEVQLVESGGGLVQPGGSLRLSCAASGFSFSDFWMSWVRQAPGKGLEWVATISQAGSEKDYVDSVKGRFTISRDNAKKSLYLQMNSLRAEDTAVYYCASGVYSFDYRGQGTLVTVSSGTGGGGSGGGGSGGGGSEFDIVMSQSPSSLAVSVGEKVTMSCKSSQSLLHSSNQKNYLAWYQQKPGQSPKVLIYWASTRESGVPDRFTGSGSGTDFTLTITSVKSEDLAVYYCQQYYSYPWTFGGGTRLEIKRLEDLKNVFPPEVAVFEPSEAEISHTQKATLVCLATGFYPDHVELSWWVNGKEVHSGVCTDPQPLKEQPALNDSRYCLSSRLRVSATFWQNPRNHFRCQVQFYGLSENDEWTQDRAKPVTQIVSAEAWGRADCGFTSESYQQGVLSATILYEILLGKATLYAVLVSALVLMAMVKRKDSRGRAKRSGSGATNFSLLKQAGDVEENPGPTSMDWIWRILFLVGAATGAHSFEEVQLQQSVAELVKPGASVKMSCKVSGYTLTDHTIHWMKQRPEQGLEWIGYIYPRDGITGYNEKFKGKATLTADTSSSTAYMQLNSLTSEDSAVYFCARWGYSYRNYAYYYDYWGQGTTLTVSSTRIQNPDPAVYQLRDSKSSDKSVCLFTDFDSQTNVSQSKDSDVYITDKCVLDMRSMDFKSNSAVAWSNKSDFACANAFNNSIIPEDTFFPSPESSCDVKLVEKSFETDTNLNFQNLSVIGFRILLLKVAGFNLLMTLRLWSS

SEQ ID NO: 12575 - protein, 762 aa, Artificial Sequence
  Synthetic Polypeptide
MALPVTALLLPLALLLHAARPEVQLVESGGGLVQPGGSLRLSCAASGFSFSDFWMSWVRQAPGKGLEWVATISQAGSEKDYVDSVKGRFTISRDNAKKSLYLQMNSLRAEDTAVYYCASGVYSFDYRGQGTLVTVSSGTGGGGSGGGGSGGGGSEFEIVLTQSPGTLSLSPGERATLSCRASQSVSSSYLAWYQQKPGQAPRLLIYGTSSRATGIPDRFSGSGSGTDFTLTISRLEPEDFAVYYCQQYGSSPFTFGGGTKVEIKRLEDLKNVFPPEVAVFEPSEAEISHTQKATLVCLATGFYPDHVELSWWVNGKEVHSGVCTDPQPLKEQPALNDSRYCLSSRLRVSATFWQNPRNHFRCQVQFYGLSENDEWTQDRAKPVTQIVSAEAWGRADCGFTSESYQQGVLSATILYEILLGKATLYAVLVSALVLMAMVKRKDSRGRAKRSGSGATNFSLLKQAGDVEENPGPTSMDWIWRILFLVGAATGAHSFEQVQLQESGPGLAKPSETLSLTCTVSGDSITSYYWSWIRQPPGKGLEWIGYIYYSGSTNYNPSLKSRVTISVDTSKNQFSLKLSSVTAADTAVYYCARDQRRIAAAGTHFYGMDVWGQGTTVTVSSTRIQNPDPAVYQLRDSKSSDKSVCLFTDFDSQTNVSQSKDSDVYITDKCVLDMRSMDFKSNSAVAWSNKSDFACANAFNNSIIPEDTFFPSPESSCDVKLVEKSFETDTNLNFQNLSVIGFRILLLKVAGFNLLMTLRLWSS

SEQ ID NO: 12576 - protein, 754 aa, Artificial Sequence
  Synthetic Polypeptide
MALPVTALLLPLALLLHAARPEVQLVESGGGLVQPGGSLRLSCAASGFSFSDFWMSWVRQAPGKGLEWVATISQAGSEKDYVDSVKGRFTISRDNAKKSLYLQMNSLRAEDTAVYYCASGVYSFDYRGQGTLVTVSSGTGGGGSGGGGSGGGGSEFDILLTQSPVILSVSPGERVSFSCRASQSIGTNIHWYQQRTNGSPRLLIKYASESISGIPSRFSGSGSGTDFTLSINSVESEDIADYYCQQNNNWPTTFGAGTKLELKLEDLKNVFPPEVAVFEPSEAEISHTQKATLVCLATGFYPDHVELSWWVNGKEVHSGVCTDPQPLKEQPALNDSRYCLSSRLRVSATFWQNPRNHFRCQVQFYGLSENDEWTQDRAKPVTQIVSAEAWGRADCGFTSESYQQGVLSATILYEILLGKATLYAVLVSALVLMAMVKRKDSRGRAKRSGSGATNFSLLKQAGDVEENPGPTSMDWIWRILFLVGAATGAHSFEQVQLKQSGPGLVQPSQSLSITCTVSGFSLTNYGVHWVRQSPGKGLEWLGVIWSGGNTDYNTPFTSRLSINKDNSKSQVFFKMNSLQSNDTAIYYCARALTYYDYEFAYWGQGTLVTVSATRIQNPDPAVYQLRDSKSSDKSVCLFTDFDSQTNVSQSKDSDVYITDKCVLDMRSMDFKSNSAVAWSNKSDFACANAFNNSIIPEDTFFPSPESSCDVKLVEKSFETDTNLNFQNLSVIGFRILLLKVAGFNLLMTLRLWSS

SEQ ID NO: 12577 - protein, 747 aa, Artificial Sequence
  Synthetic Polypeptide
MALPVTALLLPLALLLHAARPEVQLVESGGGLVQPGGSLRLSCAASGFSFSDFWMSWVRQAPGKGLEWVATISQAGSEKDYVDSVKGRFTISRDNAKKSLYLQMNSLRAEDTAVYYCASGVYSFDYRGQGTLVTVSSGTGGGGSGGGGSGGGGSEFMTQSPKFLLVSAGDRVTLTCKASQSVNNDVYWYQQEPGQSPKLLIYWASTRESGVPDRFTGSGSGTDFTLTISSVQAEDLAVYYCKQSYNLYTFGGGTKLEIKRLEDLKNVFPPEVAVFEPSEAEISHTQKATLVCLATGFYPDHVELSWWVNGKEVHSGVCTDPQPLKEQPALNDSRYCLSSRLRVSATFWQNPRNHFRCQVQFYGLSENDEWTQDRAKPVTQIVSAEAWGRADCGFTSESYQQGVLSATILYEILLGKATLYAVLVSALVLMAMVKRKDSRGRAKRSGSGATNFSLLKQAGDVEENPGPTSMDWIWRILFLVGAATGAHSFEESGRGLVQPGGSRKLSCAASGFTFSTSGMHWVRQAPEKGLEWVAYISSGSTTIYHADTVKGRFTISRDNPKNTLFLQMTSLRSEDTAMYYCCARSGQFGNYFDYWGQGTTLTVSSTRIQNPDPAVYQLRDSKSSDKSVCLFTDFDSQTNVSQSKDSDVYITDKCVLDMRSMDFKSNSAVAWSNKSDFACANAFNNSIIPEDTFFPSPESSCDVKLVEKSFETDTNLNFQNLSVIGFRILLLKVAGFNLLMTLRLWSS

SEQ ID NO: 12578 - protein, 752 aa, Artificial Sequence
  Synthetic Polypeptide
MALPVTALLLPLALLLHAARPEVQLVESGGGLVQPGGSLRLSCAASGFSFSDFWMSWVRQAPGKGLEWVATISQAGSEKDYVDSVKGRFTISRDNAKKSLYLQMNSLRAEDTAVYYCASGVYSFDYRGQGTLVTVSSGTGGGGSGGGGSGGGGSEFQSPSSLAVSAGEKVTMSCKSSQSLLNSRTRKNYLAWYQQKPGQSPKLLIYWASTRESGVPDRFTGSGSGTDFTLTISSVQAEDLAVYYCKQSNLYTFGGGTKLEIKLEDLKNVFPPEVAVFEPSEAEISHTQKATLVCLATGFYPDHVELSWWVNGKEVHSGVCTDPQPLKEQPALNDSRYCLSSRLRVSATFWQNPRNHFRCQVQFYGLSENDEWTQDRAKPVTQIVSAEAWGRADCGFTSESYQQGVLSATILYEILLGKATLYAVLVSALVLMAMVKRKDSRGRAKRSGSGATNFSLLKQAGDVEENPGPTSMDWIWRILFLVGAATGAHSFEQVQLEESGPELVKPGASVKLSCKASGYTFTEYIIHWVKQRSGQGLEWIGWFYPGSGSIKYNEKFKDKATLTADKSSSTVYMELSGLTSEDSAVYFCARHDGYSYFDYWGQGTTLTVSSTRIQNPDPAVYQLRDSKSSDKSVCLFTDFDSQTNVSQSKDSDVYITDKCVLDMRSMDFKSNSAVAWSNKSDFACANAFNNSIIPEDTFFPSPESSCDVKLVEKSFETDTNLNFQNLSVIGFRILLLKVAGFNLLMTLRLWSS

SEQ ID NO: 12579 - protein, 755 aa, Artificial Sequence
  Synthetic Polypeptide
MALPVTALLLPLALLLHAARPEVQLVESGGGLVQPGGSLRLSCAASGFSFSDFWMSWVRQAPGKGLEWVATISQAGSEKDYVDSVKGRFTISRDNAKKSLYLQMNSLRAEDTAVYYCASGVYSFDYRGQGTLVTVSSGTGGGGSGGGGSGGGGSEFDIQMTQSPSSLSASLGERVSLTCRATQELSGYLSWLQQKPDGTIKRLIYAASTLDSGVPKRFSGNRSGSDYSLTISSLESEDFADYYCLQYAIYPYTFGGGTKLEIKLEDLKNVFPPEVAVFEPSEAEISHTQKATLVCLATGFYPDHVELSWWVNGKEVHSGVCTDPQPLKEQPALNDSRYCLSSRLRVSATFWQNPRNHFRCQVQFYGLSENDEWTQDRAKPVTQIVSAEAWGRADCGFTSESYQQGVLSATILYEILLGKATLYAVLVSALVLMAMVKRKDSRGRAKRSGSGATNFSLLKQAGDVEENPGPTSMDWIWRILFLVGAATGAHSFEEVQLQQSGPELVKPGASVKMSCKASGYTFTSYFIHWVKQKPGQGLEWIGFINPYNDGSKYNEKFKGKATLTSDKSSSTAYMELSSLTSEDSAVYYCTRDDGYYGYAMDYWGQGTSVTVSSTRIQNPDPAVYQLRDSKSSDKSVCLFTDFDSQTNVSQSKDSDVYITDKCVLDMRSMDFKSNSAVAWSNKSDFACANAFNNSIIPEDTFFPSPESSCDVKLVEKSFETDTNLNFQNLSVIGFRILLLKVAGFNLLMTLRLWSS

SEQ ID NO: 12580 - protein, 760 aa, Artificial Sequence
  Synthetic Polypeptide
MALPVTALLLPLALLLHAARPEVQLVESGGGLVQPGGSLRLSCAASGFSFSDFWMSWVRQAPGKGLEWVATISQAGSEKDYVDSVKGRFTISRDNAKKSLYLQMNSLRAEDTAVYYCASGVYSFDYRGQGTLVTVSSGTGGGGSGGGGSGGGGSEFDTIVLTQSPASLAVSLGQRATISCRASESVDSYGNSFMHWYQQKPGQPPKLLIYLASNLESGVPARFSGSGSRTDFTLTIDPVEADDAATYYCQQNNYDPWTFGGGTKLEIKLEDLKNVFPPEVAVFEPSEAEISHTQKATLVCLATGFYPDHVELSWWVNGKEVHSGVCTDPQPLKEQPALNDSRYCLSSRLRVSATFWQNPRNHFRCQVQFYGLSENDEWTQDRAKPVTQIVSAEAWGRADCGFTSESYQQGVLSATILYEILLGKATLYAVLVSALVLMAMVKRKDSRGRAKRSGSGATNFSLLKQAGDVEENPGPTSMDWIWRILFLVGAATGAHSFEEVQLQQSGPELVKPGASVKMSCKASGYTFTSYVMHWVKQKPGQGLEWIGYINPYNDGTKYNEKFKGKATLTSDTSSSTAYMELNSLTSEDSAVYFCARPIYFDNDYFDYWGQGTTLKVSSTRIQNPDPAVYQLRDSKSSDKSVCLFTDFDSQTNVSQSKDSDVYITDKCVLDMRSMDFKSNSAVAWSNKSDFACANAFNNSIIPEDTFFPSPESSCDVKLVEKSFETDTNLNFQNLSVIGFRILLLKVAGFNLLMTLRLWSS

SEQ ID NO: 12581 - protein, 755 aa, Artificial Sequence
  Synthetic Polypeptide
MALPVTALLLPLALLLHAARPEVQLVESGGGLVQPGGSLRLSCAASGFSFSDFWMSWVRQAPGKGLEWVATISQAGSEKDYVDSVKGRFTISRDNAKKSLYLQMNSLRAEDTAVYYCASGVYSFDYRGQGTLVTVSSGTGGGGSGGGGSGGGGSEFDIQMTQSPSSLSASVGDRVTITCKASQDVGIAVAWYQQKPGKVPKLLIYWASTRHTGVPDRFSGSGSGTDFTLTISSLQPEDVATYYCQQYSSYPYTFGQGTKVEIKRLEDLKNVFPPEVAVFEPSEAEISHTQKATLVCLATGFYPDHVELSWWVNGKEVHSGVCTDPQPLKEQPALNDSRYCLSSRLRVSATFWQNPRNHFRCQVQFYGLSENDEWTQDRAKPVTQIVSAEAWGRADCGFTSESYQQGVLSATILYEILLGKATLYAVLVSALVLMAMVKRKDSRGRAKRSGSGATNFSLLKQAGDVEENPGPTSMDWIWRILFLVGAATGAHSFEEVQLVESGGGLVQPGGSLRLSCAASGFDFSRYWMSWVRQAPGKGLEWIGEINPDSSTINYAPSLKDKFIISRDNAKNSLYLQMNSLRAEDTAVYYCARPDGNYWYFDVWGQGTLVTVSSTRIQNPDPAVYQLRDSKSSDKSVCLFTDFDSQTNVSQSKDSDVYITDKCVLDMRSMDFKSNSAVAWSNKSDFACANAFNNSIIPEDTFFPSPESSCDVKLVEKSFETDTNLNFQNLSVIGFRILLLKVAGFNLLMTLRLWSS

SEQ ID NO: 12582 - protein, 755 aa, Artificial Sequence
  Synthetic Polypeptide
MALPVTALLLPLALLLHAARPEVQLVESGGGLVQPGGSLRLSCAASGFSFSDFWMSWVRQAPGKGLEWVATISQAGSEKDYVDSVKGRFTISRDNAKKSLYLQMNSLRAEDTAVYYCASGVYSFDYRGQGTLVTVSSGTGGGGSGGGGSGGGGSEFDIVMTQSQKSMSTSVGDRVSITCKASQDVITGVAWYQQKPGQSPKLLIYSASYRYTGVPDRFTGSGSGTDFTFTISNVQAEDLAVYYCQQHYSTPLTFGAGTKLELKLEDLKNVFPPEVAVFEPSEAEISHTQKATLVCLATGFYPDHVELSWWVNGKEVHSGVCTDPQPLKEQPALNDSRYCLSSRLRVSATFWQNPRNHFRCQVQFYGLSENDEWTQDRAKPVTQIVSAEAWGRADCGFTSESYQQGVLSATILYEILLGKATLYAVLVSALVLMAMVKRKDSRGRAKRSGSGATNFSLLKQAGDVEENPGPTSMDWIWRILFLVGAATGAHSFEQVQLQQPGAELVRPGASVKLSCKASGYSFTTYWMNWVKQRPGQGLEWIGMIHPSDSETRLNQKFKDKATLTVDKSSSTAYMQLSSPTSEDSAVYYCARSTMIATRAMDYWGQGTSVTVSSTRIQNPDPAVYQLRDSKSSDKSVCLFTDFDSQTNVSQSKDSDVYITDKCVLDMRSMDFKSNSAVAWSNKSDFACANAFNNSIIPEDTFFPSPESSCDVKLVEKSFETDTNLNFQNLSVIGFRILLLKVAGFNLLMTLRLWSS

SEQ ID NO: 12583 - protein, 761 aa, Artificial Sequence
  Synthetic Polypeptide
MALPVTALLLPLALLLHAARPEVQLVESGGGLVQPGGSLRLSCAASGFSFSDFWMSWVRQAPGKGLEWVATISQAGSEKDYVDSVKGRFTISRDNAKKSLYLQMNSLRAEDTAVYYCASGVYSFDYRGQGTLVTVSSGTGGGGSGGGGSGGGGSEFQSVLTQPPSVSGAPGQRVTISCTGSGSNIGAPYDVSWYQQLPGTAPKLLIYHNNKRPSGVPDRFSGSKSGTSASLAITGLQAEDEADYYCATVEAGLSGSVFGGGTKLTVLGALEDLKNVFPPEVAVFEPSEAEISHTQKATLVCLATGFYPDHVELSWWVNGKEVHSGVCTDPQPLKEQPALNDSRYCLSSRLRVSATFWQNPRNHFRCQVQFYGLSENDEWTQDRAKPVTQIVSAEAWGRADCGFTSESYQQGVLSATILYEILLGKATLYAVLVSALVLMAMVKRKDSRGRAKRSGSGATNFSLLKQAGDVEENPGPTSMDWIWRILFLVGAATGAHSFEQVQLVQSGAEVKKPGASVKVSCKVSGYTLTELSIHWVRQAPGKGLEWMGGFDPEENEIVYAQRFQGRVTMTEDTSTDTAYMELSSLRSEDTAVYYCAIVGSFSPLTLGLWGQGTMVTVSSTRIQNPDPAVYQLRDSKSSDKSVCLFTDFDSQTNVSQSKDSDVYITDKCVLDMRSMDFKSNSAVAWSNKSDFACANAFNNSIIPEDTFFPSPESSCDVKLVEKSFETDTNLNFQNLSVIGFRILLLKVAGFNLLMTLRLWSS

SEQ ID NO: 12584 - protein, 761 aa, Artificial Sequence
  Synthetic Polypeptide
MALPVTALLLPLALLLHAARPEVQLVESGGGLVQPGGSLRLSCAASGFSFSDFWMSWVRQAPGKGLEWVATISQAGSEKDYVDSVKGRFTISRDNAKKSLYLQMNSLRAEDTAVYYCASGVYSFDYRGQGTLVTVSSGTGGGGSGGGGSGGGGSEFQSVLTQPPSVSGAPGQRVTISCTGSGSNIGAPYDVSWYQQLPGTAPKLLIYHNNKRPSGVPDRFSGSKSGTSASLAITGLQAEDEADYYCQSYDSSSISTIFGGGTKLTVLGALEDLKNVFPPEVAVFEPSEAEISHTQKATLVCLATGFYPDHVELSWWVNGKEVHSGVCTDPQPLKEQPALNDSRYCLSSRLRVSATFWQNPRNHFRCQVQFYGLSENDEWTQDRAKPVTQIVSAEAWGRADCGFTSESYQQGVLSATILYEILLGKATLYAVLVSALVLMAMVKRKDSRGRAKRSGSGATNFSLLKQAGDVEENPGPTSMDWIWRILFLVGAATGAHSFEQVQLVQSGAEVKKPGASVKVSCKVSGYTLTELSIHWVRQAPGKGLEWMGGFDPEENEIVYAQRFQGRVTMTEDTSTDTAYMELSSLRSEDTAVYYCAIVGSFSGIAYRPWGQGTMVTVSSTRIQNPDPAVYQLRDSKSSDKSVCLFTDFDSQTNVSQSKDSDVYITDKCVLDMRSMDFKSNSAVAWSNKSDFACANAFNNSIIPEDTFFPSPESSCDVKLVEKSFETDTNLNFQNLSVIGFRILLLKVAGFNLLMTLRLWSS

SEQ ID NO: 12585 - protein, 749 aa, Artificial Sequence
  Synthetic Polypeptide
MALPVTALLLPLALLLHAARPEVQLVESGGGLVQPGGSLRLSCAASGFSFSDFWMSWVRQAPGKGLEWVATISQAGSEKDYVDSVKGRFTISRDNAKKSLYLQMNSLRAEDTAVYYCASGVYSFDYRGQGTLVTVSSGTGGGGSGGGGSGGGGSEFDIQMTQSPSSLSASVGDRVTITCRASQGIRNNLAWYQQKPGKAPKRLIYAASNLQSGVPSRFTGSGSGTEFTLIVSSLQPEDFATYYCLQHHSYPLTSGGGTKVELEDLKNVFPPEVAVFEPSEAEISHTQKATLVCLATGFYPDHVELSWWVNGKEVHSGVCTDPQPLKEQPALNDSRYCLSSRLRVSATFWQNPRNHFRCQVQFYGLSENDEWTQDRAKPVTQIVSAEAWGRADCGFTSESYQQGVLSATILYEILLGKATLYAVLVSALVLMAMVKRKDSRGRAKRSGSGATNFSLLKQAGDVEENPGPTSMDWIWRILFLVGAATGAHSFEEVQVLESGGGLVQPGGSLRLSCAASGFTFSSYAMSWVRQAPGKGLEWVSAISGSGGSTNYADSVKGRFTISRDNSKNTLYLQMNSLRAEDTAVYYCAGSSGWSEYWGQGTLVTVSSTRIQNPDPAVYQLRDSKSSDKSVCLFTDFDSQTNVSQSKDSDVYITDKCVLDMRSMDFKSNSAVAWSNKSDFACANAFNNSIIPEDTFFPSPESSCDVKLVEKSFETDTNLNFQNLSVIGFRILLLKVAGFNLLMTLRLWSS

SEQ ID NO: 12586 - protein, 755 aa, Artificial Sequence
  Synthetic Polypeptide
MALPVTALLLPLALLLHAARPEVQLVESGGGLVQPGGSLRLSCAASGFSFSDFWMSWVRQAPGKGLEWVATISQAGSEKDYVDSVKGRFTISRDNAKKSLYLQMNSLRAEDTAVYYCASGVYSFDYRGQGTLVTVSSGTGGGGSGGGGSGGGGSEFDEIQLVQSGAEVKKPGESLRISCKGSGFNIEDYYIHWVRQMPGKGLEWMGRIDPENDETKYGPIFQGHVTISADTSINTVYLQWSSLKASDTAMYYCAFRGGVYWGQGTTVTVSSLEDLKNVFPPEVAVFEPSEAEISHTQKATLVCLATGFYPDHVELSWWVNGKEVHSGVCTDPQPLKEQPALNDSRYCLSSRLRVSATFWQNPRNHFRCQVQFYGLSENDEWTQDRAKPVTQIVSAEAWGRADCGFTSESYQQGVLSATILYEILLGKATLYAVLVSALVLMAMVKRKDSRGRAKRSGSGATNFSLLKQAGDVEENPGPTSMDWIWRILFLVGAATGAHSFEDVVMTQSPDSLAVSLGERATINCKSSQSLLDSDGKTYLNWLQQKPGQPPKRLISLVSKLDSGVPDRFSGSGSGTDFTLTISSLQAEDVAVYYCWQGTHFPGTFGGGTKVEIKTRIQNPDPAVYQLRDSKSSDKSVCLFTDFDSQTNVSQSKDSDVYITDKCVLDMRSMDFKSNSAVAWSNKSDFACANAFNNSIIPEDTFFPSPESSCDVKLVEKSFETDTNLNFQNLSVIGFRILLLKVAGFNLLMTLRLWSS

SEQ ID NO: 12587 - protein, 762 aa, Artificial Sequence
  Synthetic Polypeptide
MALPVTALLLPLALLLHAARPEVQLVESGGGLVQPGGSLRLSCAASGFSFSDFWMSWVRQAPGKGLEWVATISQAGSEKDYVDSVKGRFTISRDNAKKSLYLQMNSLRAEDTAVYYCASGVYSFDYRGQGTLVTVSSGTGGGGSGGGGSGGGGSEFDELVMTQSPSSLTVTAGEKVTMSCKSSQSLLNSGNQKNYLTWYQQKPGQPPKLLIYWASTRESGVPDRFTGSGSGTDFTLTISSVQAEDLAVYYCQNDYSYPLTFGAGTKLEIKLEDLKNVFPPEVAVFEPSEAEISHTQKATLVCLATGFYPDHVELSWWVNGKEVHSGVCTDPQPLKEQPALNDSRYCLSSRLRVSATFWQNPRNHFRCQVQFYGLSENDEWTQDRAKPVTQIVSAEAWGRADCGFTSESYQQGVLSATILYEILLGKATLYAVLVSALVLMAMVKRKDSRGRAKRSGSGATNFSLLKQAGDVEENPGPTSMDWIWRILFLVGAATGAHSFEEVQLLEQSGAELVRPGTSVKISCKASGYAFTNYWLGWVKQRPGHGLEWIGDIFPGSGNIHYNEKFKGKATLTADKSSSTAYMQLSSLTFEDSAVYFCARLRNWDEPMDYWGQGTTVTVSSTRIQNPDPAVYQLRDSKSSDKSVCLFTDFDSQTNVSQSKDSDVYITDKCVLDMRSMDFKSNSAVAWSNKSDFACANAFNNSIIPEDTFFPSPESSCDVKLVEKSFETDTNLNFQNLSVIGFRILLLKVAGFNLLMTLRLWSS

SEQ ID NO: 12588 - protein, 763 aa, Artificial Sequence
  Synthetic Polypeptide
MALPVTALLLPLALLLHAARPEVQLVESGGGLVQPGGSLRLSCAASGFSFSDFWMSWVRQAPGKGLEWVATISQAGSEKDYVDSVKGRFTISRDNAKKSLYLQMNSLRAEDTAVYYCASGVYSFDYRGQGTLVTVSSGTGGGGSGGGGSGGGGSEFDELQMTQSPSSLSASVGDRVTITCRASQSISSYLNWYQQKPGQPPKLLIYWASTRESGVPDRFSGSESGTNYTLTISSLQPEDFATYFCQQSDSLPITFGQGTRLDIQLEDLKNVFPPEVAVFEPSEAEISHTQKATLVCLATGFYPDHVELSWWVNGKEVHSGVCTDPQPLKEQPALNDSRYCLSSRLRVSATFWQNPRNHFRCQVQFYGLSENDEWTQDRAKPVTQIVSAEAWGRADCGFTSESYQQGVLSATILYEILLGKATLYAVLVSALVLMAMVKRKDSRGRAKRSGSGATNFSLLKQAGDVEENPGPTSMDWIWRILFLVGAATGAHSFEEVQLLESGGGVVQPGRSLRLSCAASGFTFSSYGMHWVRQAPGKGLEWVAVISYDGSNKYYADSVKGRFTISRDNSKNTLYLQMNSLRAEDTAVYYCAKDMGWGSGWRPYYYYGMDVWGQGTTVTVSSTRIQNPDPAVYQLRDSKSSDKSVCLFTDFDSQTNVSQSKDSDVYITDKCVLDMRSMDFKSNSAVAWSNKSDFACANAFNNSIIPEDTFFPSPESSCDVKLVEKSFETDTNLNFQNLSVIGFRILLLKVAGFNLLMTLRLWSS

SEQ ID NO: 12589 - protein, 760 aa, Artificial Sequence
  Synthetic Polypeptide
MALPVTALLLPLALLLHAARPEVQLVESGGGLVQPGGSLRLSCAASGFSFSDFWMSWVRQAPGKGLEWVATISQAGSEKDYVDSVKGRFTISRDNAKKSLYLQMNSLRAEDTAVYYCASGVYSFDYRGQGTLVTVSSGTGGGGSGGGGSGGGGSEFDDIQMTQSPSSLSASVGDRVTITCRASQSISSYLNWYQQKPGKAPKLLIYAASSLQSGVPSRFSGSGSGTDFTLTISSLQPEDLATYYCQQSYSTPFTFGPGTKVDIKLEDLKNVFPPEVAVFEPSEAEISHTQKATLVCLATGFYPDHVELSWWVNGKEVHSGVCTDPQPLKEQPALNDSRYCLSSRLRVSATFWQNPRNHFRCQVQFYGLSENDEWTQDRAKPVTQIVSAEAWGRADCGFTSESYQQGVLSATILYEILLGKATLYAVLVSALVLMAMVKRKDSRGRAKRSGSGATNFSLLKQAGDVEENPGPTSMDWIWRILFLVGAATGAHSFEVHEVQLVQSGAEVKKPGSSVKVSCKASGGTFSSYAISWVRQAPGQGLEWMGGIIPIFGTANYAQKFQGRVTITADKSTSTAYMELSSLRSEDTAVYYCATFALFGFREQAFDIWGQGTTVTVSSTRIQNPDPAVYQLRDSKSSDKSVCLFTDFDSQTNVSQSKDSDVYITDKCVLDMRSMDFKSNSAVAWSNKSDFACANAFNNSIIPEDTFFPSPESSCDVKLVEKSFETDTNLNFQNLSVIGFRILLLKVAGFNLLMTLRLWSS

SEQ ID NO: 12590 - protein, 758 aa, Artificial Sequence
  Synthetic Polypeptide
MALPVTALLLPLALLLHAARPEVQLVESGGGLVQPGGSLRLSCAASGFSFSDFWMSWVRQAPGKGLEWVATISQAGSEKDYVDSVKGRFTISRDNAKKSLYLQMNSLRAEDTAVYYCASGVYSFDYRGQGTLVTVSSGTGGGGSGGGGSGGGGSEFDIVLTQSPLSLAVSLGQPAIISCKASQSVSFAGTSLMHWYHQKPGQQPRLLIYRASNLEAGVPDRFSGSGSKTDFTLTISPVEAEDAATYYCQQSREYPYTFGGGTKLEIKRLEDLKNVFPPEVAVFEPSEAEISHTQKATLVCLATGFYPDHVELSWWVNGKEVHSGVCTDPQPLKEQPALNDSRYCLSSRLRVSATFWQNPRNHFRCQVQFYGLSENDEWTQDRAKPVTQIVSAEAWGRADCGFTSESYQQGVLSATILYEILLGKATLYAVLVSALVLMAMVKRKDSRGRAKRSGSGATNFSLLKQAGDVEENPGPTSMDWIWRILFLVGAATGAHSFEQVQLVQSGAEVVKPGASVKISCKASGYTFTGYFMNWVKQSPGQSLEWIGRIHPYDGDTFYNQKFQGKATLTVDKSSNTAHMELLSLTSEDFAVYYCTRYDGSRAMDYWGQGTTVTVSSTRIQNPDPAVYQLRDSKSSDKSVCLFTDFDSQTNVSQSKDSDVYITDKCVLDMRSMDFKSNSAVAWSNKSDFACANAFNNSIIPEDTFFPSPESSCDVKLVEKSFETDTNLNFQNLSVIGFRILLLKVAGFNLLMTLRLWSS

SEQ ID NO: 12591 - protein, 755 aa, Artificial Sequence
  Synthetic Polypeptide
MALPVTALLLPLALLLHAARPEVQLVESGGGLVQPGGSLRLSCAASGFSFSDFWMSWVRQAPGKGLEWVATISQAGSEKDYVDSVKGRFTISRDNAKKSLYLQMNSLRAEDTAVYYCASGVYSFDYRGQGTLVTVSSGTGGGGSGGGGSGGGGSEFDDVVMTQTPLSLPVTPGEPASISCRSSQSLVHRNGNTYLHWYLQKPGQSPKLLIHKVSNRFSGVPDRFSGSGSGTDFTLKISRVEAEDLGVYFCSQSTHVPPLTFGAGTKLELKLEDLKNVFPPEVAVFEPSEAEISHTQKATLVCLATGFYPDHVELSWWVNGKEVHSGVCTDPQPLKEQPALNDSRYCLSSRLRVSATFWQNPRNHFRCQVQFYGLSENDEWTQDRAKPVTQIVSAEAWGRADCGFTSESYQQGVLSATILYEILLGKATLYAVLVSALVLMAMVKRKDSRGRAKRSGSGATNFSLLKQAGDVEENPGPTSMDWIWRILFLVGAATGAHSFEEVQLVQSGAEVEKPGASVKISCKASGSSFTGYNMNWVRQNIGKSLEWIGAIDPYYGGTSYNQKFKGRATLTVDKSTSTAYMHLKSLRSEDTAVYYCVSGMEYWGQGTSVTVSSTRIQNPDPAVYQLRDSKSSDKSVCLFTDFDSQTNVSQSKDSDVYITDKCVLDMRSMDFKSNSAVAWSNKSDFACANAFNNSIIPEDTFFPSPESSCDVKLVEKSFETDTNLNFQNLSVIGFRILLLKVAGFNLLMTLRLWSS

SEQ ID NO: 12592 - protein, 753 aa, Artificial Sequence
  Synthetic Polypeptide
MALPVTALLLPLALLLHAARPEVQLVESGGGLVQPGGSLRLSCAASGFSFSDFWMSWVRQAPGKGLEWVATISQAGSEKDYVDSVKGRFTISRDNAKKSLYLQMNSLRAEDTAVYYCASGVYSFDYRGQGTLVTVSSGTGGGGSGGGGSGGGGSEFDEIVMTQTPATLSVSAGERVTITCKASQSVSNDVTWYQQKPGQAPRLLIYSASNRYSGVPARFSGSGYGTEFTFTISSVQSEDFAVYFCQQDYSSFGQGTKLEIKRLEDLKNVFPPEVAVFEPSEAEISHTQKATLVCLATGFYPDHVELSWWVNGKEVHSGVCTDPQPLKEQPALNDSRYCLSSRLRVSATFWQNPRNHFRCQVQFYGLSENDEWTQDRAKPVTQIVSAEAWGRADCGFTSESYQQGVLSATILYEILLGKATLYAVLVSALVLMAMVKRKDSRGRAKRSGSGATNFSLLKQAGDVEENPGPTSMDWIWRILFLVGAATGAHSFEQVQLVESGPGVVQPGRSLRISCAVSGFSVTNYGVHWVRQPPGKGLEWLGVIWAGGITNYNSAFMSRLTISKDNSKNTVYLQMNSLRAEDTAMYYCASRGGHYGYALDYWGQGTLVTVSSTRIQNPDPAVYQLRDSKSSDKSVCLFTDFDSQTNVSQSKDSDVYITDKCVLDMRSMDFKSNSAVAWSNKSDFACANAFNNSIIPEDTFFPSPESSCDVKLVEKSFETDTNLNFQNLSVIGFRILLLKVAGFNLLMTLRLWSS

SEQ ID NO: 12593 - protein, 755 aa, Artificial Sequence
  Synthetic Polypeptide
MALPVTALLLPLALLLHAARPEVQLVESGGGLVQPGGSLRLSCAASGFSFSDFWMSWVRQAPGKGLEWVATISQAGSEKDYVDSVKGRFTISRDNAKKSLYLQMNSLRAEDTAVYYCASGVYSFDYRGQGTLVTVSSGTGGGGSGGGGSGGGGSEFDIQMTQTASSLPASLGDRVTISCSASQDISNYLNWYQQKPDGTVKLLIFYSSNLHSGVPSRFSGGGSGTDYSLTISNLEPEDIATYFCHQYSKLPWTFGGGTKLEIKRLEDLKNVFPPEVAVFEPSEAEISHTQKATLVCLATGFYPDHVELSWWVNGKEVHSGVCTDPQPLKEQPALNDSRYCLSSRLRVSATFWQNPRNHFRCQVQFYGLSENDEWTQDRAKPVTQIVSAEAWGRADCGFTSESYQQGVLSATILYEILLGKATLYAVLVSALVLMAMVKRKDSRGRAKRSGSGATNFSLLKQAGDVEENPGPTSMDWIWRILFLVGAATGAHSFEEVTLVESGGDFVKPGGSLKVSCAASGFAFSHYAMSWVRQTPAKRLEWVAYISSGGSGTYYSDSVKGRFTISRDNAKNTLYLQMRSLRSEDSAMYFCTRVKLGTYYFDSWGQGTTLTVSSTRIQNPDPAVYQLRDSKSSDKSVCLFTDFDSQTNVSQSKDSDVYITDKCVLDMRSMDFKSNSAVAWSNKSDFACANAFNNSIIPEDTFFPSPESSCDVKLVEKSFETDTNLNFQNLSVIGFRILLLKVAGFNLLMTLRLWSS

SEQ ID NO: 12594 - protein, 757 aa, Artificial Sequence
  Synthetic Polypeptide
MALPVTALLLPLALLLHAARPEVQLVESGGGLVQPGGSLRLSCAASGFSFSDFWMSWVRQAPGKGLEWVATISQAGSEKDYVDSVKGRFTISRDNAKKSLYLQMNSLRAEDTAVYYCASGVYSFDYRGQGTLVTVSSGTGGGGSGGGGSGGGGSEFQFVLTQSPSASAALGASAKLTCTLSSAHKTYTIDWYQQQKGKAPRYLIQVKSDGTYTKATGVPDRFSGSSSGADRYLIIPSVQADDEADYYCGTDYTGGYVFGGGTQLTVTLEDLKNVFPPEVAVFEPSEAEISHTQKATLVCLATGFYPDHVELSWWVNGKEVHSGVCTDPQPLKEQPALNDSRYCLSSRLRVSATFWQNPRNHFRCQVQFYGLSENDEWTQDRAKPVTQIVSAEAWGRADCGFTSESYQQGVLSATILYEILLGKATLYAVLVSALVLMAMVKRKDSRGRAKRSGSGATNFSLLKQAGDVEENPGPTSMDWIWRILFLVGAATGAHSFEEQLKESGGGLFKPTDTLTLTCTVSGFSLSYYGVNWVRQAPGNGLEWIGTIGGSGDTYYASWAKSRSTIIRNTNENTVTLKMTSLTAADTATYFCVRYANIGYEYFNVWGPGTLVTVSSTRIQNPDPAVYQLRDSKSSDKSVCLFTDFDSQTNVSQSKDSDVYITDKCVLDMRSMDFKSNSAVAWSNKSDFACANAFNNSIIPEDTFFPSPESSCDVKLVEKSFETDTNLNFQNLSVIGFRILLLKVAGFNLLMTLRLWSS

SEQ ID NO: 12595 - protein, 762 aa, Artificial Sequence
  Synthetic Polypeptide
MALPVTALLLPLALLLHAARPEVQLVESGGGLVQPGGSLRLSCAASGFSFSDFWMSWVRQAPGKGLEWVATISQAGSEKDYVDSVKGRFTISRDNAKKSLYLQMNSLRAEDTAVYYCASGVYSFDYRGQGTLVTVSSGTGGGGSGGGGSGGGGSEFQFVLTQSPSVSAALGASAKLTCTLSSAHKTYTIDWYQQQQGEAPRYLMQVKSDGSYTKGTGVPDRFSGSSSGADRYLIIPSVQADDEAGYVCGADDNGGYVFGGGTQLTVTLEDLKNVFPPEVAVFEPSEAEISHTQKATLVCLATGFYPDHVELSWWVNGKEVHSGVCTDPQPLKEQPALNDSRYCLSSRLRVSATFWQNPRNHFRCQVQFYGLSENDEWTQDRAKPVTQIVSAEAWGRADCGFTSESYQQGVLSATILYEILLGKATLYAVLVSALVLMAMVKRKDSRGRAKRSGSGATNFSLLKQAGDVEENPGPTSMDWIWRILFLVGAATGAHSFEQSVKESEGGLFKPTDTLTLTCTVSGFSLSRHALTWVRQAPGNGLEWIGAIDNAGTTYYASWAKSRSTITRNTDLHTVTLKMTSLTASDTATYFCARVFYDINSGYYLDGMDLWGPGTLVTVSSTRIQNPDPAVYQLRDSKSSDKSVCLFTDFDSQTNVSQSKDSDVYITDKCVLDMRSMDFKSNSAVAWSNKSDFACANAFNNSIIPEDTFFPSPESSCDVKLVEKSFETDTNLNFQNLSVIGFRILLLKVAGFNLLMTLRLWSS

SEQ ID NO: 12596 - protein, 756 aa, Artificial Sequence
  Synthetic Polypeptide
MALPVTALLLPLALLLHAARPEVQLVESGGGLVQPGGSLRLSCAASGFSFSDFWMSWVRQAPGKGLEWVATISQAGSEKDYVDSVKGRFTISRDNAKKSLYLQMNSLRAEDTAVYYCASGVYSFDYRGQGTLVTVSSGTGGGGSGGGGSGGGGSEFDIQMTQSPSSLSASVGDRVTITCRASQGISSWLAWYQQKPEKAPKSLIYAASSLQSGVPSRFSGSGSGTDFTLTISSLQPEDFATYYCQQYNSYPPTFGGGTKVEIKLEDLKNVFPPEVAVFEPSEAEISHTQKATLVCLATGFYPDHVELSWWVNGKEVHSGVCTDPQPLKEQPALNDSRYCLSSRLRVSATFWQNPRNHFRCQVQFYGLSENDEWTQDRAKPVTQIVSAEAWGRADCGFTSESYQQGVLSATILYEILLGKATLYAVLVSALVLMAMVKRKDSRGRAKRSGSGATNFSLLKQAGDVEENPGPTSMDWIWRILFLVGAATGAHSFEEVQLVESGGGLVQPGESLRLSCVASGFTFSRYKMNWVRQAPGKGLEWVSYISRSGRDIYYADSVKGRFTISRDNAKNSLYLQMNSLRDEDTAVYYCAGTVTTYYYFGMDVWGHGTTVTVSSTRIQNPDPAVYQLRDSKSSDKSVCLFTDFDSQTNVSQSKDSDVYITDKCVLDMRSMDFKSNSAVAWSNKSDFACANAFNNSIIPEDTFFPSPESSCDVKLVEKSFETDTNLNFQNLSVIGFRILLLKVAGFNLLMTLRLWSS

SEQ ID NO: 12597 - protein, 757 aa, Artificial Sequence
  Synthetic Polypeptide
MALPVTALLLPLALLLHAARPEVQLVESGGGLVQPGGSLRLSCAASGFSFSDFWMSWVRQAPGKGLEWVATISQAGSEKDYVDSVKGRFTISRDNAKKSLYLQMNSLRAEDTAVYYCASGVYSFDYRGQGTLVTVSSGTGGGGSGGGGSGGGGSEFDIQMTQSPSSLSASVGDRVTITCRASQGISSWLAWYQQKPEKAPKSLIYAASSLQSGVPSRFSGSGSGTDFTLTISSLQPEDFATYYCQQYNSYPPTFGGGTKVEIKLEDLKNVFPPEVAVFEPSEAEISHTQKATLVCLATGFYPDHVELSWWVNGKEVHSGVCTDPQPLKEQPALNDSRYCLSSRLRVSATFWQNPRNHFRCQVQFYGLSENDEWTQDRAKPVTQIVSAEAWGRADCGFTSESYQQGVLSATILYEILLGKATLYAVLVSALVLMAMVKRKDSRGRAKRSGSGATNFSLLKQAGDVEENPGPTSMDWIWRILFLVGAATGAHSFEEVQLVESGGGSVQPGESLRLSCVASGFTFSRYKMNWVRQAPGKGLEWVSYISRSGRDIYYADSVKGRFTISRDNAKNSLYLQMNSLRDEDTAVYYCAGTVTTYYYDFGMDVWGQGTTVTVSSTRIQNPDPAVYQLRDSKSSDKSVCLFTDFDSQTNVSQSKDSDVYITDKCVLDMRSMDFKSNSAVAWSNKSDFACANAFNNSIIPEDTFFPSPESSCDVKLVEKSFETDTNLNFQNLSVIGFRILLLKVAGFNLLMTLRLWSS

SEQ ID NO: 12598 - protein, 755 aa, Artificial Sequence
  Synthetic Polypeptide
MALPVTALLLPLALLLHAARPEVQLVESGGGLVQPGGSLRLSCAASGFSFSDFWMSWVRQAPGKGLEWVATISQAGSEKDYVDSVKGRFTISRDNAKKSLYLQMNSLRAEDTAVYYCASGVYSFDYRGQGTLVTVSSGTGGGGSGGGGSGGGGSEFQSVLTQPPSASGTPGQRVTISCSGSRSNVGGNYVFWYQQVPGATPKLLIYRSNQRPSGVPDRFAGSKSGSSASLAISGLRSEDEADYYCATWDDSLSGFVFGTGTKVTVLGLEDLKNVFPPEVAVFEPSEAEISHTQKATLVCLATGFYPDHVELSWWVNGKEVHSGVCTDPQPLKEQPALNDSRYCLSSRLRVSATFWQNPRNHFRCQVQFYGLSENDEWTQDRAKPVTQIVSAEAWGRADCGFTSESYQQGVLSATILYEILLGKATLYAVLVSALVLMAMVKRKDSRGRAKRSGSGATNFSLLKQAGDVEENPGPTSMDWIWRILFLVGAATGAHSFEVQLVESGGGLVKPGGSLRLSCAASGFTFSDYYMSWIRQAPGKGLEWVSYISSSGSTIYYADSVKGRFTISRDNAKNSLYLQMNSLRAEDTAVYYCARGYGKAYDQWGQGTLVTVSSTRIQNPDPAVYQLRDSKSSDKSVCLFTDFDSQTNVSQSKDSDVYITDKCVLDMRSMDFKSNSAVAWSNKSDFACANAFNNSIIPEDTFFPSPESSCDVKLVEKSFETDTNLNFQNLSVIGFRILLLKVAGFNLLMTLRLWSS

SEQ ID NO: 12599 - protein, 754 aa, Artificial Sequence
  Synthetic Polypeptide
MALPVTALLLPLALLLHAARPEVQLVESGGGLVQPGGSLRLSCAASGFSFSDFWMSWVRQAPGKGLEWVATISQAGSEKDYVDSVKGRFTISRDNAKKSLYLQMNSLRAEDTAVYYCASGVYSFDYRGQGTLVTVSSGTGGGGSGGGGSGGGGSEFQSVVTQPPSMSAAPGQQVTISCSGGNSNIERNYVSWYLQLPGTAPKLVIFDNDRRPSGIPDRFSGSKSGTSATLGITGLQTGDEADYYCGTWDSSLRGWVFGGGTKLTVLGLEDLKNVFPPEVAVFEPSEAEISHTQKATLVCLATGFYPDHVELSWWVNGKEVHSGVCTDPQPLKEQPALNDSRYCLSSRLRVSATFWQNPRNHFRCQVQFYGLSENDEWTQDRAKPVTQIVSAEAWGRADCGFTSESYQQGVLSATILYEILLGKATLYAVLVSALVLMAMVKRKDSRGRAKRSGSGATNFSLLKQAGDVEENPGPTSMDWIWRILFLVGAATGAHSFEVQLVESGGGLIQPGGSLRLSCAASGFTFSNYAMNWVRQAPGKGLEWVSTINGRGSSTIYADSVKGRFTISRDNSKNTLYLQMNSLRAEDTATYYCARYISRGLGDSWGQGTLVTVTRIQNPDPAVYQLRDSKSSDKSVCLFTDFDSQTNVSQSKDSDVYITDKCVLDMRSMDFKSNSAVAWSNKSDFACANAFNNSIIPEDTFFPSPESSCDVKLVEKSFETDTNLNFQNLSVIGFRILLLKVAGFNLLMTLRLWSS

SEQ ID NO: 12600 - protein, 755 aa, Artificial Sequence
  Synthetic Polypeptide
MALPVTALLLPLALLLHAARPEVQLVESGGGLVQPGGSLRLSCAASGFSFSDFWMSWVRQAPGKGLEWVATISQAGSEKDYVDSVKGRFTISRDNAKKSLYLQMNSLRAEDTAVYYCASGVYSFDYRGQGTLVTVSSGTGGGGSGGGGSGGGGSEFDVVMTQTPLSLPVSLGDQASISCRSSQSLVHSNGNTYLHWYLQKPGQSPKLLIYKVSNRFSGVPDRFSGSGSGTDFTLKISRVEAEDLGVYFCSQNTPVPPKFGSGTKLEIKLEDLKNVFPPEVAVFEPSEAEISHTQKATLVCLATGFYPDHVELSWWVNGKEVHSGVCTDPQPLKEQPALNDSRYCLSSRLRVSATFWQNPRNHFRCQVQFYGLSENDEWTQDRAKPVTQIVSAEAWGRADCGFTSESYQQGVLSATILYEILLGKATLYAVLVSALVLMAMVKRKDSRGRAKRSGSGATNFSLLKQAGDVEENPGPTSMDWIWRILFLVGAATGAHSFEQVQLQQSGAELVRPGASVKLSCKASGYTFNDYEMHWVKQTPVHGLKWIGALEPKTGDTAYSQKFKGKATLTADKSSSTAYMELRSLTSEDSAVYYCTSCYYYTYSGQGTLVTVSATRIQNPDPAVYQLRDSKSSDKSVCLFTDFDSQTNVSQSKDSDVYITDKCVLDMRSMDFKSNSAVAWSNKSDFACANAFNNSIIPEDTFFPSPESSCDVKLVEKSFETDTNLNFQNLSVIGFRILLLKVAGFNLLMTLRLWSS

SEQ ID NO: 12601 - protein, 754 aa, Artificial Sequence
  Synthetic Polypeptide
MALPVTALLLPLALLLHAARPEVQLVESGGGLVQPGGSLRLSCAASGFSFSDFWMSWVRQAPGKGLEWVATISQAGSEKDYVDSVKGRFTISRDNAKKSLYLQMNSLRAEDTAVYYCASGVYSFDYRGQGTLVTVSSGTGGGGSGGGGSGGGGSEFDIQLTQSPSSLSASVGDRVTITCRASQGIRNDLGWYQQKPGKAPKRLIYAASSLQNGVPSRFSGSGSGTEFTLTISSLQPEDFATYYCLQHNTYPAFGQGTKVEIKRLEDLKNVFPPEVAVFEPSEAEISHTQKATLVCLATGFYPDHVELSWWVNGKEVHSGVCTDPQPLKEQPALNDSRYCLSSRLRVSATFWQNPRNHFRCQVQFYGLSENDEWTQDRAKPVTQIVSAEAWGRADCGFTSESYQQGVLSATILYEILLGKATLYAVLVSALVLMAMVKRKDSRGRAKRSGSGATNFSLLKQAGDVEENPGPTSMDWIWRILFLVGAATGAHSFEQVQLQESGPGLVKPSQTLSLTCTVSGGSISSFNYYWSWIRHHPGKGLEWIGYIYYSGSTYSNPSLKSRVTISVDTSKNQFSLTLSSVTAADTAVYYCARGYNWNYFDYWGQGTLVTVSSTRIQNPDPAVYQLRDSKSSDKSVCLFTDFDSQTNVSQSKDSDVYITDKCVLDMRSMDFKSNSAVAWSNKSDFACANAFNNSIIPEDTFFPSPESSCDVKLVEKSFETDTNLNFQNLSVIGFRILLLKVAGFNLLMTLRLWSS

SEQ ID NO: 12602 - protein, 756 aa, Artificial Sequence
  Synthetic Polypeptide
MALPVTALLLPLALLLHAARPEVQLVESGGGLVQPGGSLRLSCAASGFSFSDFWMSWVRQAPGKGLEWVATISQAGSEKDYVDSVKGRFTISRDNAKKSLYLQMNSLRAEDTAVYYCASGVYSFDYRGQGTLVTVSSGTGGGGSGGGGSGGGGSEFDDIVLTQSPASLAVSLGQSVTISCRASESVEYYGTSLMQWYQQKPGQPPKLLIYATSNVESGVPARFSGSGSGTDFSLNIHPVEEDDIAMYFCQQSRKLPSTFGGGTKLEIKLEDLKNVFPPEVAVFEPSEAEISHTQKATLVCLATGFYPDHVELSWWVNGKEVHSGVCTDPQPLKEQPALNDSRYCLSSRLRVSATFWQNPRNHFRCQVQFYGLSENDEWTQDRAKPVTQIVSAEAWGRADCGFTSESYQQGVLSATILYEILLGKATLYAVLVSALVLMAMVKRKDSRGRAKRSGSGATNFSLLKQAGDVEENPGPTSMDWIWRILFLVGAATGAHSFEDVRLQESGPGQVKPSQTVSLTCSVTGYSITNGNHWWNWIRQVSGSKLEWIGYISSSGSTDSNPSLKSRISITRDTSKNQLFLQLNSVTTEDIATYYCARGYYFDYWGQGTTLTVSSTRIQNPDPAVYQLRDSKSSDKSVCLFTDFDSQTNVSQSKDSDVYITDKCVLDMRSMDFKSNSAVAWSNKSDFACANAFNNSIIPEDTFFPSPESSCDVKLVEKSFETDTNLNFQNLSVIGFRILLLKVAGFNLLMTLRLWSS

SEQ ID NO: 12603 - protein, 755 aa, Artificial Sequence
  Synthetic Polypeptide
MALPVTALLLPLALLLHAARPEVQLVESGGGLVQPGGSLRLSCAASGFSFSDFWMSWVRQAPGKGLEWVATISQAGSEKDYVDSVKGRFTISRDNAKKSLYLQMNSLRAEDTAVYYCASGVYSFDYRGQGTLVTVSSGTGGGGSGGGGSGGGGSEFDIQMTQSPSSLSASVGDRVTITCRASQDVNTAVAWYQQKPGKAPKLLIYSASFLESGVPSRFSGSRSGTDFTLTISSLQPEDFATYYCQQHYTTPPTFGQTKVEIKRLEDLKNVFPPEVAVFEPSEAEISHTQKATLVCLATGFYPDHVELSWWVNGKEVHSGVCTDPQPLKEQPALNDSRYCLSSRLRVSATFWQNPRNHFRCQVQFYGLSENDEWTQDRAKPVTQIVSAEAWGRADCGFTSESYQQGVLSATILYEILLGKATLYAVLVSALVLMAMVKRKDSRGRAKRSGSGATNFSLLKQAGDVEENPGPTSMDWIWRILFLVGAATGAHSFEEVQLVESGGGLVQPGGSLRLSCAASGFNIKDTYIHWVRQAPGKGLEWVARIYPTNGYTRYADSVKGRFTISADTSKNTAYLQMNSLRAEDTAVYYCSRWGGDGFYAMDVWGQGTLVTVSSTRIQNPDPAVYQLRDSKSSDKSVCLFTDFDSQTNVSQSKDSDVYITDKCVLDMRSMDFKSNSAVAWSNKSDFACANAFNNSIIPEDTFFPSPESSCDVKLVEKSFETDTNLNFQNLSVIGFRILLLKVAGFNLLMTLRLWSS

SEQ ID NO: 12604 - protein, 754 aa, Artificial Sequence
  Synthetic Polypeptide
MALPVTALLLPLALLLHAARPEVQLVESGGGLVQPGGSLRLSCAASGFSFSDFWMSWVRQAPGKGLEWVATISQAGSEKDYVDSVKGRFTISRDNAKKSLYLQMNSLRAEDTAVYYCASGVYSFDYRGQGTLVTVSSGTGGGGSGGGGSGGGGSEFDQSVLTQPPSVSVAPGKTARIPCEGNYIGSSNVHWYQQKPGQAPVLVIHFDSDRPSGIPDRFSGSNSGNMATLTISRVEAGDEADYYCQVWENHGWVFGGGTKLTVLSLEDLKNVFPPEVAVFEPSEAEISHTQKATLVCLATGFYPDHVELSWWVNGKEVHSGVCTDPQPLKEQPALNDSRYCLSSRLRVSATFWQNPRNHFRCQVQFYGLSENDEWTQDRAKPVTQIVSAEAWGRADCGFTSESYQQGVLSATILYEILLGKATLYAVLVSALVLMAMVKRKDSRGRAKRSGSGATNFSLLKQAGDVEENPGPTSMDWIWRILFLVGAATGAHSFEEVQLVETGGGLVQPGESLRLSCAASGFTFSDYEMNWVRQAPGKGLEWVSYISSSGSTIYYADSVKGRFTIYRDNAKNSLYLQMNSLRAEDTALYYCARAWGVGPPDYWGQGTLVTVSSTRIQNPDPAVYQLRDSKSSDKSVCLFTDFDSQTNVSQSKDSDVYITDKCVLDMRSMDFKSNSAVAWSNKSDFACANAFNNSIIPEDTFFPSPESSCDVKLVEKSFETDTNLNFQNLSVIGFRILLLKVAGFNLLMTLRLWSS

SEQ ID NO: 12605 - protein, 762 aa, Artificial Sequence
  Synthetic Polypeptide
MALPVTALLLPLALLLHAARPEVQLVESGGGLVQPGGSLRLSCAASGFSFSDFWMSWVRQAPGKGLEWVATISQAGSEKDYVDSVKGRFTISRDNAKKSLYLQMNSLRAEDTAVYYCASGVYSFDYRGQGTLVTVSSGTGGGGSGGGGSGGGGSEFDIQMTQSPSSLSASVGDTVTITCQANGYLNWYQQRRGKAPKLLIYDGSKLERGVPSRFSGRRWGQEYNLTINNLQPEDIATYFCQVYEFVVPGTRLDLKRTVAAPLEDLKNVFPPEVAVFEPSEAEISHTQKATLVCLATGFYPDHVELSWWVNGKEVHSGVCTDPQPLKEQPALNDSRYCLSSRLRVSATFWQNPRNHFRCQVQFYGLSENDEWTQDRAKPVTQIVSAEAWGRADCGFTSESYQQGVLSATILYEILLGKATLYAVLVSALVLMAMVKRKDSRGRAKRSGSGATNFSLLKQAGDVEENPGPTSMDWIWRILFLVGAATGAHSFEQVQLLQSGAAVTKPGASVRVSCEASGYNIRDYFIHWWRQAPGQGLQWVGWINPKTGQPNNPRQFQGRVSLTRHASWDFDTFSFYMDLKALRSDDTAVYFCARQRSDYWDFDVWGSGTQVTVSSASTKGPTRIQNPDPAVYQLRDSKSSDKSVCLFTDFDSQTNVSQSKDSDVYITDKCVLDMRSMDFKSNSAVAWSNKSDFACANAFNNSIIPEDTFFPSPESSCDVKLVEKSFETDTNLNFQNLSVIGFRILLLKVAGFNLLMTLRLWSS

SEQ ID NO: 12606 - protein, 768 aa, Artificial Sequence
  Synthetic Polypeptide
MALPVTALLLPLALLLHAARPEVQLVESGGGLVQPGGSLRLSCAASGFSFSDFWMSWVRQAPGKGLEWVATISQAGSEKDYVDSVKGRFTISRDNAKKSLYLQMNSLRAEDTAVYYCASGVYSFDYRGQGTLVTVSSGTGGGGSGGGGSGGGGSEFQSALTQPPSASGSPGQSITISCTGTSNNFVSWYQQHAGKAPKLVIYDVNKRPSGVPDRFSGSKSGNTASLTVSGLQTDDEAVYYCGSLVGNWDVIFGGGTKLTVLLEDLKNVFPPEVAVFEPSEAEISHTQKATLVCLATGFYPDHVELSWWVNGKEVHSGVCTDPQPLKEQPALNDSRYCLSSRLRVSATFWQNPRNHFRCQVQFYGLSENDEWTQDRAKPVTQIVSAEAWGRADCGFTSESYQQGVLSATILYEILLGKATLYAVLVSALVLMAMVKRKDSRGRAKRSGSGATNFSLLKQAGDVEENPGPTSMDWIWRILFLVGAATGAHSFEQPQLQESGPTLVEASETLSLTCAVSGDSTAACNSFWGWVRQPPGKGLEWVGSLSHCASYWNRGWTYHNPSLKSRLTLALDTPKNLVFLKLNSVTAADTATYYCARFGGEVLRYTDWPKPAWVDLWGRGTLVTVSSTRIQNPDPAVYQLRDSKSSDKSVCLFTDFDSQTNVSQSKDSDVYITDKCVLDMRSMDFKSNSAVAWSNKSDFACANAFNNSIIPEDTFFPSPESSCDVKLVEKSFETDTNLNFQNLSVIGFRILLLKVAGFNLLMTLRLWSS

SEQ ID NO: 12607 - protein, 753 aa, Artificial Sequence
  Synthetic Polypeptide
MALPVTALLLPLALLLHAARPEVQLVESGGGLVQPGGSLRLSCAASGFSFSDFWMSWVRQAPGKGLEWVATISQAGSEKDYVDSVKGRFTISRDNAKKSLYLQMNSLRAEDTAVYYCASGVYSFDYRGQGTLVTVSSGTGGGGSGGGGSGGGGSEFEIVLTQSPGTLSLSPGETAIISCRTSQYGSLAWYQQRPGQAPRLVIYSGSTRAAGIPDRFSGSRWGPDYNLTISNLESGDFGVYYCQQYEFFGQGTKVQVDIKRLEDLKNVFPPEVAVFEPSEAEISHTQKATLVCLATGFYPDHVELSWWVNGKEVHSGVCTDPQPLKEQPALNDSRYCLSSRLRVSATFWQNPRNHFRCQVQFYGLSENDEWTQDRAKPVTQIVSAEAWGRADCGFTSESYQQGVLSATILYEILLGKATLYAVLVSALVLMAMVKRKDSRGRAKRSGSGATNFSLLKQAGDVEENPGPTSMDWIWRILFLVGAATGAHSFEQVQLVQSGGQMKKPGESMRISCRASGYEFIDCTLNWIRLAPGKRPEWMGWLKPRGGAVNYARPLQGRVTMTRDVYSDTAFLELRSLTVDDTAVYFCTRGKNCDYNWDFEHWGRGTPVIVSSTRIQNPDPAVYQLRDSKSSDKSVCLFTDFDSQTNVSQSKDSDVYITDKCVLDMRSMDFKSNSAVAWSNKSDFACANAFNNSIIPEDTFFPSPESSCDVKLVEKSFETDTNLNFQNLSVIGFRILLLKVAGFNLLMTLRLWSS

SEQ ID NO: 12608 - protein, 763 aa, Artificial Sequence
  Synthetic Polypeptide
MALPVTALLLPLALLLHAARPEVQLVESGGGLVQPGGSLRLSCAASGFSFSDFWMSWVRQAPGKGLEWVATISQAGSEKDYVDSVKGRFTISRDNAKKSLYLQMNSLRAEDTAVYYCASGVYSFDYRGQGTLVTVSSGTGGGGSGGGGSGGGGSEFELVLTQSPGTLSLSAGERATLSCRASQSVSSGSLAWYQQKPGQAPRLLIYGASTRATGIPDRFSGSGSGTDFTLTIGRLEPEDLAVYYCQQYGTSPYTFGQGTKLEILEDLKNVFPPEVAVFEPSEAEISHTQKATLVCLATGFYPDHVELSWWVNGKEVHSGVCTDPQPLKEQPALNDSRYCLSSRLRVSATFWQNPRNHFRCQVQFYGLSENDEWTQDRAKPVTQIVSAEAWGRADCGFTSESYQQGVLSATILYEILLGKATLYAVLVSALVLMAMVKRKDSRGRAKRSGSGATNFSLLKQAGDVEENPGPTSMDWIWRILFLVGAATGAHSFELEQSGAEVKKPGSSVQVSCKASGGTFSMYGFNWVRQAPGHGLEWMGGIIPIFGTSNYAQKFRGRVTFTADQATSTAYMELTNLRSDDTAVYYCARDFGPDWEDGDSYDGSGRGFFDFWGQGTLVTVSSTRIQNPDPAVYQLRDSKSSDKSVCLFTDFDSQTNVSQSKDSDVYITDKCVLDMRSMDFKSNSAVAWSNKSDFACANAFNNSIIPEDTFFPSPESSCDVKLVEKSFETDTNLNFQNLSVIGFRILLLKVAGFNLLMTLRLWSS

SEQ ID NO: 12609 - protein, 743 aa, Artificial Sequence
  Synthetic Polypeptide
MALPVTALLLPLALLLHAARPEVQLVESGGGLVQPGGSLRLSCAASGFSFSDFWMSWVRQAPGKGLEWVATISQAGSEKDYVDSVKGRFTISRDNAKKSLYLQMNSLRAEDTAVYYCASGVYSFDYRGQGTLVTVSSGTGGGGSGGGGSGGGGSEFDIQMTQSPSSLSASVGDRVTITCQASQDINNYLNWYQQKPGKAPKLLIYDASNLQTGVPSRFSGSGSGTDFTFTIEDIATYYCQQYTFGPGTKVDIKLEDLKNVFPPEVAVFEPSEAEISHTQKATLVCLATGFYPDHVELSWWVNGKEVHSGVCTDPQPLKEQPALNDSRYCLSSRLRVSATFWQNPRNHFRCQVQFYGLSENDEWTQDRAKPVTQIVSAEAWGRADCGFTSESYQQGVLSATILYEILLGKATLYAVLVSALVLMAMVKRKDSRGRAKRSGSGATNFSLLKQAGDVEENPGPTSMDWIWRILFLVGAATGAHSFEEVQLLESGGGLVQPGGSLRLSCAASGFTFSWYSMTWVRQAPGKGLEWVSSIVPWGDFTQYADSVKGRFTISRDNSKNTLYLQMNSLRAEDTAVYYCAKGPGWGSFDLWGRGTLVTVSSTRIQNPDPAVYQLRDSKSSDKSVCLFTDFDSQTNVSQSKDSDVYITDKCVLDMRSMDFKSNSAVAWSNKSDFACANAFNNSIIPEDTFFPSPESSCDVKLVEKSFETDTNLNFQNLSVIGFRILLLKVAGFNLLMTLRLWSS

SEQ ID NO: 12610 - protein, 753 aa, Artificial Sequence
  Synthetic Polypeptide
MALPVTALLLPLALLLHAARPEVQLVESGGGLVQPGGSLRLSCAASGFSFSDFWMSWVRQAPGKGLEWVATISQAGSEKDYVDSVKGRFTISRDNAKKSLYLQMNSLRAEDTAVYYCASGVYSFDYRGQGTLVTVSSGTGGGGSGGGGSGGGGSEFDIQMTQSPSSLSASVGDRVTITCTASLSVSSTYLHWYQQKPGSSPKLWIYSTSNLASGVPSRFSGSGSGTSYTLTISSLQPEDFATYYCHQYHRSPLTFGGGTKVEIKRLEDLKNVFPPEVAVFEPSEAEISHTQKATLVCLATGFYPDHVELSWWVNGKEVHSGVCTDPQPLKEQPALNDSRYCLSSRLRVSATFWQNPRNHFRCQVQFYGLSENDEWTQDRAKPVTQIVSAEAWGRADCGFTSESYQQGVLSATILYEILLGKATLYAVLVSALVLMAMVKRKDSRGRAKRSGSGATNFSLLKQAGDVEENPGPTSMDWIWRILFLVGAATGAHSFEEVQLVESGGGLVQPGGSLRLSCAASGFSLTKYGVHWVRQAPGKGLEWVGVKWAGGSTDYNSALMSRFTISKDNAKNSLYLQMNSLRAEDTAVYYCARDHRDAMDYWGQGTLVTVSSTRIQNPDPAVYQLRDSKSSDKSVCLFTDFDSQTNVSQSKDSDVYITDKCVLDMRSMDFKSNSAVAWSNKSDFACANAFNNSIIPEDTFFPSPESSCDVKLVEKSFETDTNLNFQNLSVIGFRILLLKVAGFNLLMTLRLWSS

SEQ ID NO: 12611 - protein, 757 aa, Artificial Sequence
  Synthetic Polypeptide
MALPVTALLLPLALLLHAARPEVQLVESGGGLVQPGGSLRLSCAASGFSFSDFWMSWVRQAPGKGLEWVATISQAGSEKDYVDSVKGRFTISRDNAKKSLYLQMNSLRAEDTAVYYCASGVYSFDYRGQGTLVTVSSGTGGGGSGGGGSGGGGSEFDIQMTQSPSSLSASVGDRVTITCKASQDVGTAVAWYQQKPGKAPKLLIYSASYRSTGVPSRFSGSGSGTDFTLTISSLQPEDFATYYCQHHYSAPWTFGGGTKVEIKLEDLKNVFPPEVAVFEPSEAEISHTQKATLVCLATGFYPDHVELSWWVNGKEVHSGVCTDPQPLKEQPALNDSRYCLSSRLRVSATFWQNPRNHFRCQVQFYGLSENDEWTQDRAKPVTQIVSAEAWGRADCGFTSESYQQGVLSATILYEILLGKATLYAVLVSALVLMAMVKRKDSRGRAKRSGSGATNFSLLKQAGDVEENPGPTSMDWIWRILFLVGAATGAHSFEEVQLVESGGGLVQPGGSLRLSCAASGFTFSRNGMSWVRQAPGKGLEWVATVSSGGSYIYYADSVKGRFTISRDNAKNSLYLQMNSLRAEDTAVYYCARQGTTALATRFFDVWGQGTLVTVSSTRIQNPDPAVYQLRDSKSSDKSVCLFTDFDSQTNVSQSKDSDVYITDKCVLDMRSMDFKSNSAVAWSNKSDFACANAFNNSIIPEDTFFPSPESSCDVKLVEKSFETDTNLNFQNLSVIGFRILLLKVAGFNLLMTLRLWSS

SEQ ID NO: 12612 - protein, 753 aa, Artificial Sequence
  Synthetic Polypeptide
MALPVTALLLPLALLLHAARPEVQLVESGGGLVQPGGSLRLSCAASGFSFSDFWMSWVRQAPGKGLEWVATISQAGSEKDYVDSVKGRFTISRDNAKKSLYLQMNSLRAEDTAVYYCASGVYSFDYRGQGTLVTVSSGTGGGGSGGGGSGGGGSEFDIQMTQSPPSLSASVGGKVTITCKASQDIDRYMAWYQDKPGKGPKLLIHDTSTLQPGIPSRFSGSGSGRDYSFSISNLEPEDIATYYCLQYDNLWTFGGGTKLEIKRLEDLKNVFPPEVAVFEPSEAEISHTQKATLVCLATGFYPDHVELSWWVNGKEVHSGVCTDPQPLKEQPALNDSRYCLSSRLRVSATFWQNPRNHFRCQVQFYGLSENDEWTQDRAKPVTQIVSAEAWGRADCGFTSESYQQGVLSATILYEILLGKATLYAVLVSALVLMAMVKRKDSRGRAKRSGSGATNFSLLKQAGDVEENPGPTSMDWIWRILFLVGAATGAHSFEQVQLVQSGAELVKPGASVKMSCKASGYIFTNYNIHWVKKSPGQGLEWIGAIYPGNGDAPYSQKFQDRATLTADTSSSTTYMELSSLTSEDSAVYYCVRANWDVAFAYWGQGTLVSVSSTRIQNPDPAVYQLRDSKSSDKSVCLFTDFDSQTNVSQSKDSDVYITDKCVLDMRSMDFKSNSAVAWSNKSDFACANAFNNSIIPEDTFFPSPESSCDVKLVEKSFETDTNLNFQNLSVIGFRILLLKVAGFNLLMTLRLWSS

SEQ ID NO: 12613 - protein, 754 aa, Artificial Sequence
  Synthetic Polypeptide
MALPVTALLLPLALLLHAARPEVQLVESGGGLVQPGGSLRLSCAASGFSFSDFWMSWVRQAPGKGLEWVATISQAGSEKDYVDSVKGRFTISRDNAKKSLYLQMNSLRAEDTAVYYCASGVYSFDYRGQGTLVTVSSGTGGGGSGGGGSGGGGSEFDIQMTQSPASLSASVGETVTITCRVSGNIHNYLAWYQQKQGKSPQLLVYNAKTLADGVPSRFSGSGSGTQYSLKINSLQPEDFGSYYCQHFWSNPYTFGGGTKLEIKLEDLKNVFPPEVAVFEPSEAEISHTQKATLVCLATGFYPDHVELSWWVNGKEVHSGVCTDPQPLKEQPALNDSRYCLSSRLRVSATFWQNPRNHFRCQVQFYGLSENDEWTQDRAKPVTQIVSAEAWGRADCGFTSESYQQGVLSATILYEILLGKATLYAVLVSALVLMAMVKRKDSRGRAKRSGSGATNFSLLKQAGDVEENPGPTSMDWIWRILFLVGAATGAHSFEQVQLQQSGASVKVSCKASELVRPGTGYAFTNYLIEWVKQRPGQGLEWIGVINPGSGGTNYNEKFKGKATLTADKSSSTAYMQLSSLTSDDSAVYFCARYRSYDWYFDVWGAGTTVTVSSTRIQNPDPAVYQLRDSKSSDKSVCLFTDFDSQTNVSQSKDSDVYITDKCVLDMRSMDFKSNSAVAWSNKSDFACANAFNNSIIPEDTFFPSPESSCDVKLVEKSFETDTNLNFQNLSVIGFRILLLKVAGFNLLMTLRLWSS

SEQ ID NO: 12614 - protein, 753 aa, Artificial Sequence
  Synthetic Polypeptide
MALPVTALLLPLALLLHAARPEVQLVESGGGLVQPGGSLRLSCAASGFSFSDFWMSWVRQAPGKGLEWVATISQAGSEKDYVDSVKGRFTISRDNAKKSLYLQMNSLRAEDTAVYYCASGVYSFDYRGQGTLVTVSSGTGGGGSGGGGSGGGGSEFDIQMTQSFSSLSASVGDRVTITCRASQDISNYLNWYQQKPGKAPKLLIYYTSRLHSGVPSRFSGSGSGTDYTLTISSLQPEDFATYFCQQGNTLPWTFGGGTKLEIKRLEDLKNVFPPEVAVFEPSEAEISHTQKATLVCLATGFYPDHVELSWWVNGKEVHSGVCTDPQPLKEQPALNDSRYCLSSRLRVSATFWQNPRNHFRCQVQFYGLSENDEWTQDRAKPVTQIVSAEAWGRADCGFTSESYQQGVLSATILYEILLGKATLYAVLVSALVLMAMVKRKDSRGRAKRSGSGATNFSLLKQAGDVEENPGPTSMDWIWRILFLVGAATGAHSFEEVQLVQSGGGLVQSGGSLRLSCRASGYTFTRYWMLWVRQRPGKGLEWVAEINPRNDRTNYNEKFKTRFTISVDRSKNTLYLQMDSLRAEDTAVYFCALGGGYAMDYWGQGTLVTVSSTRIQNPDPAVYQLRDSKSSDKSVCLFTDFDSQTNVSQSKDSDVYITDKCVLDMRSMDFKSNSAVAWSNKSDFACANAFNNSIIPEDTFFPSPESSCDVKLVEKSFETDTNLNFQNLSVIGFRILLLKVAGFNLLMTLRLWSS

SEQ ID NO: 12615 - protein, 754 aa, Artificial Sequence
  Synthetic Polypeptide
MALPVTALLLPLALLLHAARPEVQLVESGGGLVQPGGSLRLSCAASGFSFSDFWMSWVRQAPGKGLEWVATISQAGSEKDYVDSVKGRFTISRDNAKKSLYLQMNSLRAEDTAVYYCASGVYSFDYRGQGTLVTVSSGTGGGGSGGGGSGGGGSEFDIQMTQSPASLSASVGETVTIICRASVNIYSYLAWYQQKQGKSPQLLVYNAKILAEGVPSRFSGSGSGTQFSLKINSLQPEDFGSYYCQHHYGTFTFGSGTKLEIKRLEDLKNVFPPEVAVFEPSEAEISHTQKATLVCLATGFYPDHVELSWWVNGKEVHSGVCTDPQPLKEQPALNDSRYCLSSRLRVSATFWQNPRNHFRCQVQFYGLSENDEWTQDRAKPVTQIVSAEAWGRADCGFTSESYQQGVLSATILYEILLGKATLYAVLVSALVLMAMVKRKDSRGRAKRSGSGATNFSLLKQAGDVEENPGPTSMDWIWRILFLVGAATGAHSFEQVQLKESGPGLVAPSQSLSITCTISGFSLTSYGVHWVRQPPGKGLEWLVVIWSDGSTTYNSALKSRLSISKDNSKSQVFLKMNSLQTDDTAIYYCASHYGSTLAFASWGHGTLVTVSAATRIQNPDPAVYQLRDSKSSDKSVCLFTDFDSQTNVSQSKDSDVYITDKCVLDMRSMDFKSNSAVAWSNKSDFACANAFNNSIIPEDTFFPSPESSCDVKLVEKSFETDTNLNFQNLSVIGFRILLLKVAGFNLLMTLRLWSS

SEQ ID NO: 12616 - protein, 762 aa, Artificial Sequence
  Synthetic Polypeptide
MALPVTALLLPLALLLHAARPEVQLVESGGGLVQPGGSLRLSCAASGFSFSDFWMSWVRQAPGKGLEWVATISQAGSEKDYVDSVKGRFTISRDNAKKSLYLQMNSLRAEDTAVYYCASGVYSFDYRGQGTLVTVSSGTGGGGSGGGGSGGGGSEFDIVMTQSHKFMSTSVGDRVSVTCKASQNVGNNVAWYQQKPGQSPKVLIYSASYRYSGVPDRFTGSGSGTDFTLTISNVQSEDLAEYFCQQYNTYPFTFGSGTKLEIKLEDLKNVFPPEVAVFEPSEAEISHTQKATLVCLATGFYPDHVELSWWVNGKEVHSGVCTDPQPLKEQPALNDSRYCLSSRLRVSATFWQNPRNHFRCQVQFYGLSENDEWTQDRAKPVTQIVSAEAWGRADCGFTSESYQQGVLSATILYEILLGKATLYAVLVSALVLMAMVKRKDSRGRAKRSGSGATNFSLLKQAGDVEENPGPTSMDWIWRILFLVGAATGAHSFEEVQLEESGGGLVQPGGSMKLSCVASGFTFSNYWMNWVRQSPEKGLEWVAEIRFKSHNYATHFAESVKGRFTISRDDSKSSVYLQMNNLRAEDTGIYYCTRRIGNSDYDWWYFDVWGAGTSVTVSSASTRIQNPDPAVYQLRDSKSSDKSVCLFTDFDSQTNVSQSKDSDVYITDKCVLDMRSMDFKSNSAVAWSNKSDFACANAFNNSIIPEDTFFPSPESSCDVKLVEKSFETDTNLNFQNLSVIGFRILLLKVAGFNLLMTLRLWSS

SEQ ID NO: 12617 - protein, 755 aa, Artificial Sequence
  Synthetic Polypeptide
MALPVTALLLPLALLLHAARPEVQLVESGGGLVQPGGSLRLSCAASGFSFSDFWMSWVRQAPGKGLEWVATISQAGSEKDYVDSVKGRFTISRDNAKKSLYLQMNSLRAEDTAVYYCASGVYSFDYRGQGTLVTVSSGTGGGGSGGGGSGGGGSEFDQIVLTQSPAIMSASPGEKVTISCSASSSVSYMYWYQQKPGSSPKPWIYRTSNLASGVPARFSGSGSGTSYSLTISNMEAEDAAAYYCQQYHSYPTTFGGGTKLEVKLEDLKNVFPPEVAVFEPSEAEISHTQKATLVCLATGFYPDHVELSWWVNGKEVHSGVCTDPQPLKEQPALNDSRYCLSSRLRVSATFWQNPRNHFRCQVQFYGLSENDEWTQDRAKPVTQIVSAEAWGRADCGFTSESYQQGVLSATILYEILLGKATLYAVLVSALVLMAMVKRKDSRGRAKRSGSGATNFSLLKQAGDVEENPGPTSMDWIWRILFLVGAATGAHSFEEVQLVESGGGLVQPKGSLKLSCAASGFSFNTYAMNWVRQAPGKGLEWIAHIRSKSNNFATYYADSVKDRFSISRDASENILFLQMNNLKTEDTAMYYCVRQGGDFPMDYWGQGTSVTVSSTRIQNPDPAVYQLRDSKSSDKSVCLFTDFDSQTNVSQSKDSDVYITDKCVLDMRSMDFKSNSAVAWSNKSDFACANAFNNSIIPEDTFFPSPESSCDVKLVEKSFETDTNLNFQNLSVIGFRILLLKVAGFNLLMTLRLWSS

SEQ ID NO: 12618 - protein, 754 aa, Artificial Sequence
  Synthetic Polypeptide
MALPVTALLLPLALLLHAARPEVQLVESGGGLVQPGGSLRLSCAASGFSFSDFWMSWVRQAPGKGLEWVATISQAGSEKDYVDSVKGRFTISRDNAKKSLYLQMNSLRAEDTAVYYCASGVYSFDYRGQGTLVTVSSGTGGGGSGGGGSGGGGSEFDDIQMTQSSSSFSVSLGDRVTITCMASEDIYIRLAWYQQKPGNAPRLLISAATSLETGVPSRFSGSGSGKDYTLSITSLQTEDVGTYYCQQYWSSPWTFGGGTKLEINLEDLKNVFPPEVAVFEPSEAEISHTQKATLVCLATGFYPDHVELSWWVNGKEVHSGVCTDPQPLKEQPALNDSRYCLSSRLRVSATFWQNPRNHFRCQVQFYGLSENDEWTQDRAKPVTQIVSAEAWGRADCGFTSESYQQGVLSATILYEILLGKATLYAVLVSALVLMAMVKRKDSRGRAKRSGSGATNFSLLKQAGDVEENPGPTSMDWIWRILFLVGAATGAHSFEDVQLQESGPGLVKPSQSLSLTCTVTGYSITSDYTWNWIRQFPGNKLEWMGYITYSGSTSYNPSLKSRNSITRDTSKNQFFLQLNSVTTEDTATYYCARLGRRYTMDYWGQGTSVTVSSTRIQNPDPAVYQLRDSKSSDKSVCLFTDFDSQTNVSQSKDSDVYITDKCVLDMRSMDFKSNSAVAWSNKSDFACANAFNNSIIPEDTFFPSPESSCDVKLVEKSFETDTNLNFQNLSVIGFRILLLKVAGFNLLMTLRLWSS

SEQ ID NO: 12619 - protein, 757 aa, Artificial Sequence
  Synthetic Polypeptide
MALPVTALLLPLALLLHAARPEVQLVESGGGLVQPGGSLRLSCAASGFSFSDFWMSWVRQAPGKGLEWVATISQAGSEKDYVDSVKGRFTISRDNAKKSLYLQMNSLRAEDTAVYYCASGVYSFDYRGQGTLVTVSSGTGGGGSGGGGSGGGGSEFDDIQMTQSPSSLSASVGDRVTITCRASQSISSYLNWYQQKPGKAPKLLIYDASNLETGVPSRFSGSGSGTDFTFTISSLQPEDIATYYCQQYDNLPLTFGGGTKVDIKRLEDLKNVFPPEVAVFEPSEAEISHTQKATLVCLATGFYPDHVELSWWVNGKEVHSGVCTDPQPLKEQPALNDSRYCLSSRLRVSATFWQNPRNHFRCQVQFYGLSENDEWTQDRAKPVTQIVSAEAWGRADCGFTSESYQQGVLSATILYEILLGKATLYAVLVSALVLMAMVKRKDSRGRAKRSGSGATNFSLLKQAGDVEENPGPTSMDWIWRILFLVGAATGAHSFEQVQLVESGGGVVQPGRSLRLSCAASGFTFSSYAMHWVRQAPGKGLEWVAVISYDGSNKYYADSVKGRFTISRDNSKNTLYLQMNSLRAEDTAVYYCARAHNSSSWSFDYWGQGTLVTVSSTRIQNPDPAVYQLRDSKSSDKSVCLFTDFDSQTNVSQSKDSDVYITDKCVLDMRSMDFKSNSAVAWSNKSDFACANAFNNSIIPEDTFFPSPESSCDVKLVEKSFETDTNLNFQNLSVIGFRILLLKVAGFNLLMTLRLWSS

SEQ ID NO: 12620 - protein, 766 aa, Artificial Sequence
  Synthetic Polypeptide
MALPVTALLLPLALLLHAARPEVQLVESGGGLVQPGGSLRLSCAASGFSFSDFWMSWVRQAPGKGLEWVATISQAGSEKDYVDSVKGRFTISRDNAKKSLYLQMNSLRAEDTAVYYCASGVYSFDYRGQGTLVTVSSGTGGGGSGGGGSGGGGSEFDDVVMTQSPLSLPVSLGDQASISCRSSQRLVHSNGNTYLHWYLQKPGQSPKLLIYRVSNRFPGVPDRFSGSGSGTDFTLKISRVEAEDLGIYFCSQSTHVPYTFGGGTKLEIKRLEDLKNVFPPEVAVFEPSEAEISHTQKATLVCLATGFYPDHVELSWWVNGKEVHSGVCTDPQPLKEQPALNDSRYCLSSRLRVSATFWQNPRNHFRCQVQFYGLSENDEWTQDRAKPVTQIVSAEAWGRADCGFTSESYQQGVLSATILYEILLGKATLYAVLVSALVLMAMVKRKDSRGRAKRSGSGATNFSLLKQAGDVEENPGPTSMDWIWRILFLVGAATGAHSFEEVRLQQSGPDLIKPGASVKMSCKASGYTFTGYVMHWVKQRPGQGLEWIGFINPYNDDIQSNERFRGKATLTSDKSSTTAYMELSSLTSEDSAVYYCARGAGYNFDGAYRFFDFWGQGTTLTVSSTRIQNPDPAVYQLRDSKSSDKSVCLFTDFDSQTNVSQSKDSDVYITDKCVLDMRSMDFKSNSAVAWSNKSDFACANAFNNSIIPEDTFFPSPESSCDVKLVEKSFETDTNLNFQNLSVIGFRILLLKVAGFNLLMTLRLWSS

SEQ ID NO: 12621 - protein, 757 aa, Artificial Sequence
  Synthetic Polypeptide
MALPVTALLLPLALLLHAARPEVQLVESGGGLVQPGGSLRLSCAASGFSFSDFWMSWVRQAPGKGLEWVATISQAGSEKDYVDSVKGRFTISRDNAKKSLYLQMNSLRAEDTAVYYCASGVYSFDYRGQGTLVTVSSGTGGGGSGGGGSGGGGSEFDSYELTQPPSVSVSPGQTATISCSGDQLGGKYGHWYQKKPGQSPVLVLYQDRKRPAGIPERFSGSSSGNTITLTISGTQAVDEADYYCQAWDTNLGGVFGGGTKVTVLGQLEDLKNVFPPEVAVFEPSEAEISHTQKATLVCLATGFYPDHVELSWWVNGKEVHSGVCTDPQPLKEQPALNDSRYCLSSRLRVSATFWQNPRNHFRCQVQFYGLSENDEWTQDRAKPVTQIVSAEAWGRADCGFTSESYQQGVLSATILYEILLGKATLYAVLVSALVLMAMVKRKDSRGRAKRSGSGATNFSLLKQAGDVEENPGPTSMDWIWRILFLVGAATGAHSFEQVQLVESGAEVKKPGASVKVSCKASGYTFTGYYMHWVRQAPGQGLEWMGRINPNSGGTNYAQKFQGRVTMTRDTSISTAYMELSRLRSDDTAVYYCASPRGRGSAFDIWGQGTLVTVSSTRIQNPDPAVYQLRDSKSSDKSVCLFTDFDSQTNVSQSKDSDVYITDKCVLDMRSMDFKSNSAVAWSNKSDFACANAFNNSIIPEDTFFPSPESSCDVKLVEKSFETDTNLNFQNLSVIGFRILLLKVAGFNLLMTLRLWSS

SEQ ID NO: 12622 - protein, 760 aa, Artificial Sequence
  Synthetic Polypeptide
MALPVTALLLPLALLLHAARPEVQLVESGGGLVQPGGSLRLSCAASGFSFSDFWMSWVRQAPGKGLEWVATISQAGSEKDYVDSVKGRFTISRDNAKKSLYLQMNSLRAEDTAVYYCASGVYSFDYRGQGTLVTVSSGTGGGGSGGGGSGGGGSEFDNFMLTQPHSVSESPGKTVTISCTRSSGSIASKYVQWYQQRPGSSPTTVIYEDNQRPSGVPDRFSGSIDTSSNSASLTISGLRTEDEADYYCHSYDSNNHSVFGGGTKVTVLGQLEDLKNVFPPEVAVFEPSEAEISHTQKATLVCLATGFYPDHVELSWWVNGKEVHSGVCTDPQPLKEQPALNDSRYCLSSRLRVSATFWQNPRNHFRCQVQFYGLSENDEWTQDRAKPVTQIVSAEAWGRADCGFTSESYQQGVLSATILYEILLGKATLYAVLVSALVLMAMVKRKDSRGRAKRSGSGATNFSLLKQAGDVEENPGPTSMDWIWRILFLVGAATGAHSFEEVQLVESGGGVVQPGGSLRLSCAASGFTFSSYAMSWVRQAPGKGLEWVSAISGSGGSTYYADSVKGRFSISRDNSKNTLYLQMNSLRAEDTAVYYCARTRSSGAFDIWGQGTLVTVSSTRIQNPDPAVYQLRDSKSSDKSVCLFTDFDSQTNVSQSKDSDVYITDKCVLDMRSMDFKSNSAVAWSNKSDFACANAFNNSIIPEDTFFPSPESSCDVKLVEKSFETDTNLNFQNLSVIGFRILLLKVAGFNLLMTLRLWSS

SEQ ID NO: 12623 - protein, 755 aa, Artificial Sequence
  Synthetic Polypeptide
MALPVTALLLPLALLLHAARPEVQLVESGGGLVQPGGSLRLSCAASGFSFSDFWMSWVRQAPGKGLEWVATISQAGSEKDYVDSVKGRFTISRDNAKKSLYLQMNSLRAEDTAVYYCASGVYSFDYRGQGTLVTVSSGTGGGGSGGGGSGGGGSEFDIQMNQSPSSLSASLGDTITITCHASQNINVWLSWYQQKPGNIPKLLIYKASNLHTGVPSRFSGSGSGTGFTITISSLQPEDIATYYCQQGQSYPWTFGGGTKLEIKRLEDLKNVFPPEVAVFEPSEAEISHTQKATLVCLATGFYPDHVELSWWVNGKEVHSGVCTDPQPLKEQPALNDSRYCLSSRLRVSATFWQNPRNHFRCQVQFYGLSENDEWTQDRAKPVTQIVSAEAWGRADCGFTSESYQQGVLSATILYEILLGKATLYAVLVSALVLMAMVKRKDSRGRAKRSGSGATNFSLLKQAGDVEENPGPTSMDWIWRILFLVGAATGAHSFEEVQLQQSGPELVKPGASVKISCKASGYSFTGYFMNWVKQSHGKSLEYIGRFNPYNGETLYNQKFKGKATLTVDKSSSTVHMELLSVTSEDSAVYYCGRSGNDDAMDYWGQGTSVTVSSATRIQNPDPAVYQLRDSKSSDKSVCLFTDFDSQTNVSQSKDSDVYITDKCVLDMRSMDFKSNSAVAWSNKSDFACANAFNNSIIPEDTFFPSPESSCDVKLVEKSFETDTNLNFQNLSVIGFRILLLKVAGFNLLMTLRLWSS

SEQ ID NO: 12624 - protein, 756 aa, Artificial Sequence
  Synthetic Polypeptide
MALPVTALLLPLALLLHAARPEVQLVESGGGLVQPGGSLRLSCAASGFSFSDFWMSWVRQAPGKGLEWVATISQAGSEKDYVDSVKGRFTISRDNAKKSLYLQMNSLRAEDTAVYYCASGVYSFDYRGQGTLVTVSSGTGGGGSGGGGSGGGGSEFEIVLTQSPATLSLSPGERATLSCRASQSVRSYLAWYQQKPGQAPRLLIYDASNRATGIPARFSGSGSGTDFTLTISSLEPEDFAVYYCQQRSNWPPTFGQGTKVEIKLEDLKNVFPPEVAVFEPSEAEISHTQKATLVCLATGFYPDHVELSWWVNGKEVHSGVCTDPQPLKEQPALNDSRYCLSSRLRVSATFWQNPRNHFRCQVQFYGLSENDEWTQDRAKPVTQIVSAEAWGRADCGFTSESYQQGVLSATILYEILLGKATLYAVLVSALVLMAMVKRKDSRGRAKRSGSGATNFSLLKQAGDVEENPGPTSMDWIWRILFLVGAATGAHSFEQLQVQESGPGLVKPSETLSLTCTVSGGSISNSYFSWGWIRQPPGKGLEWIGSFYYGEKTYYNPSLKSRATISIDTSKSQFSLKLSSVTAADTAVYYCPRGPTMIRGVIDSWGQGTLVTVSSTRIQNPDPAVYQLRDSKSSDKSVCLFTDFDSQTNVSQSKDSDVYITDKCVLDMRSMDFKSNSAVAWSNKSDFACANAFNNSIIPEDTFFPSPESSCDVKLVEKSFETDTNLNFQNLSVIGFRILLLKVAGFNLLMTLRLWSS

SEQ ID NO: 12625 - protein, 765 aa, Artificial Sequence
  Synthetic Polypeptide
MALPVTALLLPLALLLHAARPEVQLVESGGGLVQPGGSLRLSCAASGFSFSDFWMSWVRQAPGKGLEWVATISQAGSEKDYVDSVKGRFTISRDNAKKSLYLQMNSLRAEDTAVYYCASGVYSFDYRGQGTLVTVSSGTGGGGSGGGGSGGGGSEFDIVMTQTPLSLPVTPGEPASISCRSSRSLLDSDDGNTYLDWYLQKPGQSPQLLIYTLSYRASGVPDRFSGSGSGTDFTLKISRVEAEDVGVYYCMQRVEFPITFGQGTRLEIKRLEDLKNVFPPEVAVFEPSEAEISHTQKATLVCLATGFYPDHVELSWWVNGKEVHSGVCTDPQPLKEQPALNDSRYCLSSRLRVSATFWQNPRNHFRCQVQFYGLSENDEWTQDRAKPVTQIVSAEAWGRADCGFTSESYQQGVLSATILYEILLGKATLYAVLVSALVLMAMVKRKDSRGRAKRSGSGATNFSLLKQAGDVEENPGPTSMDWIWRILFLVGAATGAHSFEQVQLVESGGGVVQPGRSLRLSCAASGFIFSRYGMHWVRQAPGKGLKWVAVIWYDGSNKLYADSVKGRFTISRDNSKNTLYLQMNSLRAEDTAVYYCARDYYDNSRHHWGFDYWGQGTLVTVSSTRIQNPDPAVYQLRDSKSSDKSVCLFTDFDSQTNVSQSKDSDVYITDKCVLDMRSMDFKSNSAVAWSNKSDFACANAFNNSIIPEDTFFPSPESSCDVKLVEKSFETDTNLNFQNLSVIGFRILLLKVAGFNLLMTLRLWSS

SEQ ID NO: 12626 - protein, 755 aa, Artificial Sequence
  Synthetic Polypeptide
MALPVTALLLPLALLLHAARPEVQLVESGGGLVQPGGSLRLSCAASGFSFSDFWMSWVRQAPGKGLEWVATISQAGSEKDYVDSVKGRFTISRDNAKKSLYLQMNSLRAEDTAVYYCASGVYSFDYRGQGTLVTVSSGTGGGGSGGGGSGGGGSEFEIQMTQSPSSMSASLGDTITITCQATQDIFKNLNWYQQKPGKPPSLLIYYATELAEGVPSRFSGSGSGSDYSLTISNLESEDFAAYYCLQFFEFPFTFGSGTKLEMKLEDLKNVFPPEVAVFEPSEAEISHTQKATLVCLATGFYPDHVELSWWVNGKEVHSGVCTDPQPLKEQPALNDSRYCLSSRLRVSATFWQNPRNHFRCQVQFYGLSENDEWTQDRAKPVTQIVSAEAWGRADCGFTSESYQQGVLSATILYEILLGKATLYAVLVSALVLMAMVKRKDSRGRAKRSGSGATNFSLLKQAGDVEENPGPTSMDWIWRILFLVGAATGAHSFEQVQLQQSGAELVRPGTSVKVSCKASGYVFTNYWIEWIKQRPGQGLEWIGVMNPGSGETTYNEKFKGKATLTADKSSSTAYMQLSSLTSVDSAVYFCARDHDRDYYAMDYWGQGTSVTVSSTRIQNPDPAVYQLRDSKSSDKSVCLFTDFDSQTNVSQSKDSDVYITDKCVLDMRSMDFKSNSAVAWSNKSDFACANAFNNSIIPEDTFFPSPESSCDVKLVEKSFETDTNLNFQNLSVIGFRILLLKVAGFNLLMTLRLWSS

SEQ ID NO: 12627 - protein, 752 aa, Artificial Sequence
  Synthetic Polypeptide
MALPVTALLLPLALLLHAARPEVQLVESGGGLVQPGGSLRLSCAASGFSFSDFWMSWVRQAPGKGLEWVATISQAGSEKDYVDSVKGRFTISRDNAKKSLYLQMNSLRAEDTAVYYCASGVYSFDYRGQGTLVTVSSGTGGGGSGGGGSGGGGSEFDILLTQSPAILSVSPGERVSFSCRASQNIGTSIHWYQQRTNGSPRLLIKYASESVSGIPSRFSGSGSGTDFTLSINSVESEDIADYYCQHTNSWPTTFGGGTKLEIKRLEDLKNVFPPEVAVFEPSEAEISHTQKATLVCLATGFYPDHVELSWWVNGKEVHSGVCTDPQPLKEQPALNDSRYCLSSRLRVSATFWQNPRNHFRCQVQFYGLSENDEWTQDRAKPVTQIVSAEAWGRADCGFTSESYQQGVLSATILYEILLGKATLYAVLVSALVLMAMVKRKDSRGRAKRSGSGATNFSLLKQAGDVEENPGPTSMDWIWRILFLVGAATGAHSFEQVQLQQSDAELVKPGASVKISCKASGYTFTDHAIHWVKQKPEQGLEWIGYFSPGNGDIKYNEKFKGKATLTADKSSSTAYMQLNSLTSEDSAVYFCKRSYGNYDYWGQGTTLTVSSTRIQNPDPAVYQLRDSKSSDKSVCLFTDFDSQTNVSQSKDSDVYITDKCVLDMRSMDFKSNSAVAWSNKSDFACANAFNNSIIPEDTFFPSPESSCDVKLVEKSFETDTNLNFQNLSVIGFRILLLKVAGFNLLMTLRLWSS

SEQ ID NO: 12628 - protein, 757 aa, Artificial Sequence
  Synthetic Polypeptide
MALPVTALLLPLALLLHAARPEVQLVESGGGLVQPGGSLRLSCAASGFSFSDFWMSWVRQAPGKGLEWVATISQAGSEKDYVDSVKGRFTISRDNAKKSLYLQMNSLRAEDTAVYYCASGVYSFDYRGQGTLVTVSSGTGGGGSGGGGSGGGGSEFDIVMTQSPDSLAVSLGERATINCKSSQSLLNSGDQKNYLTWYQQKPGQPPKLLIYWASTRESGVPDRFSGSGSGTDFTLTISSLQAEDVAVYYCQNDYSYPLTFGQGTKVEIKLEDLKNVFPPEVAVFEPSEAEISHTQKATLVCLATGFYPDHVELSWWVNGKEVHSGVCTDPQPLKEQPALNDSRYCLSSRLRVSATFWQNPRNHFRCQVQFYGLSENDEWTQDRAKPVTQIVSAEAWGRADCGFTSESYQQGVLSATILYEILLGKATLYAVLVSALVLMAMVKRKDSRGRAKRSGSGATNFSLLKQAGDVEENPGPTSMDWIWRILFLVGAATGAHSFEQVQLVQSGAEVKKTGSSVKVSCKASGYTFTDHAIHVWRQAPGQALEWMGHFSPGNTDIKYNDKFKGRVTLTVDRSMSTAYMELSSLRSEDTAMYYCKTSTFFFDYWGQGTMVTVSSTRIQNPDPAVYQLRDSKSSDKSVCLFTDFDSQTNVSQSKDSDVYITDKCVLDMRSMDFKSNSAVAWSNKSDFACANAFNNSIIPEDTFFPSPESSCDVKLVEKSFETDTNLNFQNLSVIGFRILLLKVAGFNLLMTLRLWSS

SEQ ID NO: 12629 - protein, 756 aa, Artificial Sequence
  Synthetic Polypeptide
MALPVTALLLPLALLLHAARPEVQLVESGGGLVQPGGSLRLSCAASGFSFSDFWMSWVRQAPGKGLEWVATISQAGSEKDYVDSVKGRFTISRDNAKKSLYLQMNSLRAEDTAVYYCASGVYSFDYRGQGTLVTVSSGTGGGGSGGGGSGGGGSEFDIQMTQSPSSLSASVGDRVTITCKASQDVSIAVAWYQQKPGKAPKVLIYSASYRYTGVPDRFSGSGSGTDFTFTISSLQPEDIAVYYCQQHYITPLTFGGGTKVEIKLEDLKNVFPPEVAVFEPSEAEISHTQKATLVCLATGFYPDHVELSWWVNGKEVHSGVCTDPQPLKEQPALNDSRYCLSSRLRVSATFWQNPRNHFRCQVQFYGLSENDEWTQDRAKPVTQIVSAEAWGRADCGFTSESYQQGVLSATILYEILLGKATLYAVLVSALVLMAMVKRKDSRGRAKRSGSGATNFSLLKQAGDVEENPGPTSMDWIWRILFLVGAATGAHSFEQIQLVQSGHEVKKPGASVKVSCKASGYTFTNYGMNWVRQAPGQGLEWMGWINTKTGEPTYAEEFKGRFVFSLETSASTAYLQISSLKAEDTAMYFCGRGGYGSSYWYFDVWGQGTTVTVSSTRIQNPDPAVYQLRDSKSSDKSVCLFTDFDSQTNVSQSKDSDVYITDKCVLDMRSMDFKSNSAVAWSNKSDFACANAFNNSIIPEDTFFPSPESSCDVKLVEKSFETDTNLNFQNLSVIGFRILLLKVAGFNLLMTLRLWSS

SEQ ID NO: 12630 - protein, 758 aa, Artificial Sequence
  Synthetic Polypeptide
MALPVTALLLPLALLLHAARPEVQLVESGGGLVQPGGSLRLSCAASGFSFSDFWMSWVRQAPGKGLEWVATISQAGSEKDYVDSVKGRFTISRDNAKKSLYLQMNSLRAEDTAVYYCASGVYSFDYRGQGTLVTVSSGTGGGGSGGGGSGGGGSEFDIVMTQSPDSLAVSLGERATINCRASKSVSTSGYSYMHWYQQKPGQPPKLLIYLASNLESGVPDRFSGSGSGTDFTLTISSLQAEDVAVYYCQHSRELPYTFGQGTKLEIKLEDLKNVFPPEVAVFEPSEAEISHTQKATLVCLATGFYPDHVELSWWVNGKEVHSGVCTDPQPLKEQPALNDSRYCLSSRLRVSATFWQNPRNHFRCQVQFYGLSENDEWTQDRAKPVTQIVSAEAWGRADCGFTSESYQQGVLSATILYEILLGKATLYAVLVSALVLMAMVKRKDSRGRAKRSGSGATNFSLLKQAGDVEENPGPTSMDWIWRILFLVGAATGAHSFEQVQLQESGPGLVKPSETLSLTCTVSGGSISSYGVHWIRQPPGKGLEWIGVIWTSGVTDYNSALMGRVTISVDTSKNQFSLKLSSVTAADTAVYYCARDGDYDRYTMDYWGQGTLVTVSSTRIQNPDPAVYQLRDSKSSDKSVCLFTDFDSQTNVSQSKDSDVYITDKCVLDMRSMDFKSNSAVAWSNKSDFACANAFNNSIIPEDTFFPSPESSCDVKLVEKSFETDTNLNFQNLSVIGFRILLLKVAGFNLLMTLRLWSS

SEQ ID NO: 12631 - protein, 758 aa, Artificial Sequence
  Synthetic Polypeptide
MALPVTALLLPLALLLHAARPEVQLVESGGGLVQPGGSLRLSCAASGFSFSDFWMSWVRQAPGKGLEWVATISQAGSEKDYVDSVKGRFTISRDNAKKSLYLQMNSLRAEDTAVYYCASGVYSFDYRGQGTLVTVSSGTGGGGSGGGGSGGGGSEFDIQMTQSPSSLSASVGDRVTITCRASQSIGTSLHWYQQKPGKAPKLLIKFASRLQSGVPSRFSGSGSGTDFTLTISSLQPEDFATYYCQQSPGFPPTFGQGTKLEIKRLEDLKNVFPPEVAVFEPSEAEISHTQKATLVCLATGFYPDHVELSWWVNGKEVHSGVCTDPQPLKEQPALNDSRYCLSSRLRVSATFWQNPRNHFRCQVQFYGLSENDEWTQDRAKPVTQIVSAEAWGRADCGFTSESYQQGVLSATILYEILLGKATLYAVLVSALVLMAMVKRKDSRGRAKRSGSGATNFSLLKQAGDVEENPGPTSMDWIWRILFLVGAATGAHSFEQVQLVESGGGLVKPGGSLRLSCAASGFSITTSGYYWTWIRQFPGKGLEWMGYIGYNSKTYYNPALKSRITISRDNAKNSLYLQMNSLRAEDTAVYYCARSLYGGYKDAFDSWGQGTLVTVSSTRIQNPDPAVYQLRDSKSSDKSVCLFTDFDSQTNVSQSKDSDVYITDKCVLDMRSMDFKSNSAVAWSNKSDFACANAFNNSIIPEDTFFPSPESSCDVKLVEKSFETDTNLNFQNLSVIGFRILLLKVAGFNLLMTLRLWSS

SEQ ID NO: 12632 - protein, 763 aa, Artificial Sequence
  Synthetic Polypeptide
MALPVTALLLPLALLLHAARPEVQLVESGGGLVQPGGSLRLSCAASGFSFSDFWMSWVRQAPGKGLEWVATISQAGSEKDYVDSVKGRFTISRDNAKKSLYLQMNSLRAEDTAVYYCASGVYSFDYRGQGTLVTVSSGTGGGGSGGGGSGGGGSEFDEIVLTQSPLSLPVTPGEPASISCRSSQSLLHSIGYNYLDWYLQKPGQSPQLLIYLGSNRASGVPDRFSGSGSGTDFTLKISRVEAEDVGVYYCMQALQTPLTFGGGTKVEIKRLEDLKNVFPPEVAVFEPSEAEISHTQKATLVCLATGFYPDHVELSWWVNGKEVHSGVCTDPQPLKEQPALNDSRYCLSSRLRVSATFWQNPRNHFRCQVQFYGLSENDEWTQDRAKPVTQIVSAEAWGRADCGFTSESYQQGVLSATILYEILLGKATLYAVLVSALVLMAMVKRKDSRGRAKRSGSGATNFSLLKQAGDVEENPGPTSMDWIWRILFLVGAATGAHSFEEVQLVESGGGVVQPGRSLRLSCAASGFTFRSYGMHWVRQAPGKGLEWVAVISYDGSNKYYTDSVNGRFTISRDNSKNTLYLQMNSLRAEDTAVYYCARGGGYYETSGPDYWGQGTLVTVSSTRIQNPDPAVYQLRDSKSSDKSVCLFTDFDSQTNVSQSKDSDVYITDKCVLDMRSMDFKSNSAVAWSNKSDFACANAFNNSIIPEDTFFPSPESSCDVKLVEKSFETDTNLNFQNLSVIGFRILLLKVAGFNLLMTLRLWSS

SEQ ID NO: 12633 - protein, 761 aa, Artificial Sequence
  Synthetic Polypeptide
MALPVTALLLPLALLLHAARPEVQLVESGGGLVQPGGSLRLSCAASGFSFSDFWMSWVRQAPGKGLEWVATISQAGSEKDYVDSVKGRFTISRDNAKKSLYLQMNSLRAEDTAVYYCASGVYSFDYRGQGTLVTVSSGTGGGGSGGGGSGGGGSEFDDVVMTQSPLSLPVTPGEPASISCRSSQSLLHSIGYNYLHWFLQKPGQSPQLLIYLGSNRASGVPDRFSGSGSGTDFTLKISRVEAEDVGVYYCMQALQTPPTFGQGTRLEIKRLEDLKNVFPPEVAVFEPSEAEISHTQKATLVCLATGFYPDHVELSWWVNGKEVHSGVCTDPQPLKEQPALNDSRYCLSSRLRVSATFWQNPRNHFRCQVQFYGLSENDEWTQDRAKPVTQIVSAEAWGRADCGFTSESYQQGVLSATILYEILLGKATLYAVLVSALVLMAMVKRKDSRGRAKRSGSGATNFSLLKQAGDVEENPGPTSMDWIWRILFLVGAATGAHSFEQLQLQESGPGLVKPSGTLSLTCAVSGGSISSSNWWSWVRQPPGKGLEWIGEIYHSGSTNYNPSLKSRVTISVDKSKNQFSLKLSSVTAADTAVYYCVGSPYGDYVLDYWGQGTLVTVSSTRIQNPDPAVYQLRDSKSSDKSVCLFTDFDSQTNVSQSKDSDVYITDKCVLDMRSMDFKSNSAVAWSNKSDFACANAFNNSIIPEDTFFPSPESSCDVKLVEKSFETDTNLNFQNLSVIGFRILLLKVAGFNLLMTLRLWSS

SEQ ID NO: 12634 - protein, 759 aa, Artificial Sequence
  Synthetic Polypeptide
MALPVTALLLPLALLLHAARPEVQLVESGGGLVQPGGSLRLSCAASGFSFSDFWMSWVRQAPGKGLEWVATISQAGSEKDYVDSVKGRFTISRDNAKKSLYLQMNSLRAEDTAVYYCASGVYSFDYRGQGTLVTVSSGTGGGGSGGGGSGGGGSEFDEIVLTQSPGTLSLSLGERATLSCRASQSISSSFLAWYQQKPGQAPKLLIYAASTRATGIPDRFSGSGSGTDFTLTISRLEPEDFAVYYCQQYGRSLSFGGGTKVEVKLEDLKNVFPPEVAVFEPSEAEISHTQKATLVCLATGFYPDHVELSWWVNGKEVHSGVCTDPQPLKEQPALNDSRYCLSSRLRVSATFWQNPRNHFRCQVQFYGLSENDEWTQDRAKPVTQIVSAEAWGRADCGFTSESYQQGVLSATILYEILLGKATLYAVLVSALVLMAMVKRKDSRGRAKRSGSGATNFSLLKQAGDVEENPGPTSMDWIWRILFLVGAATGAHSFEQVQLQQSGPGLVKPSQTLSLTCAISGDSVSGNSATWNWIRQSPSRGLEWLGRTYYRSKWNHDYAESVKSRITINPDTSKNQFSLQLNSVTPEDTAVYYCARGDSSSWYAFDYWGQGTLVTVSSTRIQNPDPAVYQLRDSKSSDKSVCLFTDFDSQTNVSQSKDSDVYITDKCVLDMRSMDFKSNSAVAWSNKSDFACANAFNNSIIPEDTFFPSPESSCDVKLVEKSFETDTNLNFQNLSVIGFRILLLKVAGFNLLMTLRLWSS

SEQ ID NO: 12635 - protein, 758 aa, Artificial Sequence
  Synthetic Polypeptide
MALPVTALLLPLALLLHAARPEVQLVESGGGLVQPGGSLRLSCAASGFSFSDFWMSWVRQAPGKGLEWVATISQAGSEKDYVDSVKGRFTISRDNAKKSLYLQMNSLRAEDTAVYYCASGVYSFDYRGQGTLVTVSSGTGGGGSGGGGSGGGGSEFDQSVVTQPPSVSVAPGKTARITCGRNNIGSKSVHWYQQKPGQAPVLVVYDDSDRPSGIPERFSGSNSGNTATLTISRVEAGDEADYYCQVWDSSSDHVVFGGGTKLTVLGLEDLKNVFPPEVAVFEPSEAEISHTQKATLVCLATGFYPDHVELSWWVNGKEVHSGVCTDPQPLKEQPALNDSRYCLSSRLRVSATFWQNPRNHFRCQVQFYGLSENDEWTQDRAKPVTQIVSAEAWGRADCGFTSESYQQGVLSATILYEILLGKATLYAVLVSALVLMAMVKRKDSRGRAKRSGSGATNFSLLKQAGDVEENPGPTSMDWIWRILFLVGAATGAHSFEVQLVQSGGGVMRPGGSLRLSCAASGFTFDDYGMSWVRQAPGKGLEWVSGINWNGGSTGYADSVRGRFTISRDNAKNSLYLQMNSLRAEDTALYYCARERGYGYHDPHDYWGQGTLVTVSSTRIQNPDPAVYQLRDSKSSDKSVCLFTDFDSQTNVSQSKDSDVYITDKCVLDMRSMDFKSNSAVAWSNKSDFACANAFNNSIIPEDTFFPSPESSCDVKLVEKSFETDTNLNFQNLSVIGFRILLLKVAGFNLLMTLRLWSS

SEQ ID NO: 12636 - protein, 771 aa, Artificial Sequence
  Synthetic Polypeptide
MALPVTALLLPLALLLHAARPEVQLVESGGGLVQPGGSLRLSCAASGFSFSDFWMSWVRQAPGKGLEWVATISQAGSEKDYVDSVKGRFTISRDNAKKSLYLQMNSLRAEDTAVYYCASGVYSFDYRGQGTLVTVSSGTGGGGSGGGGSGGGGSEFEQKLISEEDLEFQAVVTQPPSASGTPGQRVTISCSGSSSNIGSNTVNWYQQVPGTAPKLLIYSNNQRPSGVPDRFSGSKSGTSASLAISGLQSEDEADYYCAAWDDSLNGWVFGGGTKLTVLLEDLKNVFPPEVAVFEPSEAEISHTQKATLVCLATGFYPDHVELSWWVNGKEVHSGVCTDPQPLKEQPALNDSRYCLSSRLRVSATFWQNPRNHFRCQVQFYGLSENDEWTQDRAKPVTQIVSAEAWGRADCGFTSESYQQGVLSATILYEILLGKATLYAVLVSALVLMAMVKRKDSRGRAKRSGSGATNFSLLKQAGDVEENPGPTSMDWIWRILFLVGAATGAHSFEQMQLVQSGAEVKEPGESLRISCKGSGYSFTNFWISWVRQMPGKGLEWMGRVDPGYSYSTYSPSFQGHVTISADKSTSTAYLQWNSLKASDTAMYYCARVQYSGYYDWFDPWGQGTLVTVSSTRIQNPDPAVYQLRDSKSSDKSVCLFTDFDSQTNVSQSKDSDVYITDKCVLDMRSMDFKSNSAVAWSNKSDFACANAFNNSIIPEDTFFPSPESSCDVKLVEKSFETDTNLNFQNLSVIGFRILLLKVAGFNLLMTLRLWSS

SEQ ID NO: 12637 - protein, 765 aa, Artificial Sequence
  Synthetic Polypeptide
MALPVTALLLPLALLLHAARPEVQLVESGGGLVQPGGSLRLSCAASGFSFSDFWMSWVRQAPGKGLEWVATISQAGSEKDYVDSVKGRFTISRDNAKKSLYLQMNSLRAEDTAVYYCASGVYSFDYRGQGTLVTVSSGTGGGGSGGGGSGGGGSEFEQKLISEEDLEFDIQMTQSPSTLSASVGDRVTITCRASQNINKWLAWYQQRPGKAPQLLIYKASSLESGVPSRFSGSGSGTEYTLTISSLQPDDFATYYCQQYNSYATFGQGTKVEIKRLEDLKNVFPPEVAVFEPSEAEISHTQKATLVCLATGFYPDHVELSWWVNGKEVHSGVCTDPQPLKEQPALNDSRYCLSSRLRVSATFWQNPRNHFRCQVQFYGLSENDEWTQDRAKPVTQIVSAEAWGRADCGFTSESYQQGVLSATILYEILLGKATLYAVLVSALVLMAMVKRKDSRGRAKRSGSGATNFSLLKQAGDVEENPGPTSMDWIWRILFLVGAATGAHSFEQVQLVQSGAEVKKPGESLKISCKGSGYNFSNKWIGWVRQLPGRGLEWIAIIYPGYSDITYSPSFQGRVTISADTSINTAYLHWHSLKASDTAMYYCVRHTALAGFDYWGLGTLVTVSSTRIQNPDPAVYQLRDSKSSDKSVCLFTDFDSQTNVSQSKDSDVYITDKCVLDMRSMDFKSNSAVAWSNKSDFACANAFNNSIIPEDTFFPSPESSCDVKLVEKSFETDTNLNFQNLSVIGFRILLLKVAGFNLLMTLRLWSS

SEQ ID NO: 12638 - protein, 756 aa, Artificial Sequence
  Synthetic Polypeptide
MALPVTALLLPLALLLHAARPEVQLVESGGGLVQPGGSLRLSCAASGFSFSDFWMSWVRQAPGKGLEWVATISQAGSEKDYVDSVKGRFTISRDNAKKSLYLQMNSLRAEDTAVYYCASGVYSFDYRGQGTLVTVSSGTGGGGSGGGGSGGGGSEFIVLTQSPASLAVSLGQRATISCRASESVDNYGNTFMHWYQQKPGQPPKLLIYRASNLESGIPARFSGSGSRTDFTLTINPVEADDVATYYCQQSNEDPPTFGAGTKLELKLEDLKNVFPPEVAVFEPSEAEISHTQKATLVCLATGFYPDHVELSWWVNGKEVHSGVCTDPQPLKEQPALNDSRYCLSSRLRVSATFWQNPRNHFRCQVQFYGLSENDEWTQDRAKPVTQIVSAEAWGRADCGFTSESYQQGVLSATILYEILLGKATLYAVLVSALVLMAMVKRKDSRGRAKRSGSGATNFSLLKQAGDVEENPGPTSMDWIWRILFLVGAATGAHSFEQIQLVQSGPELKKPGETVKISCKASGYIFTNYGMNWVKQAPGKSFKWMGWINTYTGESTYSADFKGRFAFSLETSASTAYLHINDLKNEDTATYFCARSGGYDPMDYWGQGTSVTVSSTRIQNPDPAVYQLRDSKSSDKSVCLFTDFDSQTNVSQSKDSDVYITDKCVLDMRSMDFKSNSAVAWSNKSDFACANAFNNSIIPEDTFFPSPESSCDVKLVEKSFETDTNLNFQNLSVIGFRILLLKVAGFNLLMTLRLWSS

SEQ ID NO: 12639 - protein, 755 aa, Artificial Sequence
  Synthetic Polypeptide
MALPVTALLLPLALLLHAARPEVQLVESGGGLVQPGGSLRLSCAASGFSFSDFWMSWVRQAPGKGLEWVATISQAGSEKDYVDSVKGRFTISRDNAKKSLYLQMNSLRAEDTAVYYCASGVYSFDYRGQGTLVTVSSGTGGGGSGGGGSGGGGSEFEIVLTQSPGTLSLSPGERATLSCRASQSVSNTYLAWYHQRPGQAPRLLIYGASSRATGIPDRFSGSGSGTDFALTISSLEPEDFAVYYCQQYSNSWTFGQGTKVEIKRLEDLKNVFPPEVAVFEPSEAEISHTQKATLVCLATGFYPDHVELSWWVNGKEVHSGVCTDPQPLKEQPALNDSRYCLSSRLRVSATFWQNPRNHFRCQVQFYGLSENDEWTQDRAKPVTQIVSAEAWGRADCGFTSESYQQGVLSATILYEILLGKATLYAVLVSALVLMAMVKRKDSRGRAKRSGSGATNFSLLKQAGDVEENPGPTSMDWIWRILFLVGAATGAHSFEQVQLVESGGGVVQPGRSLRLSCAASGFTFSSYDMHWVRQAPGKGLEWVAVISYDGTNEYYADSVKGRFTISRDTSKNTLYLQMNSLRAEDTAVYYCARERYFDWSFDYWGQGTLVSVSSTRIQNPDPAVYQLRDSKSSDKSVCLFTDFDSQTNVSQSKDSDVYITDKCVLDMRSMDFKSNSAVAWSNKSDFACANAFNNSIIPEDTFFPSPESSCDVKLVEKSFETDTNLNFQNLSVIGFRILLLKVAGFNLLMTLRLWSS

SEQ ID NO: 12640 - protein, 754 aa, Artificial Sequence
  Synthetic Polypeptide
MALPVTALLLPLALLLHAARPEVQLVESGGGLVQPGGSLRLSCAASGFSFSDFWMSWVRQAPGKGLEWVATISQAGSEKDYVDSVKGRFTISRDNAKKSLYLQMNSLRAEDTAVYYCASGVYSFDYRGQGTLVTVSSGTGGGGSGGGGSGGGGSEFELTQDPAVSVALGQTVRITCQGDSLRSNYANWYQQKPGQAPVLVIYGQNNRPSGIPDRFSGSSSGNTASLTITGAQAADEADYYCDSRVSTGNHVVFGGGTKLTVLGQLEDLKNVFPPEVAVFEPSEAEISHTQKATLVCLATGFYPDHVELSWWVNGKEVHSGVCTDPQPLKEQPALNDSRYCLSSRLRVSATFWQNPRNHFRCQVQFYGLSENDEWTQDRAKPVTQIVSAEAWGRADCGFTSESYQQGVLSATILYEILLGKATLYAVLVSALVLMAMVKRKDSRGRAKRSGSGATNFSLLKQAGDVEENPGPTSMDWIWRILFLVGAATGAHSFEEVQLVQSGAEVKKPGASVKVSCKASGYTFTSYAMHWVRQAPGQRLEWMGWINAGNGNTKYSQKFQGRVTITRDTSASTAYMELSSLRSEDTAVYYCARDISYGSFDYWGQGTLVTVSSTRIQNPDPAVYQLRDSKSSDKSVCLFTDFDSQTNVSQSKDSDVYITDKCVLDMRSMDFKSNSAVAWSNKSDFACANAFNNSIIPEDTFFPSPESSCDVKLVEKSFETDTNLNFQNLSVIGFRILLLKVAGFNLLMTLRLWSS

SEQ ID NO: 12641 - protein, 756 aa, Artificial Sequence
  Synthetic Polypeptide
MALPVTALLLPLALLLHAARPEVQLVESGGGLVQPGGSLRLSCAASGFSFSDFWMSWVRQAPGKGLEWVATISQAGSEKDYVDSVKGRFTISRDNAKKSLYLQMNSLRAEDTAVYYCASGVYSFDYRGQGTLVTVSSGTGGGGSGGGGSGGGGSEFDIVLTQTPATLSVTPGDSVSLSCRASQSISNNLHWYQQKSHESPRLLIKNASQSISGIPSKFSGSGSGTDFTLRINSVETEDFGMYFCQQSNSWPYTFGSGTKLEIKLEDLKNVFPPEVAVFEPSEAEISHTQKATLVCLATGFYPDHVELSWWVNGKEVHSGVCTDPQPLKEQPALNDSRYCLSSRLRVSATFWQNPRNHFRCQVQFYGLSENDEWTQDRAKPVTQIVSAEAWGRADCGFTSESYQQGVLSATILYEILLGKATLYAVLVSALVLMAMVKRKDSRGRAKRSGSGATNFSLLKQAGDVEENPGPTSMDWIWRILFLVGAATGAHSFEQVKLQQSGPELVKPGASVKISCKASGYSFTGYYMHWVKQSHGNILDWIGYIYPYNGVSSYNQKFKGKATLTVDKSSSTAYMELRSLTSEDSAVYYCARERGLYQLRAMDYWGQGTSVTVSSTRIQNPDPAVYQLRDSKSSDKSVCLFTDFDSQTNVSQSKDSDVYITDKCVLDMRSMDFKSNSAVAWSNKSDFACANAFNNSIIPEDTFFPSPESSCDVKLVEKSFETDTNLNFQNLSVIGFRILLLKVAGFNLLMTLRLWSS

SEQ ID NO: 12642 - protein, 747 aa, Artificial Sequence
  Synthetic Polypeptide
MALPVTALLLPLALLLHAARPEVQLVESGGGLVQPGGSLRLSCAASGFSFSDFWMSWVRQAPGKGLEWVATISQAGSEKDYVDSVKGRFTISRDNAKKSLYLQMNSLRAEDTAVYYCASGVYSFDYRGQGTLVTVSSGTGGGGSGGGGSGGGGSEFDIVMTQTPAIMSASPGQKVTITCSASSSVNYMHWYQQKLGSSPKLWIYDTSKLAPGVPARFSGSGSGTSYSLTISSMEAEDAASYFCHQWSSYPYTFGSGTKLEIKLEDLKNVFPPEVAVFEPSEAEISHTQKATLVCLATGFYPDHVELSWWVNGKEVHSGVCTDPQPLKEQPALNDSRYCLSSRLRVSATFWQNPRNHFRCQVQFYGLSENDEWTQDRAKPVTQIVSAEAWGRADCGFTSESYQQGVLSATILYEILLGKATLYAVLVSALVLMAMVKRKDSRGRAKRSGSGATNFSLLKQAGDVEENPGPTSMDWIWRILFLVGAATGAHSFEEVQLQESGPDLVKPSQSLSLTCTVTGYSITSGYGWHWIRQFPGNKLEWMGYIHYSGSTTYNPSLKSRISISRDTSKNQFFLQLNSVTTEDTATYYCARSLRYWGQGTTLTVSSTRIQNPDPAVYQLRDSKSSDKSVCLFTDFDSQTNVSQSKDSDVYITDKCVLDMRSMDFKSNSAVAWSNKSDFACANAFNNSIIPEDTFFPSPESSCDVKLVEKSFETDTNLNFQNLSVIGFRILLLKVAGFNLLMTLRLWSS

SEQ ID NO: 12643 - protein, 750 aa, Artificial Sequence
  Synthetic Polypeptide
MALPVTALLLPLALLLHAARPEVQLVESGGGLVQPGGSLRLSCAASGFSFSDFWMSWVRQAPGKGLEWVATISQAGSEKDYVDSVKGRFTISRDNAKKSLYLQMNSLRAEDTAVYYCASGVYSFDYRGQGTLVTVSSGTGGGGSGGGGSGGGGSEFDIQMTQSPSSLSASVGDRVTITCSATSSISYMHWYQQKPGKAPKGWIYDTSKLAHGVPSRFSGSGSGTDFTLTISSLQPEDFATYYCHQRRSYPFTFGQGTKVEIKLEDLKNVFPPEVAVFEPSEAEISHTQKATLVCLATGFYPDHVELSWWVNGKEVHSGVCTDPQPLKEQPALNDSRYCLSSRLRVSATFWQNPRNHFRCQVQFYGLSENDEWTQDRAKPVTQIVSAEAWGRADCGFTSESYQQGVLSATILYEILLGKATLYAVLVSALVLMAMVKRKDSRGRAKRSGSGATNFSLLKQAGDVEENPGPTSMDWIWRILFLVGAATGAHSFEEVQLVQSGAEVKKPGASVKVSCKASGYTFTNFWIHWVRQAPGQGLEWIGEIDPSDSYTNYNQKFKGRVTITRDTSTSTAYLELSSLRSEDTAVYYCAREITTVDYWGQGTLVTVSSTRIQNPDPAVYQLRDSKSSDKSVCLFTDFDSQTNVSQSKDSDVYITDKCVLDMRSMDFKSNSAVAWSNKSDFACANAFNNSIIPEDTFFPSPESSCDVKLVEKSFETDTNLNFQNLSVIGFRILLLKVAGFNLLMTLRLWSS

SEQ ID NO: 12644 - protein, 757 aa, Artificial Sequence
  Synthetic Polypeptide
MALPVTALLLPLALLLHAARPEVQLVESGGGLVQPGGSLRLSCAASGFSFSDFWMSWVRQAPGKGLEWVATISQAGSEKDYVDSVKGRFTISRDNAKKSLYLQMNSLRAEDTAVYYCASGVYSFDYRGQGTLVTVSSGTGGGGSGGGGSGGGGSEFDIQMTQSPSSLSASVGDRVTITCKASQGFNKYVAWYQQKPGKAPKLLIYYTSTLQPGVPSRFSGSGSGRDYTLTISSLQPEDFATYYCLQYGNLLYAFGQGTKVEIKRLEDLKNVFPPEVAVFEPSEAEISHTQKATLVCLATGFYPDHVELSWWVNGKEVHSGVCTDPQPLKEQPALNDSRYCLSSRLRVSATFWQNPRNHFRCQVQFYGLSENDEWTQDRAKPVTQIVSAEAWGRADCGFTSESYQQGVLSATILYEILLGKATLYAVLVSALVLMAMVKRKDSRGRAKRSGSGATNFSLLKQAGDVEENPGPTSMDWIWRILFLVGAATGAHSFEEVQLVQSGAEVKKPGASVKVSCKASGYTFTSYWIGWVRQAPGQGLEWIGDIYPGGGYTNYNEKFKGRVTITRDTSTSTAYLELSSLRSEDTAVYYCARLDGSSYRGAMDSWGQGTLVTVSSTRIQNPDPAVYQLRDSKSSDKSVCLFTDFDSQTNVSQSKDSDVYITDKCVLDMRSMDFKSNSAVAWSNKSDFACANAFNNSIIPEDTFFPSPESSCDVKLVEKSFETDTNLNFQNLSVIGFRILLLKVAGFNLLMTLRLWSS

SEQ ID NO: 12645 - protein, 753 aa, Artificial Sequence
  Synthetic Polypeptide
MALPVTALLLPLALLLHAARPEVQLVESGGGLVQPGGSLRLSCAASGFSFSDFWMSWVRQAPGKGLEWVATISQAGSEKDYVDSVKGRFTISRDNAKKSLYLQMNSLRAEDTAVYYCASGVYSFDYRGQGTLVTVSSGTGGGGSGGGGSGGGGSEFDIQMTQSPSSLSASVGDRVTITCRASQDIRYYLNWYQQKPGKAPKLLIYVASSLQSGVPSRFSGSGSGTEFTLTVSSLQPEDFATYYCLQVYSTPRTFGQGTKVEIKLEDLKNVFPPEVAVFEPSEAEISHTQKATLVCLATGFYPDHVELSWWVNGKEVHSGVCTDPQPLKEQPALNDSRYCLSSRLRVSATFWQNPRNHFRCQVQFYGLSENDEWTQDRAKPVTQIVSAEAWGRADCGFTSESYQQGVLSATILYEILLGKATLYAVLVSALVLMAMVKRKDSRGRAKRSGSGATNFSLLKQAGDVEENPGPTSMDWIWRILFLVGAATGAHSFEEVQLVESGGGLAKPGGSLRLSCAASGFRFTFNNYYMDWVRQAPGQGLEWVSRISSSGDPTWYADSVKGRFTISRENAKNTLFLQMNSLRAEDTAVYYCASLTTGSDSWGQGVLVTVSSTRIQNPDPAVYQLRDSKSSDKSVCLFTDFDSQTNVSQSKDSDVYITDKCVLDMRSMDFKSNSAVAWSNKSDFACANAFNNSIIPEDTFFPSPESSCDVKLVEKSFETDTNLNFQNLSVIGFRILLLKVAGFNLLMTLRLWSS

SEQ ID NO: 12646 - protein, 754 aa, Artificial Sequence
  Synthetic Polypeptide
MALPVTALLLPLALLLHAARPEVQLVESGGGLVQPGGSLRLSCAASGFSFSDFWMSWVRQAPGKGLEWVATISQAGSEKDYVDSVKGRFTISRDNAKKSLYLQMNSLRAEDTAVYYCASGVYSFDYRGQGTLVTVSSGTGGGGSGGGGSGGGGSEFEIVMTQSPATLSVSPGERATLSCRASQSVSRNLAWYQQKPGQAPRLLIYGASTRATGIPARFSGSGSGTEFTLTIGSLQSEDFAVYYCQQYKTWPRTFGQGTNVEIKLEDLKNVFPPEVAVFEPSEAEISHTQKATLVCLATGFYPDHVELSWWVNGKEVHSGVCTDPQPLKEQPALNDSRYCLSSRLRVSATFWQNPRNHFRCQVQFYGLSENDEWTQDRAKPVTQIVSAEAWGRADCGFTSESYQQGVLSATILYEILLGKATLYAVLVSALVLMAMVKRKDSRGRAKRSGSGATNFSLLKQAGDVEENPGPTSMDWIWRILFLVGAATGAHSFEQVQLQQWGAGLLKPSETLSLTCAVFGGSFSGYYWSWIRQPPGKGLEWIGEINHRGNTNDNPSLKSRVTISVDTSKNQFALKLSSVTAADTAVYYCARERGYTYGNFDHWGQGTLVTVSSTRIQNPDPAVYQLRDSKSSDKSVCLFTDFDSQTNVSQSKDSDVYITDKCVLDMRSMDFKSNSAVAWSNKSDFACANAFNNSIIPEDTFFPSPESSCDVKLVEKSFETDTNLNFQNLSVIGFRILLLKVAGFNLLMTLRLWSS

SEQ ID NO: 12647 - protein, 755 aa, Artificial Sequence
  Synthetic Polypeptide
MALPVTALLLPLALLLHAARPEVQLVESGGGLVQPGGSLRLSCAASGFSFSDFWMSWVRQAPGKGLEWVATISQAGSEKDYVDSVKGRFTISRDNAKKSLYLQMNSLRAEDTAVYYCASGVYSFDYRGQGTLVTVSSGTGGGGSGGGGSGGGGSEFEIVMTPSSATLSVSPGERATLSCRASQSVSRNLAWYQQKPGQAPRLLIYGASTRATGIPARFSGSGSGTEFTLTISSLQSEDFAVYYCHQYSNWMCSFGQGTKLEIKLEDLKNVFPPEVAVFEPSEAEISHTQKATLVCLATGFYPDHVELSWWVNGKEVHSGVCTDPQPLKEQPALNDSRYCLSSRLRVSATFWQNPRNHFRCQVQFYGLSENDEWTQDRAKPVTQIVSAEAWGRADCGFTSESYQQGVLSATILYEILLGKATLYAVLVSALVLMAMVKRKDSRGRAKRSGSGATNFSLLKQAGDVEENPGPTSMDWIWRILFLVGAATGAHSFEEVQLLESGGGLVQPGGSLRLSCAASGFTFSRYAMNWVRQAPGKGLEWVSGISGSGGRTYYADSVKGRFTISRDNSKNTLYLQMNSLRAEDTAVYYCAKDRDFWSGPFDYWGQGTLVTVSSTRIQNPDPAVYQLRDSKSSDKSVCLFTDFDSQTNVSQSKDSDVYITDKCVLDMRSMDFKSNSAVAWSNKSDFACANAFNNSIIPEDTFFPSPESSCDVKLVEKSFETDTNLNFQNLSVIGFRILLLKVAGFNLLMTLRLWSS

SEQ ID NO: 12648 - protein, 760 aa, Artificial Sequence
  Synthetic Polypeptide
MALPVTALLLPLALLLHAARPEVQLVESGGGLVQPGGSLRLSCAASGFSFSDFWMSWVRQAPGKGLEWVATISQAGSEKDYVDSVKGRFTISRDNAKKSLYLQMNSLRAEDTAVYYCASGVYSFDYRGQGTLVTVSSGTGGGGSGGGGSGGGGSEFDIQMTQSPSSLSASVGDRVTITCKASKNIRSYLAWYQQKPGKAPKLLIYSGSTLHSGVPSRFSGSGSGTDFTLTISSLQPEDFATYYCQQHHEYPLTFGQGTKVEIKRLEDLKNVFPPEVAVFEPSEAEISHTQKATLVCLATGFYPDHVELSWWVNGKEVHSGVCTDPQPLKEQPALNDSRYCLSSRLRVSATFWQNPRNHFRCQVQFYGLSENDEWTQDRAKPVTQIVSAEAWGRADCGFTSESYQQGVLSATILYEILLGKATLYAVLVSALVLMAMVKRKDSRGRAKRSGSGATNFSLLKQAGDVEENPGPTSMDWIWRILFLVGAATGAHSFEQVQLQESGPGLVKPSETLSLTCTVSGYTITSGYDWSWIRQPPGKGLEWIGYINYGGSTNYKPSLGSRVTISVDTSKNQFSLKLSSVTAADTAVYYCARYNEYKSYIYDWYFDFWGQGTLVTVSSTRIQNPDPAVYQLRDSKSSDKSVCLFTDFDSQTNVSQSKDSDVYITDKCVLDMRSMDFKSNSAVAWSNKSDFACANAFNNSIIPEDTFFPSPESSCDVKLVEKSFETDTNLNFQNLSVIGFRILLLKVAGFNLLMTLRLWSS

SEQ ID NO: 12649 - protein, 762 aa, Artificial Sequence
  Synthetic Polypeptide
MALPVTALLLPLALLLHAARPEVQLVESGGGLVQPGGSLRLSCAASGFSFSDFWMSWVRQAPGKGLEWVATISQAGSEKDYVDSVKGRFTISRDNAKKSLYLQMNSLRAEDTAVYYCASGVYSFDYRGQGTLVTVSSGTGGGGSGGGGSGGGGSEFQSVVTQPPSVSAAPGQKVTISCSGSSSNIGNNYVSWYQQLPGTAPKLLIYDNNKRPSGIPDRFSGSKSGTSATLGITGLQTGDEADYYCGTWDGSLYTMLFGGGTKLTVLLEDLKNVFPPEVAVFEPSEAEISHTQKATLVCLATGFYPDHVELSWWVNGKEVHSGVCTDPQPLKEQPALNDSRYCLSSRLRVSATFWQNPRNHFRCQVQFYGLSENDEWTQDRAKPVTQIVSAEAWGRADCGFTSESYQQGVLSATILYEILLGKATLYAVLVSALVLMAMVKRKDSRGRAKRSGSGATNFSLLKQAGDVEENPGPTSMDWIWRILFLVGAATGAHSFEEVQLVESGGGLVKPGGSLRLSCAASGFTFSNAWMSWVRQAPGKGLEWVGFIRSKAYGGTTEYAASVKGRFTISRDDSKSIAYLQMNNLKTEDTAVYYCARDGLYSSSWYDSDYWGQGTLVTVSSTRIQNPDPAVYQLRDSKSSDKSVCLFTDFDSQTNVSQSKDSDVYITDKCVLDMRSMDFKSNSAVAWSNKSDFACANAFNNSIIPEDTFFPSPESSCDVKLVEKSFETDTNLNFQNLSVIGFRILLLKVAGFNLLMTLRLWSS

SEQ ID NO: 12650 - protein, 767 aa, Artificial Sequence
  Synthetic Polypeptide
MALPVTALLLPLALLLHAARPEVQLVESGGGLVQPGGSLRLSCAASGFSFSDFWMSWVRQAPGKGLEWVATISQAGSEKDYVDSVKGRFTISRDNAKKSLYLQMNSLRAEDTAVYYCASGVYSFDYRGQGTLVTVSSGTGGGGSGGGGSGGGGSEFQSVLTQPPSVSGAPGQRVTISCTGSSSNIGAGYDVHWYQQLPGTAPKLLIFGNSNRPSGVPDRFSGFKSGTSASLAITGLQAEDEADYFCQSYDSSLSGSGVFGTGTKVTVLGLEDLKNVFPPEVAVFEPSEAEISHTQKATLVCLATGFYPDHVELSWWVNGKEVHSGVCTDPQPLKEQPALNDSRYCLSSRLRVSATFWQNPRNHFRCQVQFYGLSENDEWTQDRAKPVTQIVSAEAWGRADCGFTSESYQQGVLSATILYEILLGKATLYAVLVSALVLMAMVKRKDSRGRAKRSGSGATNFSLLKQAGDVEENPGPTSMDWIWRILFLVGAATGAHSFEQMQLVQSGGGLVQPGRSLRLSCAASGFTFDDYAMHWVRQAPGKGLEWVSGISWNSGSIGYADSVKGRFTISRDNAKNSLYLQMNSLRAEDTALYYCAKDIHSGSYYGLLYYAMDVWGQGTTVTVSSTRIQNPDPAVYQLRDSKSSDKSVCLFTDFDSQTNVSQSKDSDVYITDKCVLDMRSMDFKSNSAVAWSNKSDFACANAFNNSIIPEDTFFPSPESSCDVKLVEKSFETDTNLNFQNLSVIGFRILLLKVAGFNLLMTLRLWSS

SEQ ID NO: 12651 - protein, 767 aa, Artificial Sequence
  Synthetic Polypeptide
MALPVTALLLPLALLLHAARPEVQLVESGGGLVQPGGSLRLSCAASGFSFSDFWMSWVRQAPGKGLEWVATISQAGSEKDYVDSVKGRFTISRDNAKKSLYLQMNSLRAEDTAVYYCASGVYSFDYRGQGTLVTVSSGTGGGGSGGGGSGGGGSEFLPVLTQPPSASGTPGQRVTISCSGRSSNIGSNSVNWYRQLPGAAPKLLIYSNNQRPPGVPVRFSGSKSGTSASLAISGLQSEDEATYYCATWDDNLNVHYVFGTGTKVTVLGSRLEDLKNVFPPEVAVFEPSEAEISHTQKATLVCLATGFYPDHVELSWWVNGKEVHSGVCTDPQPLKEQPALNDSRYCLSSRLRVSATFWQNPRNHFRCQVQFYGLSENDEWTQDRAKPVTQIVSAEAWGRADCGFTSESYQQGVLSATILYEILLGKATLYAVLVSALVLMAMVKRKDSRGRAKRSGSGATNFSLLKQAGDVEENPGPTSMDWIWRILFLVGAATGAHSFELEMAQVQLVQSGAEVKKPGSSVKVSCKASGGTFSSYAISWVRQAPGQGLEWMGRIIPILGIANYAQKFQGRVTITADKSTSTAYMELSSLRSEDTAVYYCARGGYYSHDMWSEDWGQGTLVTVSSTRIQNPDPAVYQLRDSKSSDKSVCLFTDFDSQTNVSQSKDSDVYITDKCVLDMRSMDFKSNSAVAWSNKSDFACANAFNNSIIPEDTFFPSPESSCDVKLVEKSFETDTNLNFQNLSVIGFRILLLKVAGFNLLMTLRLWSS

SEQ ID NO: 12652 - protein, 761 aa, Artificial Sequence
  Synthetic Polypeptide
MALPVTALLLPLALLLHAARPEVQLVESGGGLVQPGGSLRLSCAASGFSFSDFWMSWVRQAPGKGLEWVATISQAGSEKDYVDSVKGRFTISRDNAKKSLYLQMNSLRAEDTAVYYCASGVYSFDYRGQGTLVTVSSGTGGGGSGGGGSGGGGSEFDFVMTQSPDSLAVSLGERVTMSCKSSQSLLNSGNQKNYLTWYQQKPGQPPKLLIYWASTRESGVPDRFSGSGSGTDFTLTISSLQAEDVAVYYCQNDYSYPYTFGQGTKLEIKLEDLKNVFPPEVAVFEPSEAEISHTQKATLVCLATGFYPDHVELSWWVNGKEVHSGVCTDPQPLKEQPALNDSRYCLSSRLRVSATFWQNPRNHFRCQVQFYGLSENDEWTQDRAKPVTQIVSAEAWGRADCGFTSESYQQGVLSATILYEILLGKATLYAVLVSALVLMAMVKRKDSRGRAKRSGSGATNFSLLKQAGDVEENPGPTSMDWIWRILFLVGAATGAHSFEEVQLVQSGAELKKPGASVKVSCKASGYTFTDYYMKWVRQAPGQGLEWIGDIIPSNGATFYNQKFKGRVTITVDKSTSTAYMELSSLRSEDTAVYYCARSHLLRASWFAYWGQGTLVTVSSTRIQNPDPAVYQLRDSKSSDKSVCLFTDFDSQTNVSQSKDSDVYITDKCVLDMRSMDFKSNSAVAWSNKSDFACANAFNNSIIPEDTFFPSPESSCDVKLVEKSFETDTNLNFQNLSVIGFRILLLKVAGFNLLMTLRLWSS

SEQ ID NO: 12653 - protein, 761 aa, Artificial Sequence
  Synthetic Polypeptide
MALPVTALLLPLALLLHAARPEVQLVESGGGLVQPGGSLRLSCAASGFSFSDFWMSWVRQAPGKGLEWVATISQAGSEKDYVDSVKGRFTISRDNAKKSLYLQMNSLRAEDTAVYYCASGVYSFDYRGQGTLVTVSSGTGGGGSGGGGSGGGGSEFDFVMTQSPDSLAVSLGERVTMSCKSSQSLLNSGNQKNYLTWYQQKPGQPPKLLIYWASTRESGVPDRFSGSGSGTDFTLTISSLQAEDVAVYYCQNDYSYPYTFGQGTKLEIKLEDLKNVFPPEVAVFEPSEAEISHTQKATLVCLATGFYPDHVELSWWVNGKEVHSGVCTDPQPLKEQPALNDSRYCLSSRLRVSATFWQNPRNHFRCQVQFYGLSENDEWTQDRAKPVTQIVSAEAWGRADCGFTSESYQQGVLSATILYEILLGKATLYAVLVSALVLMAMVKRKDSRGRAKRSGSGATNFSLLKQAGDVEENPGPTSMDWIWRILFLVGAATGAHSFEQVQLVQSGAELKKPGASVKVSCKASGYTFTDYYMKWVRQAPGQGLEWIGDIIPSNGATFYNQKFKGRVTITVDKSTSTAYMELSSLRSEDTAVYYCARSHLLRASWFAYWGQGTLVTVSSTRIQNPDPAVYQLRDSKSSDKSVCLFTDFDSQTNVSQSKDSDVYITDKCVLDMRSMDFKSNSAVAWSNKSDFACANAFNNSIIPEDTFFPSPESSCDVKLVEKSFETDTNLNFQNLSVIGFRILLLKVAGFNLLMTLRLWSS

SEQ ID NO: 12654 - protein, 751 aa, Artificial Sequence
  Synthetic Polypeptide
MALPVTALLLPLALLLHAARPEVQLVESGGGLVQPGGSLRLSCAASGFSFSDFWMSWVRQAPGKGLEWVATISQAGSEKDYVDSVKGRFTISRDNAKKSLYLQMNSLRAEDTAVYYCASGVYSFDYRGQGTLVTVSSGTGGGGSGGGGSGGGGSEFDVQITQSPSYLAASPGETITINCRASKSISKDLAWYQEKPGKTNKLLIYSGSTLQSGIPSRFSGSGSGTDFTLTISSLEPEDFAMYYCQQHNKYPYTFGGGTKLEIKRLEDLKNVFPPEVAVFEPSEAEISHTQKATLVCLATGFYPDHVELSWWVNGKEVHSGVCTDPQPLKEQPALNDSRYCLSSRLRVSATFWQNPRNHFRCQVQFYGLSENDEWTQDRAKPVTQIVSAEAWGRADCGFTSESYQQGVLSATILYEILLGKATLYAVLVSALVLMAMVKRKDSRGRAKRSGSGATNFSLLKQAGDVEENPGPTSMDWIWRILFLVGAATGAHSFEQVQLQQPGAELVRPGASVKLSCKASGYTFTSYWMNWVKQRPDQGLEWIGRIDPYDSETHYNQKFKDKAILTVDKSSSTAYMQLSSLTSEDSAVYYCARGNWDDYWGQGTTLTVSSTRIQNPDPAVYQLRDSKSSDKSVCLFTDFDSQTNVSQSKDSDVYITDKCVLDMRSMDFKSNSAVAWSNKSDFACANAFNNSIIPEDTFFPSPESSCDVKLVEKSFETDTNLNFQNLSVIGFRILLLKVAGFNLLMTLRLWSS

SEQ ID NO: 12655 - protein, 753 aa, Artificial Sequence
  Synthetic Polypeptide
MALPVTALLLPLALLLHAARPEVQLVESGGGLVQPGGSLRLSCAASGFSFSDFWMSWVRQAPGKGLEWVATISQAGSEKDYVDSVKGRFTISRDNAKKSLYLQMNSLRAEDTAVYYCASGVYSFDYRGQGTLVTVSSGTGGGGSGGGGSGGGGSEFEIVLTQSPTSMTASPGEQVTITCRASSSINYMHWYQQKPGASPRPWIYETSKLASGVPDRFSGSASGTSYSLTINNMEAEDAATYYCQQWNYPSWTFGGGTKLELKLEDLKNVFPPEVAVFEPSEAEISHTQKATLVCLATGFYPDHVELSWWVNGKEVHSGVCTDPQPLKEQPALNDSRYCLSSRLRVSATFWQNPRNHFRCQVQFYGLSENDEWTQDRAKPVTQIVSAEAWGRADCGFTSESYQQGVLSATILYEILLGKATLYAVLVSALVLMAMVKRKDSRGRAKRSGSGATNFSLLKQAGDVEENPGPTSMDWIWRILFLVGAATGAHSFEEVQLVESGGGLVQPGRSLKLSCAASGFTFSDYNMAWVRQAPKKGLEWVATILYDGGRTYYRGSVKGRFTISRDNAKSTLYLRMDSLRSEDTATYYCATHSRGTDYFDYWGQGVMVTVSSTRIQNPDPAVYQLRDSKSSDKSVCLFTDFDSQTNVSQSKDSDVYITDKCVLDMRSMDFKSNSAVAWSNKSDFACANAFNNSIIPEDTFFPSPESSCDVKLVEKSFETDTNLNFQNLSVIGFRILLLKVAGFNLLMTLRLWSS

SEQ ID NO: 12656 - protein, 762 aa, Artificial Sequence
  Synthetic Polypeptide
MALPVTALLLPLALLLHAARPEVQLVESGGGLVQPGGSLRLSCAASGFSFSDFWMSWVRQAPGKGLEWVATISQAGSEKDYVDSVKGRFTISRDNAKKSLYLQMNSLRAEDTAVYYCASGVYSFDYRGQGTLVTVSSGTGGGGSGGGGSGGGGSEFDIVMTQSPSSLAVSEGETVTINCKSSQSFLSSGDGKNYVAWYQYKPGQSPKLLIYWASTRQSGVPDRFIGSGSGTDFTLTISTVQAEDLAIYYCQQYYDTPLTFGSGTKLEIKLEDLKNVFPPEVAVFEPSEAEISHTQKATLVCLATGFYPDHVELSWWVNGKEVHSGVCTDPQPLKEQPALNDSRYCLSSRLRVSATFWQNPRNHFRCQVQFYGLSENDEWTQDRAKPVTQIVSAEAWGRADCGFTSESYQQGVLSATILYEILLGKATLYAVLVSALVLMAMVKRKDSRGRAKRSGSGATNFSLLKQAGDVEENPGPTSMDWIWRILFLVGAATGAHSFEEVKLQESGPSLVQSSQTLSLTCTVSGFSLTSYHIHWVRQTPGKGLEWMGVMWSDGDTSYNSALKSRLSISRDTSQSQVFLKMNSLQTEDTATYYCARGYYSSYLYLWFAYWGQGTLVTVSSTRIQNPDPAVYQLRDSKSSDKSVCLFTDFDSQTNVSQSKDSDVYITDKCVLDMRSMDFKSNSAVAWSNKSDFACANAFNNSIIPEDTFFPSPESSCDVKLVEKSFETDTNLNFQNLSVIGFRILLLKVAGFNLLMTLRLWSS

SEQ ID NO: 12657 - protein, 766 aa, Artificial Sequence
  Synthetic Polypeptide
MALPVTALLLPLALLLHAARPEVQLVESGGGLVQPGGSLRLSCAASGFSFSDFWMSWVRQAPGKGLEWVATISQAGSEKDYVDSVKGRFTISRDNAKKSLYLQMNSLRAEDTAVYYCASGVYSFDYRGQGTLVTVSSGTGGGGSGGGGSGGGGSEFDVLMTQTPVSLPVSLGGQVSISCRSSQSLVHSDGDTYLHWYLQKPGQSPQLLIYRVSNRFSGVPDRFSGSGSGTDFTLKISRVEPEDLGLYYCLQTTHFPPWTFGGGTKLEMKLEDLKNVFPPEVAVFEPSEAEISHTQKATLVCLATGFYPDHVELSWWVNGKEVHSGVCTDPQPLKEQPALNDSRYCLSSRLRVSATFWQNPRNHFRCQVQFYGLSENDEWTQDRAKPVTQIVSAEAWGRADCGFTSESYQQGVLSATILYEILLGKATLYAVLVSALVLMAMVKRKDSRGRAKRSGSGATNFSLLKQAGDVEENPGPTSMDWIWRILFLVGAATGAHSFEQVQLQQSGPELRRPGSSVRLSCKASGYRIKDFLIHWIKNRPEHGLEWIGWIDPEDGETKYAQKFQTKATLTADTSSNTAYMQLSSLTSEDTATYFCARWGDVYYGLMRGHVMDAWGQGTSVTVSSTRIQNPDPAVYQLRDSKSSDKSVCLFTDFDSQTNVSQSKDSDVYITDKCVLDMRSMDFKSNSAVAWSNKSDFACANAFNNSIIPEDTFFPSPESSCDVKLVEKSFETDTNLNFQNLSVIGFRILLLKVAGFNLLMTLRLWSS

SEQ ID NO: 12658 - protein, 761 aa, Artificial Sequence
  Synthetic Polypeptide
MALPVTALLLPLALLLHAARPEVQLVESGGGLVQPGGSLRLSCAASGFSFSDFWMSWVRQAPGKGLEWVATISQAGSEKDYVDSVKGRFTISRDNAKKSLYLQMNSLRAEDTAVYYCASGVYSFDYRGQGTLVTVSSGTGGGGSGGGGSGGGGSEFDIVMTQSPATLSLSPGERATLSCRSSKSLQNVNGNTYLYWFQQKPGQSPQLLIYRMSNLNSGVPDRFSGSGSGTEFTLTISSLEPEDFAVYYCMQHLEYPITFGAGTKLEIKLEDLKNVFPPEVAVFEPSEAEISHTQKATLVCLATGFYPDHVELSWWVNGKEVHSGVCTDPQPLKEQPALNDSRYCLSSRLRVSATFWQNPRNHFRCQVQFYGLSENDEWTQDRAKPVTQIVSAEAWGRADCGFTSESYQQGVLSATILYEILLGKATLYAVLVSALVLMAMVKRKDSRGRAKRSGSGATNFSLLKQAGDVEENPGPTSMDWIWRILFLVGAATGAHSFEEVQLVESGGGLVKPGGSLKLSCAASGYTFTSYVMHWVRQAPGKGLEWIGYINPYNDGTKYNEKFQGRVTISSDKSISTAYMELSSLRSEDTAMYYCARGTYYYGTRVFDYWGQGTLVTVSSTRIQNPDPAVYQLRDSKSSDKSVCLFTDFDSQTNVSQSKDSDVYITDKCVLDMRSMDFKSNSAVAWSNKSDFACANAFNNSIIPEDTFFPSPESSCDVKLVEKSFETDTNLNFQNLSVIGFRILLLKVAGFNLLMTLRLWSS

SEQ ID NO: 12659 - protein, 757 aa, Artificial Sequence
  Synthetic Polypeptide
MALPVTALLLPLALLLHAARPEVQLVESGGGLVQPGGSLRLSCAASGFSFSDFWMSWVRQAPGKGLEWVATISQAGSEKDYVDSVKGRFTISRDNAKKSLYLQMNSLRAEDTAVYYCASGVYSFDYRGQGTLVTVSSGTGGGGSGGGGSGGGGSEFDIQMTQSPSSLSASVGDRVTITCKASDHINNWLAWYQQKPGQAPKLLIYGATTLETGVPSRFSGSGSGTDYTLTISSLQPEDFATYYCQQSWNTPWTFGQGTKLEIKRLEDLKNVFPPEVAVFEPSEAEISHTQKATLVCLATGFYPDHVELSWWVNGKEVHSGVCTDPQPLKEQPALNDSRYCLSSRLRVSATFWQNPRNHFRCQVQFYGLSENDEWTQDRAKPVTQIVSAEAWGRADCGFTSESYQQGVLSATILYEILLGKATLYAVLVSALVLMAMVKRKDSRGRAKRSGSGATNFSLLKQAGDVEENPGPTSMDWIWRILFLVGAATGAHSFEQVQLQQPGAELVKPGASVKMSCKASGYAFSSYWINWMKQKPGQGLEWIGQIYPGDGDTNYNGKFKGRATLTADTSSSTAYMQLSSLTSEDSAVYFCARSITTVVGCAMDYWGQGTSVTVSSTRIQNPDPAVYQLRDSKSSDKSVCLFTDFDSQTNVSQSKDSDVYITDKCVLDMRSMDFKSNSAVAWSNKSDFACANAFNNSIIPEDTFFPSPESSCDVKLVEKSFETDTNLNFQNLSVIGFRILLLKVAGFNLLMTLRLWSS

SEQ ID NO: 12660 - protein, 759 aa, Artificial Sequence
  Synthetic Polypeptide
MALPVTALLLPLALLLHAARPEVQLVESGGGLVQPGGSLRLSCAASGFSFSDFWMSWVRQAPGKGLEWVATISQAGSEKDYVDSVKGRFTISRDNAKKSLYLQMNSLRAEDTAVYYCASGVYSFDYRGQGTLVTVSSGTGGGGSGGGGSGGGGSEFQIVLSQSPAILSASPGEKVTMTCRASSSVSYMHWYQQKPGSSPKPWIYATSNLASGVPARFSGSGSGTSYSFTISRVEAEDAATYYCQQWTFNPPTFGGGTRLEIKRTVAALEDLKNVFPPEVAVFEPSEAEISHTQKATLVCLATGFYPDHVELSWWVNGKEVHSGVCTDPQPLKEQPALNDSRYCLSSRLRVSATFWQNPRNHFRCQVQFYGLSENDEWTQDRAKPVTQIVSAEAWGRADCGFTSESYQQGVLSATILYEILLGKATLYAVLVSALVLMAMVKRKDSRGRAKRSGSGATNFSLLKQAGDVEENPGPTSMDWIWRILFLVGAATGAHSFEQAYLQQSGAELVRPGASVKMSCKASGYTFTSYNMHWVKQTPRQGLEWIGGIYPGNGDTSYNQKFKGKATLTVGKSSSTAYMQLSSLTSEDSAVYFCARYDYNYAMDYWGQGTSVTVSSASTRIQNPDPAVYQLRDSKSSDKSVCLFTDFDSQTNVSQSKDSDVYITDKCVLDMRSMDFKSNSAVAWSNKSDFACANAFNNSIIPEDTFFPSPESSCDVKLVEKSFETDTNLNFQNLSVIGFRILLLKVAGFNLLMTLRLWSS

SEQ ID NO: 12661 - protein, 757 aa, Artificial Sequence
  Synthetic Polypeptide
MALPVTALLLPLALLLHAARPEVQLVESGGGLVQPGGSLRLSCAASGFSFSDFWMSWVRQAPGKGLEWVATISQAGSEKDYVDSVKGRFTISRDNAKKSLYLQMNSLRAEDTAVYYCASGVYSFDYRGQGTLVTVSSGTGGGGSGGGGSGGGGSEFEIVLTQSPATLSLSPGERATLSCRASQSVSSYLAWYQQKPGQAPRLLIYDASNRATGIPARFSGSGSGTDFTLTISSLEPEDFAVYYCQQRSNWPITFGQGTRLEIKLEDLKNVFPPEVAVFEPSEAEISHTQKATLVCLATGFYPDHVELSWWVNGKEVHSGVCTDPQPLKEQPALNDSRYCLSSRLRVSATFWQNPRNHFRCQVQFYGLSENDEWTQDRAKPVTQIVSAEAWGRADCGFTSESYQQGVLSATILYEILLGKATLYAVLVSALVLMAMVKRKDSRGRAKRSGSGATNFSLLKQAGDVEENPGPTSMDWIWRILFLVGAATGAHSFEEVQLVESGGGLVQPDRSLRLSCAASGFTFHDYAMHWVRQAPGKGLEWVSTISWNSGTIGYADSVKGRFTISRDNAKNSLYLQMNSLRAEDTALYYCAKDIQYGNYYYGMDVWGQGTTVTVSSTRIQNPDPAVYQLRDSKSSDKSVCLFTDFDSQTNVSQSKDSDVYITDKCVLDMRSMDFKSNSAVAWSNKSDFACANAFNNSIIPEDTFFPSPESSCDVKLVEKSFETDTNLNFQNLSVIGFRILLLKVAGFNLLMTLRLWSS

SEQ ID NO: 12662 - protein, 752 aa, Artificial Sequence
  Synthetic Polypeptide
MALPVTALLLPLALLLHAARPEVQLVESGGGLVQPGGSLRLSCAASGFSFSDFWMSWVRQAPGKGLEWVATISQAGSEKDYVDSVKGRFTISRDNAKKSLYLQMNSLRAEDTAVYYCASGVYSFDYRGQGTLVTVSSGTGGGGSGGGGSGGGGSEFDIQMTQSPSSLSASVGDRVTINCKASQDINSYLSWFQQKPGKAPKTLIYRANRLVDGVPSRFSGSGSGQDYTLTISSLQPEDFATYYCLQYDEFPLTFGGGTKVEIKLEDLKNVFPPEVAVFEPSEAEISHTQKATLVCLATGFYPDHVELSWWVNGKEVHSGVCTDPQPLKEQPALNDSRYCLSSRLRVSATFWQNPRNHFRCQVQFYGLSENDEWTQDRAKPVTQIVSAEAWGRADCGFTSESYQQGVLSATILYEILLGKATLYAVLVSALVLMAMVKRKDSRGRAKRSGSGATNFSLLKQAGDVEENPGPTSMDWIWRILFLVGAATGAHSFEQVQLVQSGAEVKKPGASVKVSCKASGYTFTNYDINWVRQAPGQGLEWIGWIYPGDGSTKYNEKFKAKATLTADTSTSTAYMELRSLRSDDTAVYYCASGYEDAMDYWGQGTTVTVSSTRIQNPDPAVYQLRDSKSSDKSVCLFTDFDSQTNVSQSKDSDVYITDKCVLDMRSMDFKSNSAVAWSNKSDFACANAFNNSIIPEDTFFPSPESSCDVKLVEKSFETDTNLNFQNLSVIGFRILLLKVAGFNLLMTLRLWSS

SEQ ID NO: 12663 - protein, 754 aa, Artificial Sequence
  Synthetic Polypeptide
MALPVTALLLPLALLLHAARPEVQLVESGGGLVQPGGSLRLSCAASGFSFSDFWMSWVRQAPGKGLEWVATISQAGSEKDYVDSVKGRFTISRDNAKKSLYLQMNSLRAEDTAVYYCASGVYSFDYRGQGTLVTVSSGTGGGGSGGGGSGGGGSEFDIVMTQTPLSLSVTPGQPASISCKSSQSLLDGDGKTYLNWLLQKPGQSPQRLIYLVSKLDSGVPDRFSGSGSGTDFTLKISRVEAEDVGVYYCWQGTHFPRTFGQGTKLEIKLEDLKNVFPPEVAVFEPSEAEISHTQKATLVCLATGFYPDHVELSWWVNGKEVHSGVCTDPQPLKEQPALNDSRYCLSSRLRVSATFWQNPRNHFRCQVQFYGLSENDEWTQDRAKPVTQIVSAEAWGRADCGFTSESYQQGVLSATILYEILLGKATLYAVLVSALVLMAMVKRKDSRGRAKRSGSGATNFSLLKQAGDVEENPGPTSMDWIWRILFLVGAATGAHSFEQVQLVQSGAEVKKPGASVKVSCKASGYTFKDTYIHWVRQAPGQGLEWMGRIDPANGNTKYDPKFQGRVTMTRDTSISTAYMELSRLRSDDTAVYYCARRGGVDWGQGTLVTVSSTRIQNPDPAVYQLRDSKSSDKSVCLFTDFDSQTNVSQSKDSDVYITDKCVLDMRSMDFKSNSAVAWSNKSDFACANAFNNSIIPEDTFFPSPESSCDVKLVEKSFETDTNLNFQNLSVIGFRILLLKVAGFNLLMTLRLWSS

SEQ ID NO: 12664 - protein, 755 aa, Artificial Sequence
  Synthetic Polypeptide
MALPVTALLLPLALLLHAARPEVQLVESGGGLVQPGGSLRLSCAASGFSFSDFWMSWVRQAPGKGLEWVATISQAGSEKDYVDSVKGRFTISRDNAKKSLYLQMNSLRAEDTAVYYCASGVYSFDYRGQGTLVTVSSGTGGGGSGGGGSGGGGSEFDIQMTQSPSSLSASVGDRVTITCKASQDVSTAVAWFQQKPGKAPKLLIYSPSYRYTGVPSRFSGSGSGTDFTLTISSLQPEDFTYYCQQLYSTPYTFGQGTKVEIKLEDLKNVFPPEVAVFEPSEAEISHTQKATLVCLATGFYPDHVELSWWVNGKEVHSGVCTDPQPLKEQPALNDSRYCLSSRLRVSATFWQNPRNHFRCQVQFYGLSENDEWTQDRAKPVTQIVSAEAWGRADCGFTSESYQQGVLSATILYEILLGKATLYAVLVSALVLMAMVKRKDSRGRAKRSGSGATNFSLLKQAGDVEENPGPTSMDWIWRILFLVGAATGAHSFEEVQLVQSGAEVKKPGASVKVSCKASGYTFTDYYLDVVVRQAPGQGLEWIGRVNPYNGGTIYNQKFKGRVTLTRDTSTSTAYLELSSLRSEDTAVYYCARDHYRYDPLLDYWGQGTLVTVSSTRIQNPDPAVYQLRDSKSSDKSVCLFTDFDSQTNVSQSKDSDVYITDKCVLDMRSMDFKSNSAVAWSNKSDFACANAFNNSIIPEDTFFPSPESSCDVKLVEKSFETDTNLNFQNLSVIGFRILLLKVAGFNLLMTLRLWSS

SEQ ID NO: 12665 - protein, 761 aa, Artificial Sequence
  Synthetic Polypeptide
MALPVTALLLPLALLLHAARPEVQLVESGGGLVQPGGSLRLSCAASGFSFSDFWMSWVRQAPGKGLEWVATISQAGSEKDYVDSVKGRFTISRDNAKKSLYLQMNSLRAEDTAVYYCASGVYSFDYRGQGTLVTVSSGTGGGGSGGGGSGGGGSEFDIQMTQSPSSLSASVGDRVTITCRASQSVSTSSYNYMHWYQQKPGKPPKLLIKYASNLESGVPSRFSGSGSGTDFTLTISSLQPEDFATYYCQHSWEIPLTFGQGTKVEIKLEDLKNVFPPEVAVFEPSEAEISHTQKATLVCLATGFYPDHVELSWWVNGKEVHSGVCTDPQPLKEQPALNDSRYCLSSRLRVSATFWQNPRNHFRCQVQFYGLSENDEWTQDRAKPVTQIVSAEAWGRADCGFTSESYQQGVLSATILYEILLGKATLYAVLVSALVLMAMVKRKDSRGRAKRSGSGATNFSLLKQAGDVEENPGPTSMDWIWRILFLVGAATGAHSFEEVQLVQSGAEVKKPGASVKVSCKASGYSFTDYYMHWVRQAPGQGLEWIGRINPYNGAAFYSQNFKDRVTLTVDTSTSTAYLELSSLRSEDTAVYYCAIERGADLEGYAMDYWGQGTLVTVSSTRIQNPDPAVYQLRDSKSSDKSVCLFTDFDSQTNVSQSKDSDVYITDKCVLDMRSMDFKSNSAVAWSNKSDFACANAFNNSIIPEDTFFPSPESSCDVKLVEKSFETDTNLNFQNLSVIGFRILLLKVAGFNLLMTLRLWSS

SEQ ID NO: 12666 - protein, 759 aa, Artificial Sequence
  Synthetic Polypeptide
MALPVTALLLPLALLLHAARPEVQLVESGGGLVQPGGSLRLSCAASGFSFSDFWMSWVRQAPGKGLEWVATISQAGSEKDYVDSVKGRFTISRDNAKKSLYLQMNSLRAEDTAVYYCASGVYSFDYRGQGTLVTVSSGTGGGGSGGGGSGGGGSEFEIVLTQSPATLSASPGERVTLTCRASSNVISSYVHWYQQKPGSSPRLFLYSTSNLASGVPSRFSGSGSGTDFTFTISSLEAEDAATYYCQQYSGYPLTFGQGTRLEIKLEDLKNVFPPEVAVFEPSEAEISHTQKATLVCLATGFYPDHVELSWWVNGKEVHSGVCTDPQPLKEQPALNDSRYCLSSRLRVSATFWQNPRNHFRCQVQFYGLSENDEWTQDRAKPVTQIVSAEAWGRADCGFTSESYQQGVLSATILYEILLGKATLYAVLVSALVLMAMVKRKDSRGRAKRSGSGATNFSLLKQAGDVEENPGPTSMDWIWRILFLVGAATGAHSFEQVQLQESGPGLVKPSETLSLTCAVSGYSITSAYYWNWIRQPPGKGLEWIGYISYDGRNNYNPSLKNRITINPDTSKNQFSLQLNSVTPEDTAVYYCAREGDYDVGNYYAMDYWGQGTLVTVSSTRIQNPDPAVYQLRDSKSSDKSVCLFTDFDSQTNVSQSKDSDVYITDKCVLDMRSMDFKSNSAVAWSNKSDFACANAFNNSIIPEDTFFPSPESSCDVKLVEKSFETDTNLNFQNLSVIGFRILLLKVAGFNLLMTLRLWSS

SEQ ID NO: 12667 - protein, 759 aa, Artificial Sequence
  Synthetic Polypeptide
MALPVTALLLPLALLLHAARPEVQLVESGGGLVQPGGSLRLSCAASGFSFSDFWMSWVRQAPGKGLEWVATISQAGSEKDYVDSVKGRFTISRDNAKKSLYLQMNSLRAEDTAVYYCASGVYSFDYRGQGTLVTVSSGTGGGGSGGGGSGGGGSEFEIVLTQSPATLSLSPGERATLSCRASSNVISSYVHWYQQKPGQAPRLLIYSTSNLASGIPARFSGSGSGTDFTLTISSLEPEDFAVYYCQQYSGYPLTFGQGTRLEIKLEDLKNVFPPEVAVFEPSEAEISHTQKATLVCLATGFYPDHVELSWWVNGKEVHSGVCTDPQPLKEQPALNDSRYCLSSRLRVSATFWQNPRNHFRCQVQFYGLSENDEWTQDRAKPVTQIVSAEAWGRADCGFTSESYQQGVLSATILYEILLGKATLYAVLVSALVLMAMVKRKDSRGRAKRSGSGATNFSLLKQAGDVEENPGPTSMDWIWRILFLVGAATGAHSFEEVQLVESGGGLVQPGRSLRLSCAASGYSITSAYYWNWVRQAPGKGLEWVSYISYDGRNNYNPSLKNRFTISRDNAKKSLYLQMNSLRAEDTALYYCAKEGDYDVGNYYAMDYWGQGTTVTVSSTRIQNPDPAVYQLRDSKSSDKSVCLFTDFDSQTNVSQSKDSDVYITDKCVLDMRSMDFKSNSAVAWSNKSDFACANAFNNSIIPEDTFFPSPESSCDVKLVEKSFETDTNLNFQNLSVIGFRILLLKVAGFNLLMTLRLWSS

SEQ ID NO: 12668 - protein, 758 aa, Artificial Sequence
  Synthetic Polypeptide
MALPVTALLLPLALLLHAARPEVQLVESGGGLVQPGGSLRLSCAASGFSFSDFWMSWVRQAPGKGLEWVATISQAGSEKDYVDSVKGRFTISRDNAKKSLYLQMNSLRAEDTAVYYCASGVYSFDYRGQGTLVTVSSGTGGGGSGGGGSGGGGSEFDVVMTQTPLSLPVSLGDQASISCRSSQSLVHSNGNTYLRWYLQKPGQSPKVLIYKVSNRVSGVPDRFSGSGSGTDFTLKINRVEAEDLGVYFCSQSTHVPWTFGGGTKLEIKLEDLKNVFPPEVAVFEPSEAEISHTQKATLVCLATGFYPDHVELSWWVNGKEVHSGVCTDPQPLKEQPALNDSRYCLSSRLRVSATFWQNPRNHFRCQVQFYGLSENDEWTQDRAKPVTQIVSAEAWGRADCGFTSESYQQGVLSATILYEILLGKATLYAVLVSALVLMAMVKRKDSRGRAKRSGSGATNFSLLKQAGDVEENPGPTSMDWIWRILFLVGAATGAHSFEGVKLDETGGGLVQPGGAMKLSCVTSGFTFGHYWMNWVRQSPEKGLEWVAQFRNKPYNYETYYSDSVKGRFTISRDDSKSSVYLQMNNLRVEDTGIYYCTGASYGMEYLGQGTSVTVSTTRIQNPDPAVYQLRDSKSSDKSVCLFTDFDSQTNVSQSKDSDVYITDKCVLDMRSMDFKSNSAVAWSNKSDFACANAFNNSIIPEDTFFPSPESSCDVKLVEKSFETDTNLNFQNLSVIGFRILLLKVAGFNLLMTLRLWSS

SEQ ID NO: 12669 - protein, 764 aa, Artificial Sequence
  Synthetic Polypeptide
MALPVTALLLPLALLLHAARPEVQLVESGGGLVQPGGSLRLSCAASGFSFSDFWMSWVRQAPGKGLEWVATISQAGSEKDYVDSVKGRFTISRDNAKKSLYLQMNSLRAEDTAVYYCASGVYSFDYRGQGTLVTVSSGTGGGGSGGGGSGGGGSEFQVQLVESGGNLVQPGGSLRLSCAASGFTFGSFSMSWVRQAPGGGLEWVAGLSARSSLTHYADSVKGRFTISRDNAKNSVYLQMNSLRVEDTAVYYCARRSYDSSGYWGHFYSYMDVWGQGTLVTVSLEDLKNVFPPEVAVFEPSEAEISHTQKATLVCLATGFYPDHVELSWWVNGKEVHSGVCTDPQPLKEQPALNDSRYCLSSRLRVSATFWQNPRNHFRCQVQFYGLSENDEWTQDRAKPVTQIVSAEAWGRADCGFTSESYQQGVLSATILYEILLGKATLYAVLVSALVLMAMVKRKDSRGRAKRSGSGATNFSLLKQAGDVEENPGPTSMDWIWRILFLVGAATGAHSFESVLTQPSSVSAAPGQKVTISCSGSTSNIGNNYVSWYQQHPGKAPKLMIYDVSKRPSGVPDRFSGSKSGNSASLDISGLQSEDEADYYCAAWDDSLSEFLFGTGTKLTVLGTRIQNPDPAVYQLRDSKSSDKSVCLFTDFDSQTNVSQSKDSDVYITDKCVLDMRSMDFKSNSAVAWSNKSDFACANAFNNSIIPEDTFFPSPESSCDVKLVEKSFETDTNLNFQNLSVIGFRILLLKVAGFNLLMTLRLWSS

SEQ ID NO: 12670 - protein, 759 aa, Artificial Sequence
  Synthetic Polypeptide
MALPVTALLLPLALLLHAARPEVQLVESGGGLVQPGGSLRLSCAASGFSFSDFWMSWVRQAPGKGLEWVATISQAGSEKDYVDSVKGRFTISRDNAKKSLYLQMNSLRAEDTAVYYCASGVYSFDYRGQGTLVTVSSGTGGGGSGGGGSGGGGSEFDVVMTQSPSSLSASVGDRVTITCQSSLDISHYLNWYQQKPGKAPKLLIYDASNLETGVPSRFSGSGSGTHFTFTISSLQPEDFATYYCQQYDNLPLTFGGGTKLEIKRLEDLKNVFPPEVAVFEPSEAEISHTQKATLVCLATGFYPDHVELSWWVNGKEVHSGVCTDPQPLKEQPALNDSRYCLSSRLRVSATFWQNPRNHFRCQVQFYGLSENDEWTQDRAKPVTQIVSAEAWGRADCGFTSESYQQGVLSATILYEILLGKATLYAVLVSALVLMAMVKRKDSRGRAKRSGSGATNFSLLKQAGDVEENPGPTSMDWIWRILFLVGAATGAHSFEQVQLVQSGGGVVQPGGSLRVSCAASGVTLSDYGMHWVRQAPGKGLEWVAFIRNDGSDKYYADSVKGRFTISRDNSEKTVSLQMSSLRAEDTAVYYCAKNGESGPLDYWYLDLWGRGTLVTVSSTRIQNPDPAVYQLRDSKSSDKSVCLFTDFDSQTNVSQSKDSDVYITDKCVLDMRSMDFKSNSAVAWSNKSDFACANAFNNSIIPEDTFFPSPESSCDVKLVEKSFETDTNLNFQNLSVIGFRILLLKVAGFNLLMTLRLWSS

SEQ ID NO: 12671 - protein, 763 aa, Artificial Sequence
  Synthetic Polypeptide
MALPVTALLLPLALLLHAARPEVQLVESGGGLVQPGGSLRLSCAASGFSFSDFWMSWVRQAPGKGLEWVATISQAGSEKDYVDSVKGRFTISRDNAKKSLYLQMNSLRAEDTAVYYCASGVYSFDYRGQGTLVTVSSGTGGGGSGGGGSGGGGSEFSYELTQPPSVSGTPGQRVAISCSGSSSNIGTRMVTWYQHVPGTAPKLLIFNNNQRPSGVPDRFSASKSGTSASLAIIGLQSDDEADYYCATWDDNVKSYVFGTGTKVTVLGSRLEDLKNVFPPEVAVFEPSEAEISHTQKATLVCLATGFYPDHVELSWWVNGKEVHSGVCTDPQPLKEQPALNDSRYCLSSRLRVSATFWQNPRNHFRCQVQFYGLSENDEWTQDRAKPVTQIVSAEAWGRADCGFTSESYQQGVLSATILYEILLGKATLYAVLVSALVLMAMVKRKDSRGRAKRSGSGATNFSLLKQAGDVEENPGPTSMDWIWRILFLVGAATGAHSFELEMAQVQLQQWGAGLLKPSETLSLTCAVYGGSFSGYYWSWIRQPPGKGLEWIGEINHSGSTNYNPSLKSRVTISVDTSKNQFSLKLSSVTAADTAVYYCARAPQSWYVGDVWGQGTLVTVSSTRIQNPDPAVYQLRDSKSSDKSVCLFTDFDSQTNVSQSKDSDVYITDKCVLDMRSMDFKSNSAVAWSNKSDFACANAFNNSIIPEDTFFPSPESSCDVKLVEKSFETDTNLNFQNLSVIGFRILLLKVAGFNLLMTLRLWSS

SEQ ID NO: 12672 - protein, 760 aa, Artificial Sequence
  Synthetic Polypeptide
MALPVTALLLPLALLLHAARPEVQLVESGGGLVQPGGSLRLSCAASGFSFSDFWMSWVRQAPGKGLEWVATISQAGSEKDYVDSVKGRFTISRDNAKKSLYLQMNSLRAEDTAVYYCASGVYSFDYRGQGTLVTVSSGTGGGGSGGGGSGGGGSEFQSVLTQPPSLSVAPGKTASITCGGNNIGMKSVHWYQQRPGQAPVLVIYYDSDRPSGIPGRFSGSNSGNTATLTISRVEAGDEADYYCQVWDTTGDHPGYVFGTGTKVTVLLEDLKNVFPPEVAVFEPSEAEISHTQKATLVCLATGFYPDHVELSWWVNGKEVHSGVCTDPQPLKEQPALNDSRYCLSSRLRVSATFWQNPRNHFRCQVQFYGLSENDEWTQDRAKPVTQIVSAEAWGRADCGFTSESYQQGVLSATILYEILLGKATLYAVLVSALVLMAMVKRKDSRGRAKRSGSGATNFSLLKQAGDVEENPGPTSMDWIWRILFLVGAATGAHSFEQVQLVQSGAEVKKPGSSVKVSCKASGGTFSSYAISWVRQAPGQGLEWMGGIIPIFGTANYAQKFQGRVTITADESTSTAYMELSSLRSEDTAVYYCARGVYGYSGSAPYDEWGQGTLVTVSSTRIQNPDPAVYQLRDSKSSDKSVCLFTDFDSQTNVSQSKDSDVYITDKCVLDMRSMDFKSNSAVAWSNKSDFACANAFNNSIIPEDTFFPSPESSCDVKLVEKSFETDTNLNFQNLSVIGFRILLLKVAGFNLLMTLRLWSS

SEQ ID NO: 12673 - protein, 758 aa, Artificial Sequence
  Synthetic Polypeptide
MALPVTALLLPLALLLHAARPEVQLVESGGGLVQPGGSLRLSCAASGFSFSDFWMSWVRQAPGKGLEWVATISQAGSEKDYVDSVKGRFTISRDNAKKSLYLQMNSLRAEDTAVYYCASGVYSFDYRGQGTLVTVSSGTGGGGSGGGGSGGGGSEFEVQLVESGGGLVQPGRSLRLSCAASGFTFDDYAMHWVRQAPGKGLEWVSGISWNSGSIGYADSVKGRFTISRDNAKNSLYLQMNSLRAEDTALYYCAKDKGGGYYDFWSGSDYWGQGTLVTVSSLEDLKNVFPPEVAVFEPSEAEISHTQKATLVCLATGFYPDHVELSWWVNGKEVHSGVCTDPQPLKEQPALNDSRYCLSSRLRVSATFWQNPRNHFRCQVQFYGLSENDEWTQDRAKPVTQIVSAEAWGRADCGFTSESYQQGVLSATILYEILLGKATLYAVLVSALVLMAMVKRKDSRGRAKRSGSGATNFSLLKQAGDVEENPGPTSMDWIWRILFLVGAATGAHSFESSELTQDPAVSVALGQTVRITCQGDSLRSYYASWYQQKPGQAPVLVIYGKNNRPSGIPDRFSGSSSGNTASLTITGAQAEDEADYYCNSRDSSGWVFGGGTKLTVLTRIQNPDPAVYQLRDSKSSDKSVCLFTDFDSQTNVSQSKDSDVYITDKCVLDMRSMDFKSNSAVAWSNKSDFACANAFNNSIIPEDTFFPSPESSCDVKLVEKSFETDTNLNFQNLSVIGFRILLLKVAGFNLLMTLRLWSS

SEQ ID NO: 12674 - protein, 767 aa, Artificial Sequence
  Synthetic Polypeptide
MALPVTALLLPLALLLHAARPEVQLVESGGGLVQPGGSLRLSCAASGFSFSDFWMSWVRQAPGKGLEWVATISQAGSEKDYVDSVKGRFTISRDNAKKSLYLQMNSLRAEDTAVYYCASGVYSFDYRGQGTLVTVSSGTGGGGSGGGGSGGGGSEFEVQLQQSGPGLVKPSQTLSLTCAISGDSVLSNSDTWNWIRQSPSRGLEWLGRTYHRSTWYDDYASSVRGRVSINVDTSKNQYSLQLNAVTPEDTGVYYCARDRLQDGNSWSDAFDVWGQGTMVTVSSLEDLKNVFPPEVAVFEPSEAEISHTQKATLVCLATGFYPDHVELSWWVNGKEVHSGVCTDPQPLKEQPALNDSRYCLSSRLRVSATFWQNPRNHFRCQVQFYGLSENDEWTQDRAKPVTQIVSAEAWGRADCGFTSESYQQGVLSATILYEILLGKATLYAVLVSALVLMAMVKRKDSRGRAKRSGSGATNFSLLKQAGDVEENPGPTSMDWIWRILFLVGAATGAHSFEQSALTQPASVSGSPGQSITISCTGTSSDVGGYNYVSWYQQHPGKAPKLMIYDVSNRPSGVSNRFSGSKSGNTASLTISGLQAEDEADYYCSSYTSSSTLVYVFGTGTKVTVLTRIQNPDPAVYQLRDSKSSDKSVCLFTDFDSQTNVSQSKDSDVYITDKCVLDMRSMDFKSNSAVAWSNKSDFACANAFNNSIIPEDTFFPSPESSCDVKLVEKSFETDTNLNFQNLSVIGFRILLLKVAGFNLLMTLRLWSS

SEQ ID NO: 12675 - protein, 745 aa, Artificial Sequence
  Synthetic Polypeptide
MALPVTALLLPLALLLHAARPEVQLVESGGGLVQPGGSLRLSCAASGFSFSDFWMSWVRQAPGKGLEWVATISQAGSEKDYVDSVKGRFTISRDNAKKSLYLQMNSLRAEDTAVYYCASGVYSFDYRGQGTLVTVSSGTGGGGSGGGGSGGGGSEFQVQLVQSGAEVKKPGASVKVSCKASGYTFTSYDINWVRQATGQGLEWMGWMNPNSGNTGYAQKFQGRVTMTRNTSISTAYMELSSLRSEDTAVYYCARGDSTKVEIKLEDLKNVFPPEVAVFEPSEAEISHTQKATLVCLATGFYPDHVELSWWVNGKEVHSGVCTDPQPLKEQPALNDSRYCLSSRLRVSATFWQNPRNHFRCQVQFYGLSENDEWTQDRAKPVTQIVSAEAWGRADCGFTSESYQQGVLSATILYEILLGKATLYAVLVSALVLMAMVKRKDSRGRAKRSGSGATNFSLLKQAGDVEENPGPTSMDWIWRILFLVGAATGAHSFEQSVLTQPRSVSGSPGQSVTISCTGTSSDVGGYNYVSWYQQHPGEAPKLIIYDADKRPSGISNRFSSGKSGNTASLTISGLQVEDEADYYCCSYAGGSTWVFGGGTKVTVLTRIQNPDPAVYQLRDSKSSDKSVCLFTDFDSQTNVSQSKDSDVYITDKCVLDMRSMDFKSNSAVAWSNKSDFACANAFNNSIIPEDTFFPSPESSCDVKLVEKSFETDTNLNFQNLSVIGFRILLLKVAGFNLLMTLRLWSS

SEQ ID NO: 12676 - protein, 767 aa, Artificial Sequence
  Synthetic Polypeptide
MALPVTALLLPLALLLHAARPEVQLVESGGGLVQPGGSLRLSCAASGFSFSDFWMSWVRQAPGKGLEWVATISQAGSEKDYVDSVKGRFTISRDNAKKSLYLQMNSLRAEDTAVYYCASGVYSFDYRGQGTLVTVSSGTGGGGSGGGGSGGGGSEFEVQLQQSGPGLVKPSQTLSLTCAISGDSVSSNSAAWNWIRQSPSRGLEWLGRTYYRSKWYSDYAVSVKSRITINPDTSKNQFSLQLNSVTPEDTAVYYCARDPYDFWSGYPDAFDIWGQGTMVTVSSLEDLKNVFPPEVAVFEPSEAEISHTQKATLVCLATGFYPDHVELSWWVNGKEVHSGVCTDPQPLKEQPALNDSRYCLSSRLRVSATFWQNPRNHFRCQVQFYGLSENDEWTQDRAKPVTQIVSAEAWGRADCGFTSESYQQGVLSATILYEILLGKATLYAVLVSALVLMAMVKRKDSRGRAKRSGSGATNFSLLKQAGDVEENPGPTSMDWIWRILFLVGAATGAHSFEQSALTQPASVSGSPGQSITISCTGTSSDVGGYNYVSWYQQHPGKAPKVIISEVNNRPSGVSHRFSGSKSGNTASLTISGLQAEDEADYFCSSYTSGRTLYVFGTGSKVTVLGTRIQNPDPAVYQLRDSKSSDKSVCLFTDFDSQTNVSQSKDSDVYITDKCVLDMRSMDFKSNSAVAWSNKSDFACANAFNNSIIPEDTFFPSPESSCDVKLVEKSFETDTNLNFQNLSVIGFRILLLKVAGFNLLMTLRLWSS

SEQ ID NO: 12677 - protein, 766 aa, Artificial Sequence
  Synthetic Polypeptide
MALPVTALLLPLALLLHAARPEVQLVESGGGLVQPGGSLRLSCAASGFSFSDFWMSWVRQAPGKGLEWVATISQAGSEKDYVDSVKGRFTISRDNAKKSLYLQMNSLRAEDTAVYYCASGVYSFDYRGQGTLVTVSSGTGGGGSGGGGSGGGGSEFQSALTQPASASGSPGQSVTISCTGTSSDVGGYNYVSWYQQHPGKAPKLMIYDVSNRPSGVSNRFSGSKSGNTASLTISGLQAEDEADYYCSSYTSSSTLYVFGTGTQLTVLLEDLKNVFPPEVAVFEPSEAEISHTQKATLVCLATGFYPDHVELSWWVNGKEVHSGVCTDPQPLKEQPALNDSRYCLSSRLRVSATFWQNPRNHFRCQVQFYGLSENDEWTQDRAKPVTQIVSAEAWGRADCGFTSESYQQGVLSATILYEILLGKATLYAVLVSALVLMAMVKRKDSRGRAKRSGSGATNFSLLKQAGDVEENPGPTSMDWIWRILFLVGAATGAHSFEEVQLQQSGPGLVKPSQTLSLTCAISGDSMLSNSDTWNWIRQSPSRGLEWLGRTYHRSTWYDDYASSVRGRVSINVDTSKNQYSLQLNAVTPEDTGVYYCARVRLQDGNSWSDAFDVWGQGTMVTVSSTRIQNPDPAVYQLRDSKSSDKSVCLFTDFDSQTNVSQSKDSDVYITDKCVLDMRSMDFKSNSAVAWSNKSDFACANAFNNSIIPEDTFFPSPESSCDVKLVEKSFETDTNLNFQNLSVIGFRILLLKVAGFNLLMTLRLWSS

SEQ ID NO: 12678 - protein, 766 aa, Artificial Sequence
  Synthetic Polypeptide
MALPVTALLLPLALLLHAARPEVQLVESGGGLVQPGGSLRLSCAASGFSFSDFWMSWVRQAPGKGLEWVATISQAGSEKDYVDSVKGRFTISRDNAKKSLYLQMNSLRAEDTAVYYCASGVYSFDYRGQGTLVTVSSGTGGGGSGGGGSGGGGSEFDVMLTQTPLSLPVSLGDQASISCRSSQSILHSTGDTYLEWYLQKPGQSPKLLINKVSNRLSGVPDRFSGSGSGTDFTLKISRVEAEDLGVYYCFQGSHVPWTFGGGTKLEIKRADAAPTVSIFPLEDLKNVFPPEVAVFEPSEAEISHTQKATLVCLATGFYPDHVELSWWVNGKEVHSGVCTDPQPLKEQPALNDSRYCLSSRLRVSATFWQNPRNHFRCQVQFYGLSENDEWTQDRAKPVTQIVSAEAWGRADCGFTSESYQQGVLSATILYEILLGKATLYAVLVSALVLMAMVKRKDSRGRAKRSGSGATNFSLLKQAGDVEENPGPTSMDWIWRILFLVGAATGAHSFEQVKLQQSGPSLVKPGASVKMSCKASGYTFTDFYMKWVKQSHGKSLEWIGDINPNIGDTFYNQKFKGKATLTVDKSSSTAYMQLNSLTSEDSAVYFCSVGYFDVWGAGTTVTVSSTRIQNPDPAVYQLRDSKSSDKSVCLFTDFDSQTNVSQSKDSDVYITDKCVLDMRSMDFKSNSAVAWSNKSDFACANAFNNSIIPEDTFFPSPESSCDVKLVEKSFETDTNLNFQNLSVIGFRILLLKVAGFNLLMTLRLWSS

SEQ ID NO: 12679 - protein, 762 aa, Artificial Sequence
  Synthetic Polypeptide
MALPVTALLLPLALLLHAARPEVQLVESGGGLVQPGGSLRLSCAASGFSFSDFWMSWVRQAPGKGLEWVATISQAGSEKDYVDSVKGRFTISRDNAKKSLYLQMNSLRAEDTAVYYCASGVYSFDYRGQGTLVTVSSGTGGGGSGGGGSGGGGSEFEIVLTQSPATLSLSPGERATLSCRASQSVSIYLAWYQQKPGQAPRLLIYDASNRATGIPARFSGSGSGTDFTLTISSLEPEDFAVYYCQQRSNWPPFTFGPGTKVDIKLEDLKNVFPPEVAVFEPSEAEISHTQKATLVCLATGFYPDHVELSWWVNGKEVHSGVCTDPQPLKEQPALNDSRYCLSSRLRVSATFWQNPRNHFRCQVQFYGLSENDEWTQDRAKPVTQIVSAEAWGRADCGFTSESYQQGVLSATILYEILLGKATLYAVLVSALVLMAMVKRKDSRGRAKRSGSGATNFSLLKQAGDVEENPGPTSMDWIWRILFLVGAATGAHSFEQVQLVESGGGVVQPGRSLRLSCAASGFTFSSYGMHWVRQAPGKGLEWVAVIWDDGSNKYYVDSVKGRFTISRDNSKNTLYLQMNSLRAEDTAVYYCARDDYYGSGSFNSYYGTDVWGQGTTVTVSSTRIQNPDPAVYQLRDSKSSDKSVCLFTDFDSQTNVSQSKDSDVYITDKCVLDMRSMDFKSNSAVAWSNKSDFACANAFNNSIIPEDTFFPSPESSCDVKLVEKSFETDTNLNFQNLSVIGFRILLLKVAGFNLLMTLRLWSS

SEQ ID NO: 12680 - protein, 747 aa, Artificial Sequence
  Synthetic Polypeptide
MALPVTALLLPLALLLHAARPEVQLVESGGGLVQPGGSLRLSCAASGFSFSDFWMSWVRQAPGKGLEWVATISQAGSEKDYVDSVKGRFTISRDNAKKSLYLQMNSLRAEDTAVYYCASGVYSFDYRGQGTLVTVSSGTGGGGSGGGGSGGGGSEFDIQMTQSPSSLSASVGDRVTITCRASQGISSWLAWYQQKPEKAPKSLIYAASSLQSGVPSRFSGSGSGTDFTLTISSLQPEDFATYYCQQYNSYPYTFGQGTKLEIKLEDLKNVFPPEVAVFEPSEAEISHTQKATLVCLATGFYPDHVELSWWVNGKEVHSGVCTDPQPLKEQPALNDSRYCLSSRLRVSATFWQNPRNHFRCQVQFYGLSENDEWTQDRAKPVTQIVSAEAWGRADCGFTSESYQQGVLSATILYEILLGKATLYAVLVSALVLMAMVKRKDSRGRAKRSGSGATNFSLLKQAGDVEENPGPTSMDWIWRILFLVGAATGAHSFEEVQLVQSGGGLVHPGGSLRLSCAGSGFTFSTYLMYWVRQAPGKTLEWVSAIGSGGDTYYADSVKGRFTISRDNAKNSLYLQMNSLRAEDMAVYYCARGLGYWGQGTLVTVSSTRIQNPDPAVYQLRDSKSSDKSVCLFTDFDSQTNVSQSKDSDVYITDKCVLDMRSMDFKSNSAVAWSNKSDFACANAFNNSIIPEDTFFPSPESSCDVKLVEKSFETDTNLNFQNLSVIGFRILLLKVAGFNLLMTLRLWSS

SEQ ID NO: 12681 - protein, 766 aa, Artificial Sequence
  Synthetic Polypeptide
MALPVTALLLPLALLLHAARPEVQLVESGGGLVQPGGSLRLSCAASGFSFSDFWMSWVRQAPGKGLEWVATISQAGSEKDYVDSVKGRFTISRDNAKKSLYLQMNSLRAEDTAVYYCASGVYSFDYRGQGTLVTVSSGTGGGGSGGGGSGGGGSEFLPVLTQPPSVSVAPGKTARITCGGNNIGSKSVHWYQQKPGQAPVLVVYDDSDRPSGIPERFSGSNSGNTATLTISRVEAGDEADYYCQVWDSSSDYVVFGGGTKLTVLLEDLKNVFPPEVAVFEPSEAEISHTQKATLVCLATGFYPDHVELSWWVNGKEVHSGVCTDPQPLKEQPALNDSRYCLSSRLRVSATFWQNPRNHFRCQVQFYGLSENDEWTQDRAKPVTQIVSAEAWGRADCGFTSESYQQGVLSATILYEILLGKATLYAVLVSALVLMAMVKRKDSRGRAKRSGSGATNFSLLKQAGDVEENPGPTSMDWIWRILFLVGAATGAHSFEEVQLVQSGAEVKKPGESLKISCKGSGYSFTSYWIGWVRQMPGKGLEWMGIIYPGDSDTRYSPSFQGQVTISADKSISTAYLQWSSLKASDTAMYYCARQVWGWQGGMYPRSNWWYNLDSWGQGTLVTVSSTRIQNPDPAVYQLRDSKSSDKSVCLFTDFDSQTNVSQSKDSDVYITDKCVLDMRSMDFKSNSAVAWSNKSDFACANAFNNSIIPEDTFFPSPESSCDVKLVEKSFETDTNLNFQNLSVIGFRILLLKVAGFNLLMTLRLWSS

SEQ ID NO: 12682 - protein, 759 aa, Artificial Sequence
  Synthetic Polypeptide
MALPVTALLLPLALLLHAARPEVQLVESGGGLVQPGGSLRLSCAASGFSFSDFWMSWVRQAPGKGLEWVATISQAGSEKDYVDSVKGRFTISRDNAKKSLYLQMNSLRAEDTAVYYCASGVYSFDYRGQGTLVTVSSGTGGGGSGGGGSGGGGSEFELVMTQSPASLAVSLGQRATISCRASESVDSYGKSFMHWYQLKPGQPPKLLIYRASNLESGVPARFSGSGSRTDFTLTIDPVEADDAATYYCQQNNEDPWTFGGGTKLEIKLEDLKNVFPPEVAVFEPSEAEISHTQKATLVCLATGFYPDHVELSWWVNGKEVHSGVCTDPQPLKEQPALNDSRYCLSSRLRVSATFWQNPRNHFRCQVQFYGLSENDEWTQDRAKPVTQIVSAEAWGRADCGFTSESYQQGVLSATILYEILLGKATLYAVLVSALVLMAMVKRKDSRGRAKRSGSGATNFSLLKQAGDVEENPGPTSMDWIWRILFLVGAATGAHSFEEVQLEQSGPELVKPGASVKMSCKASGYTFTNYYMKWVKQSHGKSLEWIGDLNPNNGDTFYNQKFKGKATLTVDKSSNTAYMQLNSLTSEDSAVYYCARTGRYEENAMDYWGQGTSVTVSSTRIQNPDPAVYQLRDSKSSDKSVCLFTDFDSQTNVSQSKDSDVYITDKCVLDMRSMDFKSNSAVAWSNKSDFACANAFNNSIIPEDTFFPSPESSCDVKLVEKSFETDTNLNFQNLSVIGFRILLLKVAGFNLLMTLRLWSS

SEQ ID NO: 12683 - protein, 753 aa, Artificial Sequence
  Synthetic Polypeptide
MALPVTALLLPLALLLHAARPEVQLVESGGGLVQPGGSLRLSCAASGFSFSDFWMSWVRQAPGKGLEWVATISQAGSEKDYVDSVKGRFTISRDNAKKSLYLQMNSLRAEDTAVYYCASGVYSFDYRGQGTLVTVSSGTGGGGSGGGGSGGGGSEFDVVMTQSPSSLSASVGDRVTITCMASEDIYIRLAWYQQKPGNAPKLLIYAATSLETGVPSRFSGSGSGTDFTLTISSLQPEDFATYYCQQYWSSPWTFGGGTKVEIKLEDLKNVFPPEVAVFEPSEAEISHTQKATLVCLATGFYPDHVELSWWVNGKEVHSGVCTDPQPLKEQPALNDSRYCLSSRLRVSATFWQNPRNHFRCQVQFYGLSENDEWTQDRAKPVTQIVSAEAWGRADCGFTSESYQQGVLSATILYEILLGKATLYAVLVSALVLMAMVKRKDSRGRAKRSGSGATNFSLLKQAGDVEENPGPTSMDWIWRILFLVGAATGAHSFEQVQLQESGPGLVKPSQTLSLTCTVSGYSITSDYTWNWIRQPPGNGLEWIGYITYSGSTSYNPSLKSRVLISVDTSKNQVSLKLSSVTAADTAVYYCARLGRRYTMDYWGQGTTVTVSSTRIQNPDPAVYQLRDSKSSDKSVCLFTDFDSQTNVSQSKDSDVYITDKCVLDMRSMDFKSNSAVAWSNKSDFACANAFNNSIIPEDTFFPSPESSCDVKLVEKSFETDTNLNFQNLSVIGFRILLLKVAGFNLLMTLRLWSS

SEQ ID NO: 12684 - protein, 757 aa, Artificial Sequence; identical to SEQ ID NO: 12547
  Synthetic Polypeptide

SEQ ID NO: 12685 - protein, 757 aa, Artificial Sequence
  Synthetic Polypeptide
MALPVTALLLPLALLLHAARPEVQLVESGGGLVQPGGSLRLSCAASGFSFSDFWMSWVRQAPGKGLEWVATISQAGSEKDYVDSVKGRFTISRDNAKKSLYLQMNSLRAEDTAVYYCASGVYSFDYRGQGTLVTVSSGTGGGGSGGGGSGGGGSEFDIVLTQSPATLSLSPGDRATLSCRASESVTILGSHLIYWYQQKPGQAPRLLIQLASNVQTGIPARFSGSGSRTDFTLTISSLEPEDFAVYYCLQSRTIPRTFGQGTKLEIKRLEDLKNVFPPEVAVFEPSEAEISHTQKATLVCLATGFYPDHVELSWWVNGKEVHSGVCTDPQPLKEQPALNDSRYCLSSRLRVSATFWQNPRNHFRCQVQFYGLSENDEWTQDRAKPVTQIVSAEAWGRADCGFTSESYQQGVLSATILYEILLGKATLYAVLVSALVLMAMVKRKDSRGRAKRSGSGATNFSLLKQAGDVEENPGPTSMDWIWRILFLVGAATGAHSFEQVQLVQSGSELKKPGESVKISCKASGYTFTHYSMNWVRQAPGQGLEWMGRINTETGEPLYADDFKGRFVFSLDTSASTAYLQISSLKAEDTAVYYCSNDYLYSLDYWGQGTLVTVSSTRIQNPDPAVYQLRDSKSSDKSVCLFTDFDSQTNVSQSKDSDVYITDKCVLDMRSMDFKSNSAVAWSNKSDFACANAFNNSIIPEDTFFPSPESSCDVKLVEKSFETDTNLNFQNLSVIGFRILLLKVAGFNLLMTLRLWSS

SEQ ID NO: 12686 - protein, 758 aa, Artificial Sequence
  Synthetic Polypeptide
MALPVTALLLPLALLLHAARPEVQLVESGGGLVQPGGSLRLSCAASGFSFSDFWMSWVRQAPGKGLEWVATISQAGSEKDYVDSVKGRFTISRDNAKKSLYLQMNSLRAEDTAVYYCASGVYSFDYRGQGTLVTVSSGTGGGGSGGGGSGGGGSEFDIQLTQSPSFLSASVGDRVTITCRASQGISTDLNWYQQKPGKAPKLLIYAASNLESGVPSRFSGSGSGTEFTLTISSLQPEDFATYYCQQSYNWPYTFGGGTKVEIKRLEDLKNVFPPEVAVFEPSEAEISHTQKATLVCLATGFYPDHVELSWWVNGKEVHSGVCTDPQPLKEQPALNDSRYCLSSRLRVSATFWQNPRNHFRCQVQFYGLSENDEWTQDRAKPVTQIVSAEAWGRADCGFTSESYQQGVLSATILYEILLGKATLYAVLVSALVLMAMVKRKDSRGRAKRSGSGATNFSLLKQAGDVEENPGPTSMDWIWRILFLVGAATGAHSFEEVQLVESGGGLVKPGGSLRLSCAASGFTFSNFEMNWVRQAPGKGLEWVSGISSNGRYINYADSVKGRFTISRDNAKNSLYLQMNSLRAEDTAVYYCARVVDFDQDYNGFDYWGQGTLVTVSSTRIQNPDPAVYQLRDSKSSDKSVCLFTDFDSQTNVSQSKDSDVYITDKCVLDMRSMDFKSNSAVAWSNKSDFACANAFNNSIIPEDTFFPSPESSCDVKLVEKSFETDTNLNFQNLSVIGFRILLLKVAGFNLLMTLRLWSS

SEQ ID NO: 12687 - protein, 756 aa, Artificial Sequence
  Synthetic Polypeptide
MALPVTALLLPLALLLHAARPEVQLVESGGGLVQPGGSLRLSCAASGFSFSDFWMSWVRQAPGKGLEWVATISQAGSEKDYVDSVKGRFTISRDNAKKSLYLQMNSLRAEDTAVYYCASGVYSFDYRGQGTLVTVSSGTGGGGSGGGGSGGGGSEFDIQLTQSPSFLSASVGDRVTITCSLSLGISTWRDWFPPRLGRGLEPLTYAASTLQSGVPSRFSGSGSGTEFTLTISSLQPEDFATYYCQQLNSYPLTFGGGTKVEIKRLEDLKNVFPPEVAVFEPSEAEISHTQKATLVCLATGFYPDHVELSWWVNGKEVHSGVCTDPQPLKEQPALNDSRYCLSSRLRVSATFWQNPRNHFRCQVQFYGLSENDEWTQDRAKPVTQIVSAEAWGRADCGFTSESYQQGVLSATILYEILLGKATLYAVLVSALVLMAMVKRKDSRGRAKRSGSGATNFSLLKQAGDVEENPGPTSMDWIWRILFLVGAATGAHSFEEVQLVESGGGLVKPGGSLRLSCAASGFTFSTYGMSWVRQAPGKGLEWVAYINNGSGYIYYADSVKGRFTISRDNAKNSLYLQMNSLRAEDTAVYYCARGQWWSGGDFDYWGQGTLVTVSSTRIQNPDPAVYQLRDSKSSDKSVCLFTDFDSQTNVSQSKDSDVYITDKCVLDMRSMDFKSNSAVAWSNKSDFACANAFNNSIIPEDTFFPSPESSCDVKLVEKSFETDTNLNFQNLSVIGFRILLLKVAGFNLLMTLRLWSS

SEQ ID NO: 12688 - protein, 757 aa, Artificial Sequence
  Synthetic Polypeptide
MALPVTALLLPLALLLHAARPEVQLVESGGGLVQPGGSLRLSCAASGFSFSDFWMSWVRQAPGKGLEWVATISQAGSEKDYVDSVKGRFTISRDNAKKSLYLQMNSLRAEDTAVYYCASGVYSFDYRGQGTLVTVSSGTGGGGSGGGGSGGGGSEFEIVLTQSPATLSLSPGERATLSCSASSSVSYMYWYQQKPGQAPRLLIYRTSNLASGIPARFSGSGSGTDFTLTISSLEPEDFAVYYCQQYHSYPTTFGQGTKVEIKRTVLEDLKNVFPPEVAVFEPSEAEISHTQKATLVCLATGFYPDHVELSWWVNGKEVHSGVCTDPQPLKEQPALNDSRYCLSSRLRVSATFWQNPRNHFRCQVQFYGLSENDEWTQDRAKPVTQIVSAEAWGRADCGFTSESYQQGVLSATILYEILLGKATLYAVLVSALVLMAMVKRKDSRGRAKRSGSGATNFSLLKQAGDVEENPGPTSMDWIWRILFLVGAATGAHSFEEVQLVESGGGLVQPGGSLRLSCAASGFSFNTYAMNWVRQAPGKGLEWVSHIRSKSNNFATYYADSVKDRFTISRDNAKNSLYLQMNSLRAEDTAVYYCARQGGDFPMDYWGQGTLVTVSSTRIQNPDPAVYQLRDSKSSDKSVCLFTDFDSQTNVSQSKDSDVYITDKCVLDMRSMDFKSNSAVAWSNKSDFACANAFNNSIIPEDTFFPSPESSCDVKLVEKSFETDTNLNFQNLSVIGFRILLLKVAGFNLLMTLRLWSS

SEQ ID NO: 12689 - protein, 753 aa, Artificial Sequence
  Synthetic Polypeptide
MALPVTALLLPLALLLHAARPEVQLVESGGGLVQPGGSLRLSCAASGFSFSDFWMSWVRQAPGKGLEWVATISQAGSEKDYVDSVKGRFTISRDNAKKSLYLQMNSLRAEDTAVYYCASGVYSFDYRGQGTLVTVSSGTGGGGSGGGGSGGGGSEFDVVMTQSPSSLSASVGDRVTITCKASEDIYIRLAWYQQKPGKAPKLLIYAATSLETGVPSRFSGSGSGTDFTLTISSLQPEDFATYYCQQYWTTPWTFGGGTKVEIKLEDLKNVFPPEVAVFEPSEAEISHTQKATLVCLATGFYPDHVELSWWVNGKEVHSGVCTDPQPLKEQPALNDSRYCLSSRLRVSATFWQNPRNHFRCQVQFYGLSENDEWTQDRAKPVTQIVSAEAWGRADCGFTSESYQQGVLSATILYEILLGKATLYAVLVSALVLMAMVKRKDSRGRAKRSGSGATNFSLLKQAGDVEENPGPTSMDWIWRILFLVGAATGAHSFEQVQLQESGPGLVKPSQTLSLTCTVSGYSITIDYTWNWIRQPPGKGLEWIGYITYSGSTDYNPSLKSRVLISVDTSKNQVSLKLSSVTAADTAVYYCARLGRRYALDYWGQGTTVTVSSTRIQNPDPAVYQLRDSKSSDKSVCLFTDFDSQTNVSQSKDSDVYITDKCVLDMRSMDFKSNSAVAWSNKSDFACANAFNNSIIPEDTFFPSPESSCDVKLVEKSFETDTNLNFQNLSVIGFRILLLKVAGFNLLMTLRLWSS

SEQ ID NO: 12690 - protein, 758 aa, Artificial Sequence
  Synthetic Polypeptide
MALPVTALLLPLALLLHAARPEVQLVESGGGLVQPGGSLRLSCAASGFSFSDFWMSWVRQAPGKGLEWVATISQAGSEKDYVDSVKGRFTISRDNAKKSLYLQMNSLRAEDTAVYYCASGVYSFDYRGQGTLVTVSSGTGGGGSGGGGSGGGGSEFDIQMTQTTSSLSASLGDRVTISCRASQDISNYLNWYQQKPDGTVKLLIYYTSILHSGVPSRFSGSGSGTDYSLTISNLEQEDFATYFCQQGNTLPWTFGGGTKLEIKALEDLKNVFPPEVAVFEPSEAEISHTQKATLVCLATGFYPDHVELSWWVNGKEVHSGVCTDPQPLKEQPALNDSRYCLSSRLRVSATFWQNPRNHFRCQVQFYGLSENDEWTQDRAKPVTQIVSAEAWGRADCGFTSESYQQGVLSATILYEILLGKATLYAVLVSALVLMAMVKRKDSRGRAKRSGSGATNFSLLKQAGDVEENPGPTSMDWIWRILFLVGAATGAHSFEEVQLVESGGGLVKPGGSLKLSCAASGFAFSIYDMSWVRQTPEKRLEWVAYISSGGGTYYPDTVKGRFTISRDNAKNTLYLQMSSLKSEDTAMYYCARHSGYGTHWGVLFAYWGQGTLVTVSATRIQNPDPAVYQLRDSKSSDKSVCLFTDFDSQTNVSQSKDSDVYITDKCVLDMRSMDFKSNSAVAWSNKSDFACANAFNNSIIPEDTFFPSPESSCDVKLVEKSFETDTNLNFQNLSVIGFRILLLKVAGFNLLMTLRLWSS

SEQ ID NO: 12691 - protein, 768 aa, Artificial Sequence
  Synthetic Polypeptide
MALPVTALLLPLALLLHAARPEVQLVESGGGLVQPGGSLRLSCAASGFSFSDFWMSWVRQAPGKGLEWVATISQAGSEKDYVDSVKGRFTISRDNAKKSLYLQMNSLRAEDTAVYYCASGVYSFDYRGQGTLVTVSSGTGGGGSGGGGSGGGGSEFDIVMTQSPDSLAVSLGERATINCKSSQSLLYRSNQKNYLAWYQQKPGQPPKLLIYWASTRESGVPDRFSGSGSGTDFTLTISSLQAEDVAVYYCQQYYNYPRTFGQGTKVEIKRTVLEDLKNVFPPEVAVFEPSEAEISHTQKATLVCLATGFYPDHVELSWWVNGKEVHSGVCTDPQPLKEQPALNDSRYCLSSRLRVSATFWQNPRNHFRCQVQFYGLSENDEWTQDRAKPVTQIVSAEAWGRADCGFTSESYQQGVLSATILYEILLGKATLYAVLVSALVLMAMVKRKDSRGRAKRSGSGATNFSLLKQAGDVEENPGPTSMDWIWRILFLVGAATGAHSFEEVQLLESGGGLVQPGGSLRLSCAASGYSITSDYAWNWVRQAPGKGLEWVSYISNSGSTSYNPSLKSRFTISRDNSKNTLYLQMNSLRAEDTAVYYCAKERNYDYDDYYYAMDYWGQGTLVTVSSTRIQNPDPAVYQLRDSKSSDKSVCLFTDFDSQTNVSQSKDSDVYITDKCVLDMRSMDFKSNSAVAWSNKSDFACANAFNNSIIPEDTFFPSPESSCDVKLVEKSFETDTNLNFQNLSVIGFRILLLKVAGFNLLMTLRLWSS

SEQ ID NO: 12692 - protein, 761 aa, Artificial Sequence
  Synthetic Polypeptide
MALPVTALLLPLALLLHAARPEVQLVESGGGLVQPGGSLRLSCAASGFSFSDFWMSWVRQAPGKGLEWVATISQAGSEKDYVDSVKGRFTISRDNAKKSLYLQMNSLRAEDTAVYYCASGVYSFDYRGQGTLVTVSSGTGGGGSGGGGSGGGGSEFDVVMTQSPLSLPVTLGQPASISCRSSQSLLHSSGNTYLEWYQQRPGQSPRPLIYKISTRFSGVPDRFSGSGSGTDFTLKISRVEAEDVGVYYCFQGSHVPYTFGGGTKVEIKRLEDLKNVFPPEVAVFEPSEAEISHTQKATLVCLATGFYPDHVELSWWVNGKEVHSGVCTDPQPLKEQPALNDSRYCLSSRLRVSATFWQNPRNHFRCQVQFYGLSENDEWTQDRAKPVTQIVSAEAWGRADCGFTSESYQQGVLSATILYEILLGKATLYAVLVSALVLMAMVKRKDSRGRAKRSGSGATNFSLLKQAGDVEENPGPTSMDWIWRILFLVGAATGAHSFEQVQLVQSGAEVKKPGASVKVSCKASGLTIEDYYMHWVRQAPGQGLEWMGWIDPENGDTEYGPKFQGRVTMTRDTSINTAYMELSRLRSDDTAVYYCAVHNAHYGTWFAYWGQGTLVTVSSTRIQNPDPAVYQLRDSKSSDKSVCLFTDFDSQTNVSQSKDSDVYITDKCVLDMRSMDFKSNSAVAWSNKSDFACANAFNNSIIPEDTFFPSPESSCDVKLVEKSFETDTNLNFQNLSVIGFRILLLKVAGFNLLMTLRLWSS

SEQ ID NO: 12693 - protein, 753 aa, Artificial Sequence
  Synthetic Polypeptide
MALPVTALLLPLALLLHAARPEVQLVESGGGLVQPGGSLRLSCAASGFSFSDFWMSWVRQAPGKGLEWVATISQAGSEKDYVDSVKGRFTISRDNAKKSLYLQMNSLRAEDTAVYYCASGVYSFDYRGQGTLVTVSSGTGGGGSGGGGSGGGGSEFDIQMTQSPSSLSASVGDRVTITCRASENIYSNLAWYQQKPGKAPKLLIYAATNLADGVPSRFSGSGSGTDFTLTISSLQPEDFATYYCQHFWGTPTFGQGTKVEIKRTVLEDLKNVFPPEVAVFEPSEAEISHTQKATLVCLATGFYPDHVELSWWVNGKEVHSGVCTDPQPLKEQPALNDSRYCLSSRLRVSATFWQNPRNHFRCQVQFYGLSENDEWTQDRAKPVTQIVSAEAWGRADCGFTSESYQQGVLSATILYEILLGKATLYAVLVSALVLMAMVKRKDSRGRAKRSGSGATNFSLLKQAGDVEENPGPTSMDWIWRILFLVGAATGAHSFEEVQLVESGGGLVQPGGSLRLSCAASGFSLTNYGVHWVRQAPGKGLEWVSVIWSGGSTDYNAAFISRFTISADTSKNTAYLQMNSLRAEDTAVYYCARELIHAMDNWGQGTLVTVSSTRIQNPDPAVYQLRDSKSSDKSVCLFTDFDSQTNVSQSKDSDVYITDKCVLDMRSMDFKSNSAVAWSNKSDFACANAFNNSIIPEDTFFPSPESSCDVKLVEKSFETDTNLNFQNLSVIGFRILLLKVAGFNLLMTLRLWSS

SEQ ID NO: 12694 - protein, 760 aa, Artificial Sequence
  Synthetic Polypeptide
MALPVTALLLPLALLLHAARPEVQLVESGGGLVQPGGSLRLSCAASGFSFSDFWMSWVRQAPGKGLEWVATISQAGSEKDYVDSVKGRFTISRDNAKKSLYLQMNSLRAEDTAVYYCASGVYSFDYRGQGTLVTVSSGTGGGGSGGGGSGGGGSEFDFVMTQSPLSLPVTPGEPASISCRSSQSIVHSNGNTYLEWYLQKPGQSPQLLIYKVSNRFSGVPDRFSGSGSGTDFTLKISRVEAEDVGVYYCFQGSHVPLTFGQGTKLEIKRLEDLKNVFPPEVAVFEPSEAEISHTQKATLVCLATGFYPDHVELSWWVNGKEVHSGVCTDPQPLKEQPALNDSRYCLSSRLRVSATFWQNPRNHFRCQVQFYGLSENDEWTQDRAKPVTQIVSAEAWGRADCGFTSESYQQGVLSATILYEILLGKATLYAVLVSALVLMAMVKRKDSRGRAKRSGSGATNFSLLKQAGDVEENPGPTSMDWIWRILFLVGAATGAHSFEEVQLVESGAEVKKPGASVKVSCKASGYTFTSYWIHWVRQAPGQGLEWMGENDPSNGRTNYNEKFKNRVTLTVDTSISTAYMELSRLRSDDTAVYYCARGPNYFYSMDYWGQGTMVTVSSTRIQNPDPAVYQLRDSKSSDKSVCLFTDFDSQTNVSQSKDSDVYITDKCVLDMRSMDFKSNSAVAWSNKSDFACANAFNNSIIPEDTFFPSPESSCDVKLVEKSFETDTNLNFQNLSVIGFRILLLKVAGFNLLMTLRLWSS

SEQ ID NO: 12695 - protein, 753 aa, Artificial Sequence
  Synthetic Polypeptide
MALPVTALLLPLALLLHAARPEVQLVESGGGLVQPGGSLRLSCAASGFSFSDFWMSWVRQAPGKGLEWVATISQAGSEKDYVDSVKGRFTISRDNAKKSLYLQMNSLRAEDTAVYYCASGVYSFDYRGQGTLVTVSSGTGGGGSGGGGSGGGGSEFDIQLTQSPSFLSASVGDRVTITCSARSSISFMYWYQQKPGKAPKLLIYDTSNLASGVPSRFSGSGSGTEFTLTISSLEAEDAATYYCQQWSSYPLTFGQGTKLEIKLEDLKNVFPPEVAVFEPSEAEISHTQKATLVCLATGFYPDHVELSWWVNGKEVHSGVCTDPQPLKEQPALNDSRYCLSSRLRVSATFWQNPRNHFRCQVQFYGLSENDEWTQDRAKPVTQIVSAEAWGRADCGFTSESYQQGVLSATILYEILLGKATLYAVLVSALVLMAMVKRKDSRGRAKRSGSGATNFSLLKQAGDVEENPGPTSMDWIWRILFLVGAATGAHSFEQVQLVQSGAEVKKPGASVKVSCKASGYTFTGSWMNWVRQAPGQGLEWIGRIYPGDGETNYNGKFKDRVTITADKSTSTAYMELSSLRSEDTAVYYCARIYGNNVYFDVWGQGTTVTVSSTRIQNPDPAVYQLRDSKSSDKSVCLFTDFDSQTNVSQSKDSDVYITDKCVLDMRSMDFKSNSAVAWSNKSDFACANAFNNSIIPEDTFFPSPESSCDVKLVEKSFETDTNLNFQNLSVIGFRILLLKVAGFNLLMTLRLWSS

SEQ ID NO: 12696 - protein, 761 aa, Artificial Sequence
  Synthetic Polypeptide
MALPVTALLLPLALLLHAARPEVQLVESGGGLVQPGGSLRLSCAASGFSFSDFWMSWVRQAPGKGLEWVATISQAGSEKDYVDSVKGRFTISRDNAKKSLYLQMNSLRAEDTAVYYCASGVYSFDYRGQGTLVTVSSGTGGGGSGGGGSGGGGSEFQLVLTQSPSASASLGSSVKLTCTLSSGHKTDTIDWYQQQPGKAPRYLMKLEGSGSYNKGSGVPDRFSGSSSGADWYLTISSLQSEDEADYYCGTDYPGNYLFGGGTQLTVLGLEDLKNVFPPEVAVFEPSEAEISHTQKATLVCLATGFYPDHVELSWWVNGKEVHSGVCTDPQPLKEQPALNDSRYCLSSRLRVSATFWQNPRNHFRCQVQFYGLSENDEWTQDRAKPVTQIVSAEAWGRADCGFTSESYQQGVLSATILYEILLGKATLYAVLVSALVLMAMVKRKDSRGRAKRSGSGATNFSLLKQAGDVEENPGPTSMDWIWRILFLVGAATGAHSFEQEQLVESGGGLVQPGGSLRLSCAASGFTFSDYYMSWIRQAPGKGLEWVATIYPSSGKTYYADSAKGRLTISSDNAKDSLYLQMNSLRAEDTAVYYCTRDSYADDAALFDIWGQGTTVTVSSTRIQNPDPAVYQLRDSKSSDKSVCLFTDFDSQTNVSQSKDSDVYITDKCVLDMRSMDFKSNSAVAWSNKSDFACANAFNNSIIPEDTFFPSPESSCDVKLVEKSFETDTNLNFQNLSVIGFRILLLKVAGFNLLMTLRLWSS

SEQ ID NO: 12697 - protein, 736 aa, Artificial Sequence
  Synthetic Polypeptide
MALPVTALLLPLALLLHAARPEVQLVESGGGLVQPGGSLRLSCAASGFSFSDFWMSWVRQAPGKGLEWVATISQAGSEKDYVDSVKGRFTISRDNAKKSLYLQMNSLRAEDTAVYYCASGVYSFDYRGQGTLVTVSSGTGGGGSGGGGSGGGGSEFEIVLTQSPDTLSLSPGEKATLSCRASQSVSSSFLAWYQQKPGQAPSLLIYVASRRAAGIPDRFSGSGSGTDFTLTISRLEPEDFGMFYCQHYGRTPFTFGPARGPEERVPTGGRVRARGRDQPHPESHPRVPGYRLLPRPCGTVLVGQRQRGAQRRVYRPPATERTARPERQPVLPEQQTESVRHLLAEPPEPLQMPGAVLRPERERRVDPGQSQARDPDRVCRSLGQSRLRLYQRELPAGRAERHHPVRDPAGQGHPVRRAGVCPGADGYGQAEGQPGKGQAIWIWSNKLLTTQTSRRGGESRAYYGLDLAHPFPCRRCYRRAFLRTDPVGGIRGRCGAAGEPETVMRGVWLHIQELRHALGATGPRKGFGVGRRDLVRRIVLRRSCEGKVHHLPRQQKYALPANELTQGGYGGLLLRSLRDCCGRRIRLLGTGYPGDSIKHAYPEPSCRVPAAGQEQRQERVSVHRLRQPDQRVPEQGLRRVHHRVRAGHAEHGLQEQLRRGLVQQVRFRLRQRLQQQHYPRGHILPKPREQLRREAGGKELRDRHQPELPEPERDRLQNPAAESGRLPADDPAAVVQ

SEQ ID NO: 12698 - protein, 748 aa, Artificial Sequence
  Synthetic Polypeptide
MALPVTALLLPLALLLHAARPEVQLVESGGGLVQPGGSLRLSCAASGFSFSDFWMSWVRQAPGKGLEWVATISQAGSEKDYVDSVKGRFTISRDNAKKSLYLQMNSLRAEDTAVYYCASGVYSFDYRGQGTLVTVSSGTGGGGSGGGGSGGGGSEFDIQMTQSPSSLSASLGDRVTITCRASQGIRNDLGWYQQKPGKAPKRLIYASSTLQSGVPSRFSGSGSGTEFTLTISSLQPEDFATYYCLQHNNFPWTFGQGTKVEIKRLEDLKNVFPPEVAVFEPSEAEISHTQKATLVCLATGFYPDHVELSWWVNGKEVHSGVCTDPQPLKEQPALNDSRYCLSSRLRVSATFWQNPRNHFRCQVQFYGLSENDEWTQDRAKPVTQIVSAEAWGRADCGFTSESYQQGVLSATILYEILLGKATLYAVLVSALVLMAMVKRKDSRGRAKRSGSGATNFSLLKQAGDVEENPGPTSMDWIWRILFLVGAATGAHSFEHARKLLRSLDLYWSQPRHHSRVQVVFPSTQGWASAGSGNPLARLWNGSLTYSAMPKKATGQANPALFPRTLLSLRWCPPTWTRWTPPPITAQESLGMVGMVTTIIMGWMCGGKAQPRSQARVSRTLILPCTSCGIARAATRACVCSPTSTARPTCPRARTPTCTSPISACWTCGAWTSRATPPWPGPTSPISPAPTPSTTALSPRTHSSQAPRAAATSWWKRASRQTPTTSRTASASESCCKWPALTCPCGCGP

SEQ ID NO: 12699 - protein, 756 aa, Artificial Sequence
  Synthetic Polypeptide
MALPVTALLLPLALLLHAARPEVQLVESGGGLVQPGGSLRLSCAASGFSFSDFWMSWVRQAPGKGLEWVATISQAGSEKDYVDSVKGRFTISRDNAKKSLYLQMNSLRAEDTAVYYCASGVYSFDYRGQGTLVTVSSGTGGGGSGGGGSGGGGSEFDIVLTQSPPSLAMSLGKRATISCRASESVTILGSHLIHWYQQKPGQPPTLLIQLASNVQTGVPARFSGSGSRTDFTLTIDPVEEDDVAVYYCLQSRTIPRTFGGGTKLEIKLEDLKNVFPPEVAVFEPSEAEISHTQKATLVCLATGFYPDHVELSWWVNGKEVHSGVCTDPQPLKEQPALNDSRYCLSSRLRVSATFWQNPRNHFRCQVQFYGLSENDEWTQDRAKPVTQIVSAEAWGRADCGFTSESYQQGVLSATILYEILLGKATLYAVLVSALVLMAMVKRKDSRGRAKRSGSGATNFSLLKQAGDVEENPGPTSMDWIWRILFLVGAATGAHSFEQIQLVQSGPELKKPGETVKISCKASGYTFTDYSINWVKRAPGKGLKWMGWINTETREPAYAYDFRGRFAFSLETSASTAYLQINNLKYEDTATYFCALDYSYAMDYWGQGTSVTVSSTRIQNPDPAVYQLRDSKSSDKSVCLFTDFDSQTNVSQSKDSDVYITDKCVLDMRSMDFKSNSAVAWSNKSDFACANAFNNSIIPEDTFFPSPESSCDVKLVEKSFETDTNLNFQNLSVIGFRILLLKVAGFNLLMTLRLWSS

SEQ ID NO: 12700 - protein, 734 aa, Artificial Sequence
  Synthetic Polypeptide
MALPVTALLLPLALLLHAARPEVQLVESGGGLVQPGGSLRLSCAASGFSFSDFWMSWVRQAPGKGLEWVATISQAGSEKDYVDSVKGRFTISRDNAKKSLYLQMNSLRAEDTAVYYCASGVYSFDYRGQGTLVTVSSGTGGGGSGGGGSGGGGSEFDIQLTQSPSSLSASVGDRVSFTCQASQDINNFLNWYQQKPGKAPKLLIYDASNLETGVPSRFSGSGSGTDFTFTISSLQPEDIATYYCQQYGNLPFTFGGGTKVEIKSSRTRTCSHLRWPCSSLARPRSATPRKPPSCAWLPASTPTMWNCLGGSTAKRCTAACVPTPSHKNSPPTTAGTAAADECPPPSGRTPGTTSDARCSSTAARTTSGPRTEPSPPRSCLPKPGAEPIAALPARATSRACAPPSCTRSCWARPPCTPCWCLPWCWLWSSGRTAGEGPSDLDLEQQTSHYSNKQVTWRRIPGLLVWTGFGASFSLSALLPARIPSNRSNCKKADPDWSLLRHLVRARSVAAPSPPIIGHGYDNPQVRAWNGLAISTIQEARTTIPASPEQFQIPVKTSSVLNCQAQLPTPLCITASHWCIVEGIVIAGSIIGDREPWLYLPRVSRTLILPCTSCGIARAATRACVCSPTSTARPTCPRARTPTCTSPISACWTCGAWTSRATPPWPGPTSPISPAPTPSTTALSPRTHSSQAPRAAATSWWKRASRQTPTTSRTASASESCCKWPALTCPCGCGP

SEQ ID NO: 12701 - protein, 760 aa, Artificial Sequence
  Synthetic Polypeptide
MALPVTALLLPLALLLHAARPEVQLVESGGGLVQPGGSLRLSCAASGFSFSDFWMSWVRQAPGKGLEWVATISQAGSEKDYVDSVKGRFTISRDNAKKSLYLQMNSLRAEDTAVYYCASGVYSFDYRGQGTLVTVSSGTGGGGSGGGGSGGGGSEFDIQLTQSPSSLSASVGDRVSFTCQASQDINNFLNWYQQKPGKAPKLLIYDASNLETGVPSRFSGSGSGTDFTFTISSLQPEDIATYYCQQYGNLPFTFGGGTKVEIKRLEDLKNVFPPEVAVFEPSEAEISHTQKATLVCLATGFYPDHVELSWWVNGKEVHSGVCTDPQPLKEQPALNDSRYCLSSRLRVSATFWQNPRNHFRCQVQFYGLSENDEWTQDRAKPVTQIVSAEAWGRADCGFTSESYQQGVLSATILYEILLGKATLYAVLVSALVLMAMVKRKDSRGRAKRSGSGATNFSLLKQAGDVEENPGPTSMDWIWRILFLVGAATGAHSFEQVQLQESGPGLVKPSQTLSLTCTVSGGSISSGGFYWSWIRQHPGKGLEWIGYIHHSGSTHYNPSLKSRVTISIDTSKNLFSLRLSSVTAADTAVYYCASLVYCGGDCYSGFDYWGQGTLVTVSSTRIQNPDPAVYQLRDSKSSDKSVCLFTDFDSQTNVSQSKDSDVYITDKCVLDMRSMDFKSNSAVAWSNKSDFACANAFNNSIIPEDTFFPSPESSCDVKLVEKSFETDTNLNFQNLSVIGFRILLLKVAGFNLLMTLRLWSS

SEQ ID NO: 12702 - protein, 756 aa, Artificial Sequence
  Synthetic Polypeptide
MALPVTALLLPLALLLHAARPEVQLVESGGGLVQPGGSLRLSCAASGFSFSDFWMSWVRQAPGKGLEWVATISQAGSEKDYVDSVKGRFTISRDNAKKSLYLQMNSLRAEDTAVYYCASGVYSFDYRGQGTLVTVSSGTGGGGSGGGGSGGGGSEFDIQMTQSPSSLSASVGDRVTITCKSSQSVLYSSNQKNYLAWFQQKPGKAPKLLIYWASTRESGVPSRFSGSGSGTDFTLTISSLQPEDFATYFCHQYLSSYTFGQGTKVEIKRLEDLKNVFPPEVAVFEPSEAEISHTQKATLVCLATGFYPDHVELSWWVNGKEVHSGVCTDPQPLKEQPALNDSRYCLSSRLRVSATFWQNPRNHFRCQVQFYGLSENDEWTQDRAKPVTQIVSAEAWGRADCGFTSESYQQGVLSATILYEILLGKATLYAVLVSALVLMAMVKRKDSRGRAKRSGSGATNFSLLKQAGDVEENPGPTSMDWIWRILFLVGAATGAHSFEEVQLVESGGGLVQPGGSLRLSCAASGYTFTTYWMHWVRQAPGKGLEWVGYIRPSTGYTEYNQKFKDRFTISADTSKNTAYLQMNSLRAEDTAVYYCARSRWLLDYWGQGTLVTVSTRIQNPDPAVYQLRDSKSSDKSVCLFTDFDSQTNVSQSKDSDVYITDKCVLDMRSMDFKSNSAVAWSNKSDFACANAFNNSIIPEDTFFPSPESSCDVKLVEKSFETDTNLNFQNLSVIGFRILLLKVAGFNLLMTLRLWSS

SEQ ID NO: 12703 - protein, 753 aa, Artificial Sequence
  Synthetic Polypeptide
MALPVTALLLPLALLLHAARPEVQLVESGGGLVQPGGSLRLSCAASGFSFSDFWMSWVRQAPGKGLEWVATISQAGSEKDYVDSVKGRFTISRDNAKKSLYLQMNSLRAEDTAVYYCASGVYSFDYRGQGTLVTVSSGTGGGGSGGGGSGGGGSEFDIQMTQSPSSLSASVGDRVTITCRASQDISNYLNWYQQKPGKAPKLLIYYTSRLHSGVPSRFSGSGSGTDFTLTISSLQPEDFATYYCQQGNTLPYTFGQGTKVEIKRLEDLKNVFPPEVAVFEPSEAEISHTQKATLVCLATGFYPDHVELSWWVNGKEVHSGVCTDPQPLKEQPALNDSRYCLSSRLRVSATFWQNPRNHFRCQVQFYGLSENDEWTQDRAKPVTQIVSAEAWGRADCGFTSESYQQGVLSATILYEILLGKATLYAVLVSALVLMAMVKRKDSRGRAKRSGSGATNFSLLKQAGDVEENPGPTSMDWIWRILFLVGAATGAHSFEEVQLVESGGGLVQPGGSLRLSCAASGFTFSDYFMSWVRQAPGKGLEWVATISNGGTYTYYPDSVKGRFTISRDNSKNTLYLQMNSLRAEDTAVYYCARFDGYIFDYWGQGTLVTVSSTRIQNPDPAVYQLRDSKSSDKSVCLFTDFDSQTNVSQSKDSDVYITDKCVLDMRSMDFKSNSAVAWSNKSDFACANAFNNSIIPEDTFFPSPESSCDVKLVEKSFETDTNLNFQNLSVIGFRILLLKVAGFNLLMTLRLWSS

SEQ ID NO: 12704 - protein, 758 aa, Artificial Sequence
  Synthetic Polypeptide
MALPVTALLLPLALLLHAARPEVQLVESGGGLVQPGGSLRLSCAASGFSFSDFWMSWVRQAPGKGLEWVATISQAGSEKDYVDSVKGRFTISRDNAKKSLYLQMNSLRAEDTAVYYCASGVYSFDYRGQGTLVTVSSGTGGGGSGGGGSGGGGSEFDIQMTQTTSSLSASLGDRVTISCRASQDISKYLNWYQQKPDGTVKLLIYHTSRLHSGVPSRFSGSGSGTDYSLTISNLEQEDIATYFCQQGNTLPYTFGGGTKLEITLEIQNPDPAVYQLRDSKSSDKSVCLFTDFDSQTNVSQSKDSDVYITDKCVLDMRSMDFKSNSAVAWSNKSDFACANAFNNSIIPEDTFFPSPESSCDVKLVEKSFETDTNLNFQNLSVIGFRILLLKVAGFNLLMTLRLWSSRAKRSGSGVKQTLNFDLLKLAGDVESNPGPTSMDWIWRILFLVGAATGAHSFEVKLQESGPGLVAPSQSLSVTCTVSGVSLPDYGVSWIRQPPRKGLEWLGVIWGSETTYYNSALKSRLTIIKDNSKSQVFLKMNSLQTDDTAIYYCAKHYYYGGSYAMDYWGQGTSVTVSSTREDLKNVFPPEVAVFEPSEAEISHTQKATLVCLATGFYPDHVELSWWVNGKEVHSGVCTDPQPLKEQPALNDSRYCLSSRLRVSATFWQNPRNHFRCQVQFYGLSENDEWTQDRAKPVTQIVSAEAWGRADCGFTSESYQQGVLSATILYEILLGKATLYAVLVSALVLMAMVKRKDSRG

SEQ ID NO: 12705 - protein, 759 aa, Artificial Sequence
  Synthetic Polypeptide
MALPVTALLLPLALLLHAARPEVQLVESGGGLVQPGGSLRLSCAASGFSFSDFWMSWVRQAPGKGLEWVATISQAGSEKDYVDSVKGRFTISRDNAKKSLYLQMNSLRAEDTAVYYCASGVYSFDYRGQGTLVTVSSGTGGGGSGGGGSGGGGSEFEIVMTQSPATLSLSPGERATLSCRASQDISKYLNWYQQKPGQAPRLLIYHTSRLHSGIPARFSGSGSGTDYTLTISSLQPEDFAVYFCQQGNTLPYTFGQGTKLEIKLEIQNPDPAVYQLRDSKSSDKSVCLFTDFDSQTNVSQSKDSDVYITDKCVLDMRSMDFKSNSAVAWSNKSDFACANAFNNSIIPEDTFFPSPESSCDVKLVEKSFETDTNLNFQNLSVIGFRILLLKVAGFNLLMTLRLWSSRAKRSGSGVKQTLNFDLLKLAGDVESNPGPTSMDWIWRILFLVGAATGAHSFEQVQLQESGPGLVKPSETLSLTCTVSGVSLPDYGVSWIRQPPGKGLEWIGVIWGSETTYYNSSLKSRVTISKDNSKNQVSLKLSSVTAADTAVYYCAKHYYYGGSYAMDYWGQGTLVTVSSTREDLKNVFPPEVAVFEPSEAEISHTQKATLVCLATGFYPDHVELSWWVNGKEVHSGVCTDPQPLKEQPALNDSRYCLSSRLRVSATFWQNPRNHFRCQVQFYGLSENDEWTQDRAKPVTQIVSAEAWGRADCGFTSESYQQGVLSATILYEILLGKATLYAVLVSALVLMAMVKRKDSRG

SEQ ID NO: 12706 - protein, 760 aa, Artificial Sequence
  Synthetic Polypeptide
MALPVTALLLPLALLLHAARPEVQLVESGGGLVQPGGSLRLSCAASGFSFSDFWMSWVRQAPGKGLEWVATISQAGSEKDYVDSVKGRFTISRDNAKKSLYLQMNSLRAEDTAVYYCASGVYSFDYRGQGTLVTVSSGTGGGGSGGGGSGGGGSEFDEIVLTQSPATLSLSPGERATLSCSASSSVSYMHWYQQKPGQAPRLLIYDTSKLASGIPARFSGSGSGTDFTLTISSLEPEDVAVYYCFQGSVYPFTFGQGTKLEIKRLEIQNPDPAVYQLRDSKSSDKSVCLFTDFDSQTNVSQSKDSDVYITDKCVLDMRSMDFKSNSAVAWSNKSDFACANAFNNSIIPEDTFFPSPESSCDVKLVEKSFETDTNLNFQNLSVIGFRILLLKVAGFNLLMTLRLWSSRAKRSGSGVKQTLNFDLLKLAGDVESNPGPTSMDWIWRILFLVGAATGAHSFEQVQLQESGPGLVKPSQTLSLTCTVSGGSISTSGMGVGWIRQHPGKGLEWIGHIWWDDDKRYNPALKSRVTISVDTSKNQFSLKLSSVTAADTAVYYCARMELWSYYFDYWGQGTLVTVSSTREDLKNVFPPEVAVFEPSEAEISHTQKATLVCLATGFYPDHVELSWWVNGKEVHSGVCTDPQPLKEQPALNDSRYCLSSRLRVSATFWQNPRNHFRCQVQFYGLSENDEWTQDRAKPVTQIVSAEAWGRADCGFTSESYQQGVLSATILYEILLGKATLYAVLVSALVLMAMVKRKDSRG

SEQ ID NO: 12707 - protein, 758 aa, Artificial Sequence
  Synthetic Polypeptide
MALPVTALLLPLALLLHAARPEVQLVESGGGLVQPGGSLRLSCAASGFSFSDFWMSWVRQAPGKGLEWVATISQAGSEKDYVDSVKGRFTISRDNAKKSLYLQMNSLRAEDTAVYYCASGVYSFDYRGQGTLVTVSSGTGGGGSGGGGSGGGGSEFDYIHVTQSPSSLSVSIGDRVTINCQTSQGVGSDLHWYQHKPGRAPKLLIHHASSVEDGVPSRFSGTGFHTSFNLTINDLQADDIGTYYCQVLQSFGRGSRLDTKLEIQNPDPAVYQLRDSKSSDKSVCLFTDFDSQTNVSQSKDSDVYITDKCVLDMRSMDFKSNSAVAWSNKSDFACANAFNNSIIPEDTFFPSPESSCDVKLVEKSFETDTNLNFQNLSVIGFRILLLKVAGFNLLMTLRLWSSRAKRSGSGVKQTLNFDLLKLAGDVESNPGPTSMDWIWRILFLVGAATGAHSFERAHLVQSGTAMKKPGASVRVSCQTSGYTFTAHILFWFRQAPGRGLEWVGWIKPQYGAVNFGGGFRDRVTLTRDVYREIAYMDIRGLKPDDTAVYYCARDRSYGDSSWALDAWGQGTTVVVSATREDLKNVFPPEVAVFEPSEAEISHTQKATLVCLATGFYPDHVELSWWVNGKEVHSGVCTDPQPLKEQPALNDSRYCLSSRLRVSATFWQNPRNHFRCQVQFYGLSENDEWTQDRAKPVTQIVSAEAWGRADCGFTSESYQQGVLSATILYEILLGKATLYAVLVSALVLMAMVKRKDSRG

SEQ ID NO: 12708 - protein, 768 aa, Artificial Sequence
  Synthetic Polypeptide
MALPVTALLLPLALLLHAARPEVQLVESGGGLVQPGGSLRLSCAASGFSFSDFWMSWVRQAPGKGLEWVATISQAGSEKDYVDSVKGRFTISRDNAKKSLYLQMNSLRAEDTAVYYCASGVYSFDYRGQGTLVTVSSGTGGGGSGGGGSGGGGSEFDVQMIQTPDSLAVSLGQRATISCRASESVDNYGISFMHWYQQKPGQSPKLLIYRASNLESGIPARFSGSGSRTDFTLTINPVETDDVATYYCQQNNKDPPTFGGGTKLEIKLEIQNPDPAVYQLRDSKSSDKSVCLFTDFDSQTNVSQSKDSDVYITDKCVLDMRSMDFKSNSAVAWSNKSDFACANAFNNSIIPEDTFFPSPESSCDVKLVEKSFETDTNLNFQNLSVIGFRILLLKVAGFNLLMTLRLWSSRAKRSGSGVKQTLNFDLLKLAGDVESNPGPTSMDWIWRILFLVGAATGAHSFEGGGGSQVQLQQSGAELVKPGASVKISCKASGYAFSSYWMNWVKQRPGKGLEWIGQIYPGDGDTTYNGKFKGKATLTADKSSSTVYMQLNSLTSEDSAVYFCVRYYYGSSGYFDYWGQGTTLTVSSTREDLKNVFPPEVAVFEPSEAEISHTQKATLVCLATGFYPDHVELSWWVNGKEVHSGVCTDPQPLKEQPALNDSRYCLSSRLRVSATFWQNPRNHFRCQVQFYGLSENDEWTQDRAKPVTQIVSAEAWGRADCGFTSESYQQGVLSATILYEILLGKATLYAVLVSALVLMAMVKRKDSRG

SEQ ID NO: 12709 - protein, 759 aa, Artificial Sequence
  Synthetic Polypeptide
MALPVTALLLPLALLLHAARPEVQLVESGGGLVQPGGSLRLSCAASGFSFSDFWMSWVRQAPGKGLEWVATISQAGSEKDYVDSVKGRFTISRDNAKKSLYLQMNSLRAEDTAVYYCASGVYSFDYRGQGTLVTVSSGTGGGGSGGGGSGGGGSEFDVQMIQTPSSLSASLGDRVTISCRASQDIGNYLNWYQQKPDGTVKLLIYYTSRLHSGVPSRFSGSGSGTEYSLTISNLEQEDIATYFCQQGSALPPTFGGGTKLEINLEIQNPDPAVYQLRDSKSSDKSVCLFTDFDSQTNVSQSKDSDVYITDKCVLDMRSMDFKSNSAVAWSNKSDFACANAFNNSIIPEDTFFPSPESSCDVKLVEKSFETDTNLNFQNLSVIGFRILLLKVAGFNLLMTLRLWSSRAKRSGSGVKQTLNFDLLKLAGDVESNPGPTSMDWIWRILFLVGAATGAHSFEALQLQQSGAELVRPGASVTLSCKASGYTFTDYEMHWVKQTPVHGLEWIGAIDPETGGTAYNQKFEGKAILTADKSSSTAYMELRSLTSEDSPVYYCARRRYYGSSSFDYWGQGTTLTVSSTREDLKNVFPPEVAVFEPSEAEISHTQKATLVCLATGFYPDHVELSWWVNGKEVHSGVCTDPQPLKEQPALNDSRYCLSSRLRVSATFWQNPRNHFRCQVQFYGLSENDEWTQDRAKPVTQIVSAEAWGRADCGFTSESYQQGVLSATILYEILLGKATLYAVLVSALVLMAMVKRKDSRG

SEQ ID NO: 12710 - protein, 763 aa, Artificial Sequence
  Synthetic Polypeptide
MALPVTALLLPLALLLHAARPEVQLVESGGGLVQPGGSLRLSCAASGFSFSDFWMSWVRQAPGKGLEWVATISQAGSEKDYVDSVKGRFTISRDNAKKSLYLQMNSLRAEDTAVYYCASGVYSFDYRGQGTLVTVSSGTGGGGSGGGGSGGGGSEFDIVLTQSPASLAVSLGQRATISCRASKSVSTSGYSYLHWYQQKPGQPPKLLIYLASNLESGVPARFSGSGSGTDFTLNIHPVEEEDAATYYCQHSRELPFTFGSGTKLEIKLEIQNPDPAVYQLRDSKSSDKSVCLFTDFDSQTNVSQSKDSDVYITDKCVLDMRSMDFKSNSAVAWSNKSDFACANAFNNSIIPEDTFFPSPESSCDVKLVEKSFETDTNLNFQNLSVIGFRILLLKVAGFNLLMTLRLWSSRAKRSGSGVKQTLNFDLLKLAGDVESNPGPTSMDWIWRILFLVGAATGAHSFEQVQLVESGGGLVQPGGSLKLSCAASGFDFSRYWMSWVRQAPGKGLEWIGEINPTSSTINFTPSLKDKVFISRDNAKNTLYLQMSKVRSEDTALYYCARGNYYRYGDAMDYWGQGTSVTVSTREDLKNVFPPEVAVFEPSEAEISHTQKATLVCLATGFYPDHVELSWWVNGKEVHSGVCTDPQPLKEQPALNDSRYCLSSRLRVSATFWQNPRNHFRCQVQFYGLSENDEWTQDRAKPVTQIVSAEAWGRADCGFTSESYQQGVLSATILYEILLGKATLYAVLVSALVLMAMVKRKDSRG

SEQ ID NO: 12711 - protein, 761 aa, Artificial Sequence
  Synthetic Polypeptide
MALPVTALLLPLALLLHAARPEVQLVESGGGLVQPGGSLRLSCAASGFSFSDFWMSWVRQAPGKGLEWVATISQAGSEKDYVDSVKGRFTISRDNAKKSLYLQMNSLRAEDTAVYYCASGVYSFDYRGQGTLVTVSSGTGGGGSGGGGSGGGGSEFDIQMTQSPSSLSASVGDRVTITCSASQDISNYLNWYQQKPGKAPKLLIYYTSNLHSGVPSRFSGSGSGTDFTLTISSLQPEDFATYYCQQYRKLPWTFGQGTKLEIKRLEIQNPDPAVYQLRDSKSSDKSVCLFTDFDSQTNVSQSKDSDVYITDKCVLDMRSMDFKSNSAVAWSNKSDFACANAFNNSIIPEDTFFPSPESSCDVKLVEKSFETDTNLNFQNLSVIGFRILLLKVAGFNLLMTLRLWSSRAKRSGSGVKQTLNFDLLKLAGDVESNPGPTSMDWIWRILFLVGAATGAHSFEQVQLVQSGAEVKKPGSSVKVSCKASGGTFSNYWMHWVRQAPGQGLEWMGATYRGHSDTYYNQKFKGRVTITADKSTSTAYMELSSLRSEDTAVYYCARGAIYDGYDVLDNWGQGTLVTVSSTREDLKNVFPPEVAVFEPSEAEISHTQKATLVCLATGFYPDHVELSWWVNGKEVHSGVCTDPQPLKEQPALNDSRYCLSSRLRVSATFWQNPRNHFRCQVQFYGLSENDEWTQDRAKPVTQIVSAEAWGRADCGFTSESYQQGVLSATILYEILLGKATLYAVLVSALVLMAMVKRKDSRG

SEQ ID NO: 12712 - protein, 761 aa, Artificial Sequence
  Synthetic Polypeptide
MALPVTALLLPLALLLHAARPEVQLVESGGGLVQPGGSLRLSCAASGFSFSDFWMSWVRQAPGKGLEWVATISQAGSEKDYVDSVKGRFTISRDNAKKSLYLQMNSLRAEDTAVYYCASGVYSFDYRGQGTLVTVSSGTGGGGSGGGGSGGGGSEFDIVLTQSPATLSLSPGDRATISCRASESVTILGSHLIYWYQQKPGQPPRLLIQLASNVQTGVPARFSGSGSRTDFTLTISSVEPEDFAVYYCLQSRTIPRTFGQGTKLEIKRLEIQNPDPAVYQLRDSKSSDKSVCLFTDFDSQTNVSQSKDSDVYITDKCVLDMRSMDFKSNSAVAWSNKSDFACANAFNNSIIPEDTFFPSPESSCDVKLVEKSFETDTNLNFQNLSVIGFRILLLKVAGFNLLMTLRLWSSRAKRSGSGVKQTLNFDLLKLAGDVESNPGPTSMDWIWRILFLVGAATGAHSFEQVQLVQSGPEVKKPGESVKISCKASGYTFRHYSMNWVKQAPGQGLKWMGRINTESGVPIYADDFKGRFSFTVDTSASTAYLEISSLTSEDTAVYFCSNDYLYSLDFWGQGTTLTVSSTREDLKNVFPPEVAVFEPSEAEISHTQKATLVCLATGFYPDHVELSWWVNGKEVHSGVCTDPQPLKEQPALNDSRYCLSSRLRVSATFWQNPRNHFRCQVQFYGLSENDEWTQDRAKPVTQIVSAEAWGRADCGFTSESYQQGVLSATILYEILLGKATLYAVLVSALVLMAMVKRKDSRG

SEQ ID NO: 12713 - protein, 762 aa, Artificial Sequence
  Synthetic Polypeptide
MALPVTALLLPLALLLHAARPEVQLVESGGGLVQPGGSLRLSCAASGFSFSDFWMSWVRQAPGKGLEWVATISQAGSEKDYVDSVKGRFTISRDNAKKSLYLQMNSLRAEDTAVYYCASGVYSFDYRGQGTLVTVSSGTGGGGSGGGGSGGGGSEFQSVLTQPPSVSGAPGQRVTISCTGSSSNIGAGFDVHWYQQLPGTAPKLLIYGNSNRPSGVPDRFSGSKSGTSASLAITGLQAEDEADYYCQSYDSSLSGYVFGTGTKVTVLGLEIQNPDPAVYQLRDSKSSDKSVCLFTDFDSQTNVSQSKDSDVYITDKCVLDMRSMDFKSNSAVAWSNKSDFACANAFNNSIIPEDTFFPSPESSCDVKLVEKSFETDTNLNFQNLSVIGFRILLLKVAGFNLLMTLRLWSSRAKRSGSGVKQTLNFDLLKLAGDVESNPGPTSMDWIWRILFLVGAATGAHSFEQVQLVQSGAEVKKPGASVKVSCKASGYTFTDYYMHWVRQAPGQRLEWMGWINPNSGGTNYAQKFQDRITVTRDTSSNTGYMELTRLRSDDTAVYYCARSPYSGVLDKWGQGTLVTVSSTREDLKNVFPPEVAVFEPSEAEISHTQKATLVCLATGFYPDHVELSWWVNGKEVHSGVCTDPQPLKEQPALNDSRYCLSSRLRVSATFWQNPRNHFRCQVQFYGLSENDEWTQDRAKPVTQIVSAEAWGRADCGFTSESYQQGVLSATILYEILLGKATLYAVLVSALVLMAMVKRKDSRG

SEQ ID NO: 12714 - protein, 759 aa, Artificial Sequence
  Synthetic Polypeptide
MALPVTALLLPLALLLHAARPEVQLVESGGGLVQPGGSLRLSCAASGFSFSDFWMSWVRQAPGKGLEWVATISQAGSEKDYVDSVKGRFTISRDNAKKSLYLQMNSLRAEDTAVYYCASGVYSFDYRGQGTLVTVSSGTGGGGSGGGGSGGGGSEFQAVLTQPPSASGTPGQRVTISCSGSSSNIGSYTVSWYQQLPGTAPKFLIYSNNQRPSGVPDRFSGSKSGTSASLAISGLQSEDEADYYCAAWDDSLNGYVFGTGTKVTVLGLEIQNPDPAVYQLRDSKSSDKSVCLFTDFDSQTNVSQSKDSDVYITDKCVLDMRSMDFKSNSAVAWSNKSDFACANAFNNSIIPEDTFFPSPESSCDVKLVEKSFETDTNLNFQNLSVIGFRILLLKVAGFNLLMTLRLWSSRAKRSGSGVKQTLNFDLLKLAGDVESNPGPTSMDWIWRILFLVGAATGAHSFEVQLVQSGAEVKKPGESLKISCKGSGYDFTTYWIGWVRQMPGKGLEWMGIIYPGDSDTRYSPSVRGRVTISADKSINTAYLQWSSLEASDTAMYYCARMWTFSQDGWGQGTLVTVSSTREDLKNVFPPEVAVFEPSEAEISHTQKATLVCLATGFYPDHVELSWWVNGKEVHSGVCTDPQPLKEQPALNDSRYCLSSRLRVSATFWQNPRNHFRCQVQFYGLSENDEWTQDRAKPVTQIVSAEAWGRADCGFTSESYQQGVLSATILYEILLGKATLYAVLVSALVLMAMVKRKDSRG

SEQ ID NO: 12715 - protein, 762 aa, Artificial Sequence
  Synthetic Polypeptide
MALPVTALLLPLALLLHAARPEVQLVESGGGLVQPGGSLRLSCAASGFSFSDFWMSWVRQAPGKGLEWVATISQAGSEKDYVDSVKGRFTISRDNAKKSLYLQMNSLRAEDTAVYYCASGVYSFDYRGQGTLVTVSSGTGGGGSGGGGSGGGGSEFDIVMTQSPDSLAVSLGERATINCKSSQSILYSSNQKNYLAWYQQKPGQSPKLLIYWASTRESGVPDRFSGSGSGTDFTLTISSLQAEDVAVYYCHQYISSYTFGQGTKLEIKLEIQNPDPAVYQLRDSKSSDKSVCLFTDFDSQTNVSQSKDSDVYITDKCVLDMRSMDFKSNSAVAWSNKSDFACANAFNNSIIPEDTFFPSPESSCDVKLVEKSFETDTNLNFQNLSVIGFRILLLKVAGFNLLMTLRLWSSRAKRSGSGVKQTLNFDLLKLAGDVESNPGPTSMDWIWRILFLVGAATGAHSFEQVQLVQSGAEVKKPGASVKVSCKASGYTFASQWMHWMRQAPGQGLEWIGWINPGNVNTKYNEKFKGRATLTVDTSTNTAYMELSSLRSEDTAVYYCARSTWYRPLDYWGQGTLVTVSSTREDLKNVFPPEVAVFEPSEAEISHTQKATLVCLATGFYPDHVELSWWVNGKEVHSGVCTDPQPLKEQPALNDSRYCLSSRLRVSATFWQNPRNHFRCQVQFYGLSENDEWTQDRAKPVTQIVSAEAWGRADCGFTSESYQQGVLSATILYEILLGKATLYAVLVSALVLMAMVKRKDSRG

SEQ ID NO: 12716 - protein, 762 aa, Artificial Sequence
  Synthetic Polypeptide
MALPVTALLLPLALLLHAARPEVQLVESGGGLVQPGGSLRLSCAASGFSFSDFWMSWVRQAPGKGLEWVATISQAGSEKDYVDSVKGRFTISRDNAKKSLYLQMNSLRAEDTAVYYCASGVYSFDYRGQGTLVTVSSGTGGGGSGGGGSGGGGSEFDHIVLTQSPSSLSASLGDRVTISCRASQDISTYLNWYQQKPDGTVKLLIFYTSRLHAGVPSRFSGSGSGTHHSLTISNLEQEDIATYFCQQGNSLPFTFGSGTKLEIKRLEIQNPDPAVYQLRDSKSSDKSVCLFTDFDSQTNVSQSKDSDVYITDKCVLDMRSMDFKSNSAVAWSNKSDFACANAFNNSIIPEDTFFPSPESSCDVKLVEKSFETDTNLNFQNLSVIGFRILLLKVAGFNLLMTLRLWSSRAKRSGSGVKQTLNFDLLKLAGDVESNPGPTSMDWIWRILFLVGAATGAHSFEQVQLKESGPELEKPGASVKISCKASGYSFTAYSMNWVKQNNGMSLEWIGSIDPYYGDTKYAQKFKGKATLTVDKASSTAYLQLKSLTSEDSAVYYCARRMITTGDWYFDVWGAGTTVTVSSTREDLKNVFPPEVAVFEPSEAEISHTQKATLVCLATGFYPDHVELSWWVNGKEVHSGVCTDPQPLKEQPALNDSRYCLSSRLRVSATFWQNPRNHFRCQVQFYGLSENDEWTQDRAKPVTQIVSAEAWGRADCGFTSESYQQGVLSATILYEILLGKATLYAVLVSALVLMAMVKRKDSRG

SEQ ID NO: 12717 - protein, 762 aa, Artificial Sequence; identical to SEQ ID NO: 12716
  Synthetic Polypeptide

SEQ ID NO: 12718 - protein, 762 aa, Artificial Sequence
  Synthetic Polypeptide
MALPVTALLLPLALLLHAARPEVQLVESGGGLVQPGGSLRLSCAASGFSFSDFWMSWVRQAPGKGLEWVATISQAGSEKDYVDSVKGRFTISRDNAKKSLYLQMNSLRAEDTAVYYCASGVYSFDYRGQGTLVTVSSGTGGGGSGGGGSGGGGSEFDEIVLTQSPATLSLSPGERATLSCRASQSVSSYLAWYQQKPGQAPRLLIYDASNRATGIPARFSGSGSGTDFTLTISSLEPEDFAVYYCQQRSNWPITFGQGTRLEIKLEIQNPDPAVYQLRDSKSSDKSVCLFTDFDSQTNVSQSKDSDVYITDKCVLDMRSMDFKSNSAVAWSNKSDFACANAFNNSIIPEDTFFPSPESSCDVKLVEKSFETDTNLNFQNLSVIGFRILLLKVAGFNLLMTLRLWSSRAKRSGSGVKQTLNFDLLKLAGDVESNPGPTSMDWIWRILFLVGAATGAHSFEEVQLVESGGGLVQPGRSLRLSCAASGFTFNDYAMHWVRQAPGKGLEWVSTISWNSGSIGYADSVKGRFTISRDNAKKSLYLQMNSLRAEDTALYYCAKDIQYGNYYYGMDVWGQGTTVTVSSTREDLKNVFPPEVAVFEPSEAEISHTQKATLVCLATGFYPDHVELSWWVNGKEVHSGVCTDPQPLKEQPALNDSRYCLSSRLRVSATFWQNPRNHFRCQVQFYGLSENDEWTQDRAKPVTQIVSAEAWGRADCGFTSESYQQGVLSATILYEILLGKATLYAVLVSALVLMAMVKRKDSRG

SEQ ID NO: 12719 - protein, 764 aa, Artificial Sequence
  Synthetic Polypeptide
MALPVTALLLPLALLLHAARPEVQLVESGGGLVQPGGSLRLSCAASGFSFSDFWMSWVRQAPGKGLEWVATISQAGSEKDYVDSVKGRFTISRDNAKKSLYLQMNSLRAEDTAVYYCASGVYSFDYRGQGTLVTVSSGTGGGGSGGGGSGGGGSEFDIVMTQTPLSLPVTPGEPASISCRSSKSLLHSNGITYLYWYLQKPGQSPQLLIYQMSNLVSGVPDRFSGSGSGTDFTLKISRVEAEDVGVYYCAQNLELPYTFGGGTKVEIKRLEIQNPDPAVYQLRDSKSSDKSVCLFTDFDSQTNVSQSKDSDVYITDKCVLDMRSMDFKSNSAVAWSNKSDFACANAFNNSIIPEDTFFPSPESSCDVKLVEKSFETDTNLNFQNLSVIGFRILLLKVAGFNLLMTLRLWSSRAKRSGSGVKQTLNFDLLKLAGDVESNPGPTSMDWIWRILFLVGAATGAHSFEQVQLVQSGAEVKKPGSSVKVSCKASGYAFSYSWINWVRQAPGQGLEWMGRIFPGDGDTDYNGKFKGRVTITADKSTSTAYMELSSLRSEDTAVYYCARNVFDGYWLVYWGQGTLVTVSSTREDLKNVFPPEVAVFEPSEAEISHTQKATLVCLATGFYPDHVELSWWVNGKEVHSGVCTDPQPLKEQPALNDSRYCLSSRLRVSATFWQNPRNHFRCQVQFYGLSENDEWTQDRAKPVTQIVSAEAWGRADCGFTSESYQQGVLSATILYEILLGKATLYAVLVSALVLMAMVKRKDSRG

SEQ ID NO: 12720 - protein, 765 aa, Artificial Sequence
  Synthetic Polypeptide
MALPVTALLLPLALLLHAARPEVQLVESGGGLVQPGGSLRLSCAASGFSFSDFWMSWVRQAPGKGLEWVATISQAGSEKDYVDSVKGRFTISRDNAKKSLYLQMNSLRAEDTAVYYCASGVYSFDYRGQGTLVTVSSGTGGGGSGGGGSGGGGSEFDIQMTQSPSSLSASVGDRVTITCRSSQSIVHSVGNTFLEWYQQKPGKAPKLLIYKVSNRFSGVPSRFSGSGSGTDFTLTISSLQPEDFATYYCFQGSQFPYTFGQGTKVEIKRLEIQNPDPAVYQLRDSKSSDKSVCLFTDFDSQTNVSQSKDSDVYITDKCVLDMRSMDFKSNSAVAWSNKSDFACANAFNNSIIPEDTFFPSPESSCDVKLVEKSFETDTNLNFQNLSVIGFRILLLKVAGFNLLMTLRLWSSRAKRSGSGVKQTLNFDLLKLAGDVESNPGPTSMDWIWRILFLVGAATGAHSFEEVQLVESGGGLVQPGGSLRLSCAASGYEFSRSWMNWVRQAPGKGLEWVGRIYPGDGDTNYSGKFKGRFTISADTSKNTAYLQMNSLRAEDTAVYYCARDGSSWDWYFDVWGQGTLVTVSSTREDLKNVFPPEVAVFEPSEAEISHTQKATLVCLATGFYPDHVELSWWVNGKEVHSGVCTDPQPLKEQPALNDSRYCLSSRLRVSATFWQNPRNHFRCQVQFYGLSENDEWTQDRAKPVTQIVSAEAWGRADCGFTSESYQQGVLSATILYEILLGKATLYAVLVSALVLMAMVKRKDSRG

SEQ ID NO: 12721 - protein, 763 aa, Artificial Sequence
  Synthetic Polypeptide
MALPVTALLLPLALLLHAARPEVQLVESGGGLVQPGGSLRLSCAASGFSFSDFWMSWVRQAPGKGLEWVATISQAGSEKDYVDSVKGRFTISRDNAKKSLYLQMNSLRAEDTAVYYCASGVYSFDYRGQGTLVTVSSGTGGGGSGGGGSGGGGSEFDIQMTQSPSSLSASVGDRVTITCRASQTIWSYLNWYQQRPGKAPNLLIYAASSLQSGVPSRFSGRGSGTDFTLTISSLQAEDFATYYCQQSYSIPQIFGQGTKLEIKLEIQNPDPAVYQLRDSKSSDKSVCLFTDFDSQTNVSQSKDSDVYITDKCVLDMRSMDFKSNSAVAWSNKSDFACANAFNNSIIPEDTFFPSPESSCDVKLVEKSFETDTNLNFQNLSVIGFRILLLKVAGFNLLMTLRLWSSRAKRSGSGVKQTLNFDLLKLAGDVESNPGPTSMDWIWRILFLVGAATGAHSFEQVQLQQSGPGLVKPSQTLSLTCAISGDSVSSNSAAWNWIRQSPSRGLEWLGRTYYRSKWYNDYAVSVKSRITINPDTSKNQFSLQLNSVTPEDTAVYYCAREVTGDLEDAFDIWGQGTMVTVSSTREDLKNVFPPEVAVFEPSEAEISHTQKATLVCLATGFYPDHVELSWWVNGKEVHSGVCTDPQPLKEQPALNDSRYCLSSRLRVSATFWQNPRNHFRCQVQFYGLSENDEWTQDRAKPVTQIVSAEAWGRADCGFTSESYQQGVLSATILYEILLGKATLYAVLVSALVLMAMVKRKDSRG

SEQ ID NO: 12722 - protein, 756 aa, Artificial Sequence
  Synthetic Polypeptide
MALPVTALLLPLALLLHAARPEVQLVESGGGLVQPGGSLRLSCAASGFSFSDFWMSWVRQAPGKGLEWVATISQAGSEKDYVDSVKGRFTISRDNAKKSLYLQMNSLRAEDTAVYYCASGVYSFDYRGQGTLVTVSSGTGGGGSGGGGSGGGGSEFDIQMTQSPATIENTSLSASVGDRVTITCRASQGISSWLTWYQQKPEKAPKSLIYAASSLQSGVPSRFSGSGSGTDFTLTISSLQPEDFATYYCQQYDSYPITFGQGTRLEIKLEIQNPDPAVYQLRDSKSSDKSVCLFTDFDSQTNVSQSKDSDVYITDKCVLDMRSMDFKSNSAVAWSNKSDFACANAFNNSIIPEDTFFPSPESSCDVKLVEKSFETDTNLNFQNLSVIGFRILLLKVAGFNLLMTLRLWSSRAKRSGSGVKQTLNFDLLKLAGDVESNPGPTSMDWIWRILFLVGAATGAHSFEQVQLQQWGAGLLKPSETLSLTCAVYGGSFSAYYWSWIRQPPGKGLEWIGDINHGGGTNYNPSLKSRVTISVDTSKNQFSLKLNSVTAADTAVYYCASLTAYWGQGSLVTVSSTREDLKNVFPPEVAVFEPSEAEISHTQKATLVCLATGFYPDHVELSWWVNGKEVHSGVCTDPQPLKEQPALNDSRYCLSSRLRVSATFWQNPRNHFRCQVQFYGLSENDEWTQDRAKPVTQIVSAEAWGRADCGFTSESYQQGVLSATILYEILLGKATLYAVLVSALVLMAMVKRKDSRG

SEQ ID NO: 12723 - protein, 761 aa, Artificial Sequence
  Synthetic Polypeptide
MALPVTALLLPLALLLHAARPEVQLVESGGGLVQPGGSLRLSCAASGFSFSDFWMSWVRQAPGKGLEWVATISQAGSEKDYVDSVKGRFTISRDNAKKSLYLQMNSLRAEDTAVYYCASGVYSFDYRGQGTLVTVSSGTGGGGSGGGGSGGGGSEFDEIVLTQSPDSLAVSLGERATINCKASQSVDFDGDSYLNWYQQKPGQPPKVLIYAASTLQSGVPSRFSGSGSGTDFTLTINSLEAEDAATYYCQQSNEDPWTFGGGTKVEIKLEIQNPDPAVYQLRDSKSSDKSVCLFTDFDSQTNVSQSKDSDVYITDKCVLDMRSMDFKSNSAVAWSNKSDFACANAFNNSIIPEDTFFPSPESSCDVKLVEKSFETDTNLNFQNLSVIGFRILLLKVAGFNLLMTLRLWSSRAKRSGSGVKQTLNFDLLKLAGDVESNPGPTSMDWIWRILFLVGAATGAHSFEQVQLVQSGAEVKKPGASVKVSCKVSGYTFTDYYITWVRQAPGQALEWMGWIYPGSGNTKYSQKFQGRFVFSVDTSASTAYLQLSSLKAEDTAVYYCANYGNYWFAYWGQGTLVTVSSTREDLKNVFPPEVAVFEPSEAEISHTQKATLVCLATGFYPDHVELSWWVNGKEVHSGVCTDPQPLKEQPALNDSRYCLSSRLRVSATFWQNPRNHFRCQVQFYGLSENDEWTQDRAKPVTQIVSAEAWGRADCGFTSESYQQGVLSATILYEILLGKATLYAVLVSALVLMAMVKRKDSRG

SEQ ID NO: 12724 - protein, 758 aa, Artificial Sequence
  Synthetic Polypeptide
MALPVTALLLPLALLLHAARPEVQLVESGGGLVQPGGSLRLSCAASGFSFSDFWMSWVRQAPGKGLEWVATISQAGSEKDYVDSVKGRFTISRDNAKKSLYLQMNSLRAEDTAVYYCASGVYSFDYRGQGTLVTVSSGTGGGGSGGGGSGGGGSEFDIQMTQSPSSLSASVGDRVTITCRASQGISSWLAWYQQKPEKAPKSLIYAASSLQSGVPSRFSGSGSGTDFTLTISSLQPEDFATYYCQQYNSYPPTFGGGTKVEIKLEIQNPDPAVYQLRDSKSSDKSVCLFTDFDSQTNVSQSKDSDVYITDKCVLDMRSMDFKSNSAVAWSNKSDFACANAFNNSIIPEDTFFPSPESSCDVKLVEKSFETDTNLNFQNLSVIGFRILLLKVAGFNLLMTLRLWSSRAKRSGSGVKQTLNFDLLKLAGDVESNPGPTSMDWIWRILFLVGAATGAHSFEEVQLVQSGGGLVHPGGSLRLSCAGSGFAFSSSTMHWIRQAPGKGLEWISLIGSGGGIYYGDSVKGRFTISRDNAKNSLYLQMNSLRAEDMAVYYCVRGYFDWVDYFDYWGQGTLVTVSSTREDLKNVFPPEVAVFEPSEAEISHTQKATLVCLATGFYPDHVELSWWVNGKEVHSGVCTDPQPLKEQPALNDSRYCLSSRLRVSATFWQNPRNHFRCQVQFYGLSENDEWTQDRAKPVTQIVSAEAWGRADCGFTSESYQQGVLSATILYEILLGKATLYAVLVSALVLMAMVKRKDSRG

SEQ ID NO: 12725 - protein, 768 aa, Artificial Sequence
  Synthetic Polypeptide
MALPVTALLLPLALLLHAARPEVQLVESGGGLVQPGGSLRLSCAASGFSFSDFWMSWVRQAPGKGLEWVATISQAGSEKDYVDSVKGRFTISRDNAKKSLYLQMNSLRAEDTAVYYCASGVYSFDYRGQGTLVTVSSGTGGGGSGGGGSGGGGSEFDDIVMTQSPDSLTVSLGERTTINCKSSQSVLDSSKNKNSLAWYQQKPGQPPKLLLSWASTRESGIPDRFSGSGSGTDFTLTIDSLQPEDSATYYCQQSAHFPITFGQGTRLEIKLEIQNPDPAVYQLRDSKSSDKSVCLFTDFDSQTNVSQSKDSDVYITDKCVLDMRSMDFKSNSAVAWSNKSDFACANAFNNSIIPEDTFFPSPESSCDVKLVEKSFETDTNLNFQNLSVIGFRILLLKVAGFNLLMTLRLWSSRAKRSGSGVKQTLNFDLLKLAGDVESNPGPTSMDWIWRILFLVGAATGAHSFEQVQLVQSGAEVKKPGASVKVSCKASGYTFTNYGMNWVKQAPGQGLKWMGWINTYTGEPTYADDFKGRVTMTSDTSTSTAYLELHNLRSDDTAVYYCARWSWSDGYYVYFDYWGQGTTVTVSSTREDLKNVFPPEVAVFEPSEAEISHTQKATLVCLATGFYPDHVELSWWVNGKEVHSGVCTDPQPLKEQPALNDSRYCLSSRLRVSATFWQNPRNHFRCQVQFYGLSENDEWTQDRAKPVTQIVSAEAWGRADCGFTSESYQQGVLSATILYEILLGKATLYAVLVSALVLMAMVKRKDSRG

SEQ ID NO: 12726 - protein, 764 aa, Artificial Sequence
  Synthetic Polypeptide
MALPVTALLLPLALLLHAARPEVQLVESGGGLVQPGGSLRLSCAASGFSFSDFWMSWVRQAPGKGLEWVATISQAGSEKDYVDSVKGRFTISRDNAKKSLYLQMNSLRAEDTAVYYCASGVYSFDYRGQGTLVTVSSGTGGGGSGGGGSGGGGSEFDEIVLTQSPGSLAVSPGERVTMSCKSSQSVFFSSSQKNYLAWYQQIPGQSPRLLIYWASTRESGVPDRFTGSGSGTDFTLTISSVQPEDLAIYYCHQYLSSRTFGQGTKLEIKRLEIQNPDPAVYQLRDSKSSDKSVCLFTDFDSQTNVSQSKDSDVYITDKCVLDMRSMDFKSNSAVAWSNKSDFACANAFNNSIIPEDTFFPSPESSCDVKLVEKSFETDTNLNFQNLSVIGFRILLLKVAGFNLLMTLRLWSSRAKRSGSGVKQTLNFDLLKLAGDVESNPGPTSMDWIWRILFLVGAATGAHSFEQVQLQQPGAEVVKPGASVKMSCKASGYTFTSYYIHWIKQTPGQGLEWVGVIYPGNDDISYNQKFQGKATLTADKSSTTAYMQLSSLTSEDSAVYYCAREVRLRYFDVWGQGTTVTVSSTREDLKNVFPPEVAVFEPSEAEISHTQKATLVCLATGFYPDHVELSWWVNGKEVHSGVCTDPQPLKEQPALNDSRYCLSSRLRVSATFWQNPRNHFRCQVQFYGLSENDEWTQDRAKPVTQIVSAEAWGRADCGFTSESYQQGVLSATILYEILLGKATLYAVLVSALVLMAMVKRKDSRG

SEQ ID NO: 12727 - protein, 768 aa, Artificial Sequence
  Synthetic Polypeptide
MALPVTALLLPLALLLHAARPEVQLVESGGGLVQPGGSLRLSCAASGFSFSDFWMSWVRQAPGKGLEWVATISQAGSEKDYVDSVKGRFTISRDNAKKSLYLQMNSLRAEDTAVYYCASGVYSFDYRGQGTLVTVSSGTGGGGSGGGGSGGGGSEFDVLLTQSPLSLPVTLGQPASISCRSSQTIVHSNGNTYLEWFQQRPGQSPRLLIYQVSNRFSGVPDRFSGSGSGTDFTLKISRVEAEDVGVYYCFQGSHVPRTFGGGTKVEIKRALEIQNPDPAVYQLRDSKSSDKSVCLFTDFDSQTNVSQSKDSDVYITDKCVLDMRSMDFKSNSAVAWSNKSDFACANAFNNSIIPEDTFFPSPESSCDVKLVEKSFETDTNLNFQNLSVIGFRILLLKVAGFNLLMTLRLWSSRAKRSGSGVKQTLNFDLLKLAGDVESNPGPTSMDWIWRILFLVGAATGAHSFEQIQLVQSGSELKKPGASVKVSCKASGYTFTNYGMNWVRQAPGQGLKWMGWINTNTGEPKYAEEFKGRFALSLDTSVSTAYLQINSLKAEDTAVYFCARGYGNYARGAWLAYWGQGTLVTVSSTREDLKNVFPPEVAVFEPSEAEISHTQKATLVCLATGFYPDHVELSWWVNGKEVHSGVCTDPQPLKEQPALNDSRYCLSSRLRVSATFWQNPRNHFRCQVQFYGLSENDEWTQDRAKPVTQIVSAEAWGRADCGFTSESYQQGVLSATILYEILLGKATLYAVLVSALVLMAMVKRKDSRG

SEQ ID NO: 12728 - protein, 753 aa, Artificial Sequence
  Synthetic Polypeptide
MALPVTALLLPLALLLHAARPEVQLVESGGGLVQPGGSLRLSCAASGFSFSDFWMSWVRQAPGKGLEWVATISQAGSEKDYVDSVKGRFTISRDNAKKSLYLQMNSLRAEDTAVYYCASGVYSFDYRGQGTLVTVSSGTGGGGSGGGGSGGGGSEFDEIVLTQSPATLSLSPGERATLSCSASSSINYIYWLQQKPGQAPRILIYLTSNLASGVPARFSGSGSGTDFTLTISSLEPEDFAVYYCLQWSSNPLTFGGGTKVEIKLEIQNPDPAVYQLRDSKSSDKSVCLFTDFDSQTNVSQSKDSDVYITDKCVLDMRSMDFKSNSAVAWSNKSDFACANAFNNSIIPEDTFFPSPESSCDVKLVEKSFETDTNLNFQNLSVIGFRILLLKVAGFNLLMTLRLWSSRAKRSGSGVKQTLNFDLLKLAGDVESNPGPTSMDWIWRILFLVGAATGAHSFEEVQLVESGGGLVKPGGSLRLSCAASGFTFSSYDMSWVRQAPGKGLEWVSTISSGGSYTYYLDSIKGRFTISRDNAKNSLYLQMNSLRAEDTAVYYCARQGLDYWGRGTLVTVSSTREDLKNVFPPEVAVFEPSEAEISHTQKATLVCLATGFYPDHVELSWWVNGKEVHSGVCTDPQPLKEQPALNDSRYCLSSRLRVSATFWQNPRNHFRCQVQFYGLSENDEWTQDRAKPVTQIVSAEAWGRADCGFTSESYQQGVLSATILYEILLGKATLYAVLVSALVLMAMVKRKDSRG

SEQ ID NO: 12729 - protein, 762 aa, Artificial Sequence
  Synthetic Polypeptide
MALPVTALLLPLALLLHAARPEVQLVESGGGLVQPGGSLRLSCAASGFSFSDFWMSWVRQAPGKGLEWVATISQAGSEKDYVDSVKGRFTISRDNAKKSLYLQMNSLRAEDTAVYYCASGVYSFDYRGQGTLVTVSSGTGGGGSGGGGSGGGGSEFDIVMTQSPDSLAVSLGERATINCRASKSVSTSGYSFMHWYQQKPGQPPKLLIYLASNLESGVPDRFSGSGSGTDFTLTISSLQAEDVAVYYCQHSREVPWTFGQGTKVEIKRLEIQNPDPAVYQLRDSKSSDKSVCLFTDFDSQTNVSQSKDSDVYITDKCVLDMRSMDFKSNSAVAWSNKSDFACANAFNNSIIPEDTFFPSPESSCDVKLVEKSFETDTNLNFQNLSVIGFRILLLKVAGFNLLMTLRLWSSRAKRSGSGVKQTLNFDLLKLAGDVESNPGPTSMDWIWRILFLVGAATGAHSFEQVQLVQSGAEVKKPGASVKVSCKASGYTFTNYGMNWVRQAPGQGLEWMGWINTYTGEPTYADAFKGRFAFSLDTSTSTAYLQINSLRSDDTAVYYCARDYGDYGMDYWGQGTTVTVSSTREDLKNVFPPEVAVFEPSEAEISHTQKATLVCLATGFYPDHVELSWWVNGKEVHSGVCTDPQPLKEQPALNDSRYCLSSRLRVSATFWQNPRNHFRCQVQFYGLSENDEWTQDRAKPVTQIVSAEAWGRADCGFTSESYQQGVLSATILYEILLGKATLYAVLVSALVLMAMVKRKDSRG

SEQ ID NO: 12730 - protein, 758 aa, Artificial Sequence
  Synthetic Polypeptide
MALPVTALLLPLALLLHAARPEVQLVESGGGLVQPGGSLRLSCAASGFSFSDFWMSWVRQAPGKGLEWVATISQAGSEKDYVDSVKGRFTISRDNAKKSLYLQMNSLRAEDTAVYYCASGVYSFDYRGQGTLVTVSSGTGGGGSGGGGSGGGGSEFDIVMTQTPLTLSVTIGQPASISCKSSQSLLDSDGKTYLNWLLQRPGQSPERLIYLVSKLDSGVPDRFTGSGSGTDFTLKISRVEAEDLGVYCCWQGTHFPYTFGGGTKVEIKGLEIQNPDPAVYQLRDSKSSDKSVCLFTDFDSQTNVSQSKDSDVYITDKCVLDMRSMDFKSNSAVAWSNKSDFACANAFNNSIIPEDTFFPSPESSCDVKLVEKSFETDTNLNFQNLSVIGFRILLLKVAGFNLLMTLRLWSSRAKRSGSGVKQTLNFDLLKLAGDVESNPGPTSMDWIWRILFLVGAATGAHSFEQVQLQQPGAELVRPGASVKLSCKASGYTFTSYWMNWVKQRPGQGLEWIGMIDPSDSETHYNHIFKDKATLTVDKSSSTAYLQLSSLTSEDSAVYYCARNLYLWGQGTSVTVSSTREDLKNVFPPEVAVFEPSEAEISHTQKATLVCLATGFYPDHVELSWWVNGKEVHSGVCTDPQPLKEQPALNDSRYCLSSRLRVSATFWQNPRNHFRCQVQFYGLSENDEWTQDRAKPVTQIVSAEAWGRADCGFTSESYQQGVLSATILYEILLGKATLYAVLVSALVLMAMVKRKDSRG

SEQ ID NO: 12731 - protein, 766 aa, Artificial Sequence
  Synthetic Polypeptide
MALPVTALLLPLALLLHAARPEVQLVESGGGLVQPGGSLRLSCAASGFSFSDFWMSWVRQAPGKGLEWVATISQAGSEKDYVDSVKGRFTISRDNAKKSLYLQMNSLRAEDTAVYYCASGVYSFDYRGQGTLVTVSSGTGGGGSGGGGSGGGGSEFDIVMTQSPDSLAVSLGERATINCESSQSLLNSGNQKNYLTWYQQKPGQPPKPLIYWASTRESGVPDRFSGSGSGTDFTLTISSLQAEDVAVYYCQNDYSYPYTFGQGTKLEIKRLEIQNPDPAVYQLRDSKSSDKSVCLFTDFDSQTNVSQSKDSDVYITDKCVLDMRSMDFKSNSAVAWSNKSDFACANAFNNSIIPEDTFFPSPESSCDVKLVEKSFETDTNLNFQNLSVIGFRILLLKVAGFNLLMTLRLWSSRAKRSGSGVKQTLNFDLLKLAGDVESNPGPTSMDWIWRILFLVGAATGAHSFEEVQLVQSGAEVKKPGESLKISCKGSGYSFTDYYMKWARQMPGKGLEWMGDIIPSNGATFYNQKFKGQVTISADKSISTTYLQWSSLKASDTAMYYCARSHLLRASWFAYWGQGTMVTVSSTREDLKNVFPPEVAVFEPSEAEISHTQKATLVCLATGFYPDHVELSWWVNGKEVHSGVCTDPQPLKEQPALNDSRYCLSSRLRVSATFWQNPRNHFRCQVQFYGLSENDEWTQDRAKPVTQIVSAEAWGRADCGFTSESYQQGVLSATILYEILLGKATLYAVLVSALVLMAMVKRKDSRG

SEQ ID NO: 12732 - protein, 761 aa, Artificial Sequence
  Synthetic Polypeptide
MALPVTALLLPLALLLHAARPEVQLVESGGGLVQPGGSLRLSCAASGFSFSDFWMSWVRQAPGKGLEWVATISQAGSEKDYVDSVKGRFTISRDNAKKSLYLQMNSLRAEDTAVYYCASGVYSFDYRGQGTLVTVSSGTGGGGSGGGGSGGGGSEFDIQMTQSTSSLSASLGDRVTISCSASQGINNYLNWYQQKPDGTVELLIYYTSTLQSGVPSRFSGSGSGTDYSLTISNLEPEDIGTYYCQQYSKLPRTFGGGTKLEIKLEIQNPDPAVYQLRDSKSSDKSVCLFTDFDSQTNVSQSKDSDVYITDKCVLDMRSMDFKSNSAVAWSNKSDFACANAFNNSIIPEDTFFPSPESSCDVKLVEKSFETDTNLNFQNLSVIGFRILLLKVAGFNLLMTLRLWSSRAKRSGSGVKQTLNFDLLKLAGDVESNPGPTSMDWIWRILFLVGAATGAHSFEQVQLQQSGSELMMPGASVKISCKATGYTFSNYWIEWVKQRPGHGLEWIGEILPGTGRTIYNEKFKGKATFTADISSNTVQMQLSSLTSEDSAVYYCARRDYYGNFYYAMDYWGQGTSVTVSSTREDLKNVFPPEVAVFEPSEAEISHTQKATLVCLATGFYPDHVELSWWVNGKEVHSGVCTDPQPLKEQPALNDSRYCLSSRLRVSATFWQNPRNHFRCQVQFYGLSENDEWTQDRAKPVTQIVSAEAWGRADCGFTSESYQQGVLSATILYEILLGKATLYAVLVSALVLMAMVKRKDSRG

SEQ ID NO: 12733 - protein, 756 aa, Artificial Sequence
  Synthetic Polypeptide
MALPVTALLLPLALLLHAARPEVQLVESGGGLVQPGGSLRLSCAASGFSFSDFWMSWVRQAPGKGLEWVATISQAGSEKDYVDSVKGRFTISRDNAKKSLYLQMNSLRAEDTAVYYCASGVYSFDYRGQGTLVTVSSGTGGGGSGGGGSGGGGSEFDIQMTQSPASLSVSVGETVTITCRASENIYSNLAWYQQKQGKSPQLLVYAATNLADGVPSRFSGSGSGTQYSLKINSLQSEDFGSYYCQHFWGTWTFGGGTTLEIKLEIQNPDPAVYQLRDSKSSDKSVCLFTDFDSQTNVSQSKDSDVYITDKCVLDMRSMDFKSNSAVAWSNKSDFACANAFNNSIIPEDTFFPSPESSCDVKLVEKSFETDTNLNFQNLSVIGFRILLLKVAGFNLLMTLRLWSSRAKRSGSGVKQTLNFDLLKLAGDVESNPGPTSMDWIWRILFLVGAATGAHSFEEVQLQQSGPELVKPGASVKMSCKASGYTFTDYYMKWMKQSHGKSLEWIGDINPNNGGTTYNQKFKGKATLTVDKSSSTAYMQLNSLTSEDSAVYYCARDYGYGYFDYWGQGTTLTVSSTREDLKNVFPPEVAVFEPSEAEISHTQKATLVCLATGFYPDHVELSWWVNGKEVHSGVCTDPQPLKEQPALNDSRYCLSSRLRVSATFWQNPRNHFRCQVQFYGLSENDEWTQDRAKPVTQIVSAEAWGRADCGFTSESYQQGVLSATILYEILLGKATLYAVLVSALVLMAMVKRKDSRG

SEQ ID NO: 12734 - protein, 759 aa, Artificial Sequence
  Synthetic Polypeptide
MALPVTALLLPLALLLHAARPEVQLVESGGGLVQPGGSLRLSCAASGFSFSDFWMSWVRQAPGKGLEWVATISQAGSEKDYVDSVKGRFTISRDNAKKSLYLQMNSLRAEDTAVYYCASGVYSFDYRGQGTLVTVSSGTGGGGSGGGGSGGGGSEFEIVLTQSPGTLSLSPGERATLSCRASQSVGGYLAWYQQKPGQAPRLLIYDASNRATGIPARFSGSGSGTDFTLTISSLEPEDFAVYYCQQRNNWPPMYTFGQGTKLEIKRLEIQNPDPAVYQLRDSKSSDKSVCLFTDFDSQTNVSQSKDSDVYITDKCVLDMRSMDFKSNSAVAWSNKSDFACANAFNNSIIPEDTFFPSPESSCDVKLVEKSFETDTNLNFQNLSVIGFRILLLKVAGFNLLMTLRLWSSRAKRSGSGVKQTLNFDLLKLAGDVESNPGPTSMDWIWRILFLVGAATGAHSFEQVQLVQSGAEVKKPGSSVKVSCKASGGTFSSYAISWVRQAPGQGLEWMGGIIPILGTANYAQKFQGRVTITADESTSTAYMELSSLRSEDTAVYYCARWGGGAFDIWGQGTMVTVSSTREDLKNVFPPEVAVFEPSEAEISHTQKATLVCLATGFYPDHVELSWWVNGKEVHSGVCTDPQPLKEQPALNDSRYCLSSRLRVSATFWQNPRNHFRCQVQFYGLSENDEWTQDRAKPVTQIVSAEAWGRADCGFTSESYQQGVLSATILYEILLGKATLYAVLVSALVLMAMVKRKDSRG

SEQ ID NO: 12735 - protein, 754 aa, Artificial Sequence
  Synthetic Polypeptide
MALPVTALLLPLALLLHAARPEVQLVESGGGLVQPGGSLRLSCAASGFSFSDFWMSWVRQAPGKGLEWVATISQAGSEKDYVDSVKGRFTISRDNAKKSLYLQMNSLRAEDTAVYYCASGVYSFDYRGQGTLVTVSSGTGGGGSGGGGSGGGGSEFQIVLTQSPALMSASPGEKVTMTCSASSSVRYMYWYQQKPRSSPKPWIHLTSNLASGVPARFSGSGSGTSYSLTISSMEAEDAATYYCQQWSSHPFTFGSGTKLEIKLEIQNPDPAVYQLRDSKSSDKSVCLFTDFDSQTNVSQSKDSDVYITDKCVLDMRSMDFKSNSAVAWSNKSDFACANAFNNSIIPEDTFFPSPESSCDVKLVEKSFETDTNLNFQNLSVIGFRILLLKVAGFNLLMTLRLWSSRAKRSGSGVKQTLNFDLLKLAGDVESNPGPTSMDWIWRILFLVGAATGAHSFEDVQLQESGPGLVKPSQSLSLTCTVTGFSITSDYSWNWIRQFPGNKLEWMGYISYSGHTSYNPSLESRISITRDTSKNQFFLQLNSVTTEDTATYYCTRGNWDVVYWGQGTLVTVSATREDLKNVFPPEVAVFEPSEAEISHTQKATLVCLATGFYPDHVELSWWVNGKEVHSGVCTDPQPLKEQPALNDSRYCLSSRLRVSATFWQNPRNHFRCQVQFYGLSENDEWTQDRAKPVTQIVSAEAWGRADCGFTSESYQQGVLSATILYEILLGKATLYAVLVSALVLMAMVKRKDSRG

SEQ ID NO: 12736 - protein, 764 aa, Artificial Sequence
  Synthetic Polypeptide
MALPVTALLLPLALLLHAARPEVQLVESGGGLVQPGGSLRLSCAASGFSFSDFWMSWVRQAPGKGLEWVATISQAGSEKDYVDSVKGRFTISRDNAKKSLYLQMNSLRAEDTAVYYCASGVYSFDYRGQGTLVTVSSGTGGGGSGGGGSGGGGSEFDVVMTQSPLSLPVTLGQPASISCRSSQSIVHSDGNTYLEWYQQRPGQSPRRLIYKVSNRFSGVPDRFSGSGSGTDFTLKISRVEAEDVGVYYCFQGSHAPWTFGGGTKVEIKLEIQNPDPAVYQLRDSKSSDKSVCLFTDFDSQTNVSQSKDSDVYITDKCVLDMRSMDFKSNSAVAWSNKSDFACANAFNNSIIPEDTFFPSPESSCDVKLVEKSFETDTNLNFQNLSVIGFRILLLKVAGFNLLMTLRLWSSRAKRSGSGVKQTLNFDLLKLAGDVESNPGPTSMDWIWRILFLVGAATGAHSFEEVQLVESGGGLVQPGGSLRLSCAASGFTFSSYGMHWVRQAPGKGLEWVAYITTRSSTIYYADSVKGRFTISRDNAKNSLYLQMNSLRAEDTAVYYCTREPLTGYYAMDYWGQGTSVTVSSTREDLKNVFPPEVAVFEPSEAEISHTQKATLVCLATGFYPDHVELSWWVNGKEVHSGVCTDPQPLKEQPALNDSRYCLSSRLRVSATFWQNPRNHFRCQVQFYGLSENDEWTQDRAKPVTQIVSAEAWGRADCGFTSESYQQGVLSATILYEILLGKATLYAVLVSALVLMAMVKRKDSRG

SEQ ID NO: 12737 - protein, 756 aa, Artificial Sequence
  Synthetic Polypeptide
MALPVTALLLPLALLLHAARPEVQLVESGGGLVQPGGSLRLSCAASGFSFSDFWMSWVRQAPGKGLEWVATISQAGSEKDYVDSVKGRFTISRDNAKKSLYLQMNSLRAEDTAVYYCASGVYSFDYRGQGTLVTVSSGTGGGGSGGGGSGGGGSEFDIQMTQSPSSLSASVGDRVTITCRASQSISLWLNWYQQKPGKAPKLLIYAASTLQSGVPSRFSGSGSGTDFTLTISSLQPEDFATYYCQQYYTSPYTFGQGTKVEIKRLEIQNPDPAVYQLRDSKSSDKSVCLFTDFDSQTNVSQSKDSDVYITDKCVLDMRSMDFKSNSAVAWSNKSDFACANAFNNSIIPEDTFFPSPESSCDVKLVEKSFETDTNLNFQNLSVIGFRILLLKVAGFNLLMTLRLWSSRAKRSGSGVKQTLNFDLLKLAGDVESNPGPTSMDWIWRILFLVGAATGAHSFEQVQLLESGGGLVQPGGSLRLSCAASGFTFSSYAMSWVRQAPGKGLEWVSVIRSSGSSTYYADSVKGRFTISRDNSKNTLYLQMNSLRAEDTAVYYCARGGGYFDYWGQGTLVTVSSTREDLKNVFPPEVAVFEPSEAEISHTQKATLVCLATGFYPDHVELSWWVNGKEVHSGVCTDPQPLKEQPALNDSRYCLSSRLRVSATFWQNPRNHFRCQVQFYGLSENDEWTQDRAKPVTQIVSAEAWGRADCGFTSESYQQGVLSATILYEILLGKATLYAVLVSALVLMAMVKRKDSRG

SEQ ID NO: 12738 - protein, 759 aa, Artificial Sequence
  Synthetic Polypeptide
MALPVTALLLPLALLLHAARPEVQLVESGGGLVQPGGSLRLSCAASGFSFSDFWMSWVRQAPGKGLEWVATISQAGSEKDYVDSVKGRFTISRDNAKKSLYLQMNSLRAEDTAVYYCASGVYSFDYRGQGTLVTVSSGTGGGGSGGGGSGGGGSEFDIQMTQSPSSLSASVGDRVTITCRASQSISSYLNWYQQKPGKAPKLLIYAVSTLQSGVPSRFSGSGSGTDFTLTISSLQPEDFATYYCQQSGTFPPTTFGQGTKVEIKRLEIQNPDPAVYQLRDSKSSDKSVCLFTDFDSQTNVSQSKDSDVYITDKCVLDMRSMDFKSNSAVAWSNKSDFACANAFNNSIIPEDTFFPSPESSCDVKLVEKSFETDTNLNFQNLSVIGFRILLLKVAGFNLLMTLRLWSSRAKRSGSGVKQTLNFDLLKLAGDVESNPGPTSMDWIWRILFLVGAATGAHSFEQVQLLESGGGLVQPGGSLRLSCAASGFTFSSHGMHWVRQAPGKGLEWVSVISGSGSNTGYADSVKGRFTISRDNSKNTLYLQMNSLRAEDTAVYYCARQWGSYAFDSWGQGTLVTVSSTREDLKNVFPPEVAVFEPSEAEISHTQKATLVCLATGFYPDHVELSWWVNGKEVHSGVCTDPQPLKEQPALNDSRYCLSSRLRVSATFWQNPRNHFRCQVQFYGLSENDEWTQDRAKPVTQIVSAEAWGRADCGFTSESYQQGVLSATILYEILLGKATLYAVLVSALVLMAMVKRKDSRG

SEQ ID NO: 12739 - protein, 769 aa, Artificial Sequence
  Synthetic Polypeptide
MALPVTALLLPLALLLHAARPEVQLVESGGGLVQPGGSLRLSCAASGFSFSDFWMSWVRQAPGKGLEWVATISQAGSEKDYVDSVKGRFTISRDNAKKSLYLQMNSLRAEDTAVYYCASGVYSFDYRGQGTLVTVSSGTGGGGSGGGGSGGGGSEFDIVMSQSPSSLAVSVGEKVTMSCKSSQSLLHSSNQKNYLAWYQQKPGQSPKVLIYWASTRESGVPDRFTGSGSGTDFTLTITSVKSEDLAVYYCQQYYSYPWTFGGGTRLEIKRLEIQNPDPAVYQLRDSKSSDKSVCLFTDFDSQTNVSQSKDSDVYITDKCVLDMRSMDFKSNSAVAWSNKSDFACANAFNNSIIPEDTFFPSPESSCDVKLVEKSFETDTNLNFQNLSVIGFRILLLKVAGFNLLMTLRLWSSRAKRSGSGVKQTLNFDLLKLAGDVESNPGPTSMDWIWRILFLVGAATGAHSFEEVQLQQSVAELVKPGASVKMSCKVSGYTLTDHTIHWMKQRPEQGLEWIGYIYPRDGITGYNEKFKGKATLTADTSSSTAYMQLNSLTSEDSAVYFCARWGYSYRNYAYYYDYWGQGTTLTVSSTREDLKNVFPPEVAVFEPSEAEISHTQKATLVCLATGFYPDHVELSWWVNGKEVHSGVCTDPQPLKEQPALNDSRYCLSSRLRVSATFWQNPRNHFRCQVQFYGLSENDEWTQDRAKPVTQIVSAEAWGRADCGFTSESYQQGVLSATILYEILLGKATLYAVLVSALVLMAMVKRKDSRG

SEQ ID NO: 12740 - protein, 766 aa, Artificial Sequence
  Synthetic Polypeptide
MALPVTALLLPLALLLHAARPEVQLVESGGGLVQPGGSLRLSCAASGFSFSDFWMSWVRQAPGKGLEWVATISQAGSEKDYVDSVKGRFTISRDNAKKSLYLQMNSLRAEDTAVYYCASGVYSFDYRGQGTLVTVSSGTGGGGSGGGGSGGGGSEFEIVLTQSPGTLSLSPGERATLSCRASQSVSSSYLAWYQQKPGQAPRLLIYGTSSRATGIPDRFSGSGSGTDFTLTISRLEPEDFAVYYCQQYGSSPFTFGGGTKVEIKRLEIQNPDPAVYQLRDSKSSDKSVCLFTDFDSQTNVSQSKDSDVYITDKCVLDMRSMDFKSNSAVAWSNKSDFACANAFNNSIIPEDTFFPSPESSCDVKLVEKSFETDTNLNFQNLSVIGFRILLLKVAGFNLLMTLRLWSSRAKRSGSGVKQTLNFDLLKLAGDVESNPGPTSMDWIWRILFLVGAATGAHSFEQVQLQESGPGLAKPSETLSLTCTVSGDSITSYYWSWIRQPPGKGLEWIGYIYYSGSTNYNPSLKSRVTISVDTSKNQFSLKLSSVTAADTAVYYCARDQRRIAAAGTHFYGMDVWGQGTTVTVSSTREDLKNVFPPEVAVFEPSEAEISHTQKATLVCLATGFYPDHVELSWWVNGKEVHSGVCTDPQPLKEQPALNDSRYCLSSRLRVSATFWQNPRNHFRCQVQFYGLSENDEWTQDRAKPVTQIVSAEAWGRADCGFTSESYQQGVLSATILYEILLGKATLYAVLVSALVLMAMVKRKDSRG

SEQ ID NO: 12741 - protein, 758 aa, Artificial Sequence
  Synthetic Polypeptide
MALPVTALLLPLALLLHAARPEVQLVESGGGLVQPGGSLRLSCAASGFSFSDFWMSWVRQAPGKGLEWVATISQAGSEKDYVDSVKGRFTISRDNAKKSLYLQMNSLRAEDTAVYYCASGVYSFDYRGQGTLVTVSSGTGGGGSGGGGSGGGGSEFDILLTQSPVILSVSPGERVSFSCRASQSIGTNIHWYQQRTNGSPRLLIKYASESISGIPSRFSGSGSGTDFTLSINSVESEDIADYYCQQNNNWPTTFGAGTKLELKLEIQNPDPAVYQLRDSKSSDKSVCLFTDFDSQTNVSQSKDSDVYITDKCVLDMRSMDFKSNSAVAWSNKSDFACANAFNNSIIPEDTFFPSPESSCDVKLVEKSFETDTNLNFQNLSVIGFRILLLKVAGFNLLMTLRLWSSRAKRSGSGVKQTLNFDLLKLAGDVESNPGPTSMDWIWRILFLVGAATGAHSFEQVQLKQSGPGLVQPSQSLSITCTVSGFSLTNYGVHWVRQSPGKGLEWLGVIWSGGNTDYNTPFTSRLSINKDNSKSQVFFKMNSLQSNDTAIYYCARALTYYDYEFAYWGQGTLVTVSATREDLKNVFPPEVAVFEPSEAEISHTQKATLVCLATGFYPDHVELSWWVNGKEVHSGVCTDPQPLKEQPALNDSRYCLSSRLRVSATFWQNPRNHFRCQVQFYGLSENDEWTQDRAKPVTQIVSAEAWGRADCGFTSESYQQGVLSATILYEILLGKATLYAVLVSALVLMAMVKRKDSRG

SEQ ID NO: 12742 - protein, 751 aa, Artificial Sequence
  Synthetic Polypeptide
MALPVTALLLPLALLLHAARPEVQLVESGGGLVQPGGSLRLSCAASGFSFSDFWMSWVRQAPGKGLEWVATISQAGSEKDYVDSVKGRFTISRDNAKKSLYLQMNSLRAEDTAVYYCASGVYSFDYRGQGTLVTVSSGTGGGGSGGGGSGGGGSEFMTQSPKFLLVSAGDRVTLTCKASQSVNNDVYWYQQEPGQSPKLLIYWASTRESGVPDRFTGSGSGTDFTLTISSVQAEDLAVYYCKQSYNLYTFGGGTKLEIKRLEIQNPDPAVYQLRDSKSSDKSVCLFTDFDSQTNVSQSKDSDVYITDKCVLDMRSMDFKSNSAVAWSNKSDFACANAFNNSIIPEDTFFPSPESSCDVKLVEKSFETDTNLNFQNLSVIGFRILLLKVAGFNLLMTLRLWSSRAKRSGSGVKQTLNFDLLKLAGDVESNPGPTSMDWIWRILFLVGAATGAHSFEESGRGLVQPGGSRKLSCAASGFTFSTSGMHWVRQAPEKGLEWVAYISSGSTTIYHADTVKGRFTISRDNPKNTLFLQMTSLRSEDTAMYYCCARSGQFGNYFDYWGQGTTLTVSSTREDLKNVFPPEVAVFEPSEAEISHTQKATLVCLATGFYPDHVELSWWVNGKEVHSGVCTDPQPLKEQPALNDSRYCLSSRLRVSATFWQNPRNHFRCQVQFYGLSENDEWTQDRAKPVTQIVSAEAWGRADCGFTSESYQQGVLSATILYEILLGKATLYAVLVSALVLMAMVKRKDSRG

SEQ ID NO: 12743 - protein, 756 aa, Artificial Sequence
  Synthetic Polypeptide
MALPVTALLLPLALLLHAARPEVQLVESGGGLVQPGGSLRLSCAASGFSFSDFWMSWVRQAPGKGLEWVATISQAGSEKDYVDSVKGRFTISRDNAKKSLYLQMNSLRAEDTAVYYCASGVYSFDYRGQGTLVTVSSGTGGGGSGGGGSGGGGSEFQSPSSLAVSAGEKVTMSCKSSQSLLNSRTRKNYLAWYQQKPGQSPKLLIYWASTRESGVPDRFTGSGSGTDFTLTISSVQAEDLAVYYCKQSNLYTFGGGTKLEIKLEIQNPDPAVYQLRDSKSSDKSVCLFTDFDSQTNVSQSKDSDVYITDKCVLDMRSMDFKSNSAVAWSNKSDFACANAFNNSIIPEDTFFPSPESSCDVKLVEKSFETDTNLNFQNLSVIGFRILLLKVAGFNLLMTLRLWSSRAKRSGSGVKQTLNFDLLKLAGDVESNPGPTSMDWIWRILFLVGAATGAHSFEQVQLEESGPELVKPGASVKLSCKASGYTFTEYIIHWVKQRSGQGLEWIGWFYPGSGSIKYNEKFKDKATLTADKSSSTVYMELSGLTSEDSAVYFCARHDGYSYFDYWGQGTTLTVSSTREDLKNVFPPEVAVFEPSEAEISHTQKATLVCLATGFYPDHVELSWWVNGKEVHSGVCTDPQPLKEQPALNDSRYCLSSRLRVSATFWQNPRNHFRCQVQFYGLSENDEWTQDRAKPVTQIVSAEAWGRADCGFTSESYQQGVLSATILYEILLGKATLYAVLVSALVLMAMVKRKDSRG

SEQ ID NO: 12744 - protein, 759 aa, Artificial Sequence
  Synthetic Polypeptide
MALPVTALLLPLALLLHAARPEVQLVESGGGLVQPGGSLRLSCAASGFSFSDFWMSWVRQAPGKGLEWVATISQAGSEKDYVDSVKGRFTISRDNAKKSLYLQMNSLRAEDTAVYYCASGVYSFDYRGQGTLVTVSSGTGGGGSGGGGSGGGGSEFDIQMTQSPSSLSASLGERVSLTCRATQELSGYLSWLQQKPDGTIKRLIYAASTLDSGVPKRFSGNRSGSDYSLTISSLESEDFADYYCLQYAIYPYTFGGGTKLEIKLEIQNPDPAVYQLRDSKSSDKSVCLFTDFDSQTNVSQSKDSDVYITDKCVLDMRSMDFKSNSAVAWSNKSDFACANAFNNSIIPEDTFFPSPESSCDVKLVEKSFETDTNLNFQNLSVIGFRILLLKVAGFNLLMTLRLWSSRAKRSGSGVKQTLNFDLLKLAGDVESNPGPTSMDWIWRILFLVGAATGAHSFEEVQLQQSGPELVKPGASVKMSCKASGYTFTSYFIHWVKQKPGQGLEWIGFINPYNDGSKYNEKFKGKATLTSDKSSSTAYMELSSLTSEDSAVYYCTRDDGYYGYAMDYWGQGTSVTVSSTREDLKNVFPPEVAVFEPSEAEISHTQKATLVCLATGFYPDHVELSWWVNGKEVHSGVCTDPQPLKEQPALNDSRYCLSSRLRVSATFWQNPRNHFRCQVQFYGLSENDEWTQDRAKPVTQIVSAEAWGRADCGFTSESYQQGVLSATILYEILLGKATLYAVLVSALVLMAMVKRKDSRG

SEQ ID NO: 12745 - protein, 764 aa, Artificial Sequence
  Synthetic Polypeptide
MALPVTALLLPLALLLHAARPEVQLVESGGGLVQPGGSLRLSCAASGFSFSDFWMSWVRQAPGKGLEWVATISQAGSEKDYVDSVKGRFTISRDNAKKSLYLQMNSLRAEDTAVYYCASGVYSFDYRGQGTLVTVSSGTGGGGSGGGGSGGGGSEFDTIVLTQSPASLAVSLGQRATISCRASESVDSYGNSFMHWYQQKPGQPPKLLIYLASNLESGVPARFSGSGSRTDFTLTIDPVEADDAATYYCQQNNYDPWTFGGGTKLEIKLEIQNPDPAVYQLRDSKSSDKSVCLFTDFDSQTNVSQSKDSDVYITDKCVLDMRSMDFKSNSAVAWSNKSDFACANAFNNSIIPEDTFFPSPESSCDVKLVEKSFETDTNLNFQNLSVIGFRILLLKVAGFNLLMTLRLWSSRAKRSGSGVKQTLNFDLLKLAGDVESNPGPTSMDWIWRILFLVGAATGAHSFEEVQLQQSGPELVKPGASVKMSCKASGYTFTSYVMHWVKQKPGQGLEWIGYINPYNDGTKYNEKFKGKATLTSDTSSSTAYMELNSLTSEDSAVYFCARPIYFDNDYFDYWGQGTTLKVSSTREDLKNVFPPEVAVFEPSEAEISHTQKATLVCLATGFYPDHVELSWWVNGKEVHSGVCTDPQPLKEQPALNDSRYCLSSRLRVSATFWQNPRNHFRCQVQFYGLSENDEWTQDRAKPVTQIVSAEAWGRADCGFTSESYQQGVLSATILYEILLGKATLYAVLVSALVLMAMVKRKDSRG

SEQ ID NO: 12746 - protein, 759 aa, Artificial Sequence
  Synthetic Polypeptide
MALPVTALLLPLALLLHAARPEVQLVESGGGLVQPGGSLRLSCAASGFSFSDFWMSWVRQAPGKGLEWVATISQAGSEKDYVDSVKGRFTISRDNAKKSLYLQMNSLRAEDTAVYYCASGVYSFDYRGQGTLVTVSSGTGGGGSGGGGSGGGGSEFDIQMTQSPSSLSASVGDRVTITCKASQDVGIAVAWYQQKPGKVPKLLIYWASTRHTGVPDRFSGSGSGTDFTLTISSLQPEDVATYYCQQYSSYPYTFGQGTKVEIKRLEIQNPDPAVYQLRDSKSSDKSVCLFTDFDSQTNVSQSKDSDVYITDKCVLDMRSMDFKSNSAVAWSNKSDFACANAFNNSIIPEDTFFPSPESSCDVKLVEKSFETDTNLNFQNLSVIGFRILLLKVAGFNLLMTLRLWSSRAKRSGSGVKQTLNFDLLKLAGDVESNPGPTSMDWIWRILFLVGAATGAHSFEEVQLVESGGGLVQPGGSLRLSCAASGFDFSRYWMSWVRQAPGKGLEWIGEINPDSSTINYAPSLKDKFIISRDNAKNSLYLQMNSLRAEDTAVYYCARPDGNYWYFDVWGQGTLVTVSSTREDLKNVFPPEVAVFEPSEAEISHTQKATLVCLATGFYPDHVELSWWVNGKEVHSGVCTDPQPLKEQPALNDSRYCLSSRLRVSATFWQNPRNHFRCQVQFYGLSENDEWTQDRAKPVTQIVSAEAWGRADCGFTSESYQQGVLSATILYEILLGKATLYAVLVSALVLMAMVKRKDSRG

SEQ ID NO: 12747 - protein, 759 aa, Artificial Sequence
  Synthetic Polypeptide
MALPVTALLLPLALLLHAARPEVQLVESGGGLVQPGGSLRLSCAASGFSFSDFWMSWVRQAPGKGLEWVATISQAGSEKDYVDSVKGRFTISRDNAKKSLYLQMNSLRAEDTAVYYCASGVYSFDYRGQGTLVTVSSGTGGGGSGGGGSGGGGSEFDIVMTQSQKSMSTSVGDRVSITCKASQDVITGVAWYQQKPGQSPKLLIYSASYRYTGVPDRFTGSGSGTDFTFTISNVQAEDLAVYYCQQHYSTPLTFGAGTKLELKLEIQNPDPAVYQLRDSKSSDKSVCLFTDFDSQTNVSQSKDSDVYITDKCVLDMRSMDFKSNSAVAWSNKSDFACANAFNNSIIPEDTFFPSPESSCDVKLVEKSFETDTNLNFQNLSVIGFRILLLKVAGFNLLMTLRLWSSRAKRSGSGVKQTLNFDLLKLAGDVESNPGPTSMDWIWRILFLVGAATGAHSFEQVQLQQPGAELVRPGASVKLSCKASGYSFTTYWMNWVKQRPGQGLEWIGMIHPSDSETRLNQKFKDKATLTVDKSSSTAYMQLSSPTSEDSAVYYCARSTMIATRAMDYWGQGTSVTVSSTREDLKNVFPPEVAVFEPSEAEISHTQKATLVCLATGFYPDHVELSWWVNGKEVHSGVCTDPQPLKEQPALNDSRYCLSSRLRVSATFWQNPRNHFRCQVQFYGLSENDEWTQDRAKPVTQIVSAEAWGRADCGFTSESYQQGVLSATILYEILLGKATLYAVLVSALVLMAMVKRKDSRG

SEQ ID NO: 12748 - protein, 765 aa, Artificial Sequence
  Synthetic Polypeptide
MALPVTALLLPLALLLHAARPEVQLVESGGGLVQPGGSLRLSCAASGFSFSDFWMSWVRQAPGKGLEWVATISQAGSEKDYVDSVKGRFTISRDNAKKSLYLQMNSLRAEDTAVYYCASGVYSFDYRGQGTLVTVSSGTGGGGSGGGGSGGGGSEFQSVLTQPPSVSGAPGQRVTISCTGSGSNIGAPYDVSWYQQLPGTAPKLLIYHNNKRPSGVPDRFSGSKSGTSASLAITGLQAEDEADYYCATVEAGLSGSVFGGGTKLTVLGALEIQNPDPAVYQLRDSKSSDKSVCLFTDFDSQTNVSQSKDSDVYITDKCVLDMRSMDFKSNSAVAWSNKSDFACANAFNNSIIPEDTFFPSPESSCDVKLVEKSFETDTNLNFQNLSVIGFRILLLKVAGFNLLMTLRLWSSRAKRSGSGVKQTLNFDLLKLAGDVESNPGPTSMDWIWRILFLVGAATGAHSFEQVQLVQSGAEVKKPGASVKVSCKVSGYTLTELSIHWVRQAPGKGLEWMGGFDPEENEIVYAQRFQGRVTMTEDTSTDTAYMELSSLRSEDTAVYYCAIVGSFSPLTLGLWGQGTMVTVSSTREDLKNVFPPEVAVFEPSEAEISHTQKATLVCLATGFYPDHVELSWWVNGKEVHSGVCTDPQPLKEQPALNDSRYCLSSRLRVSATFWQNPRNHFRCQVQFYGLSENDEWTQDRAKPVTQIVSAEAWGRADCGFTSESYQQGVLSATILYEILLGKATLYAVLVSALVLMAMVKRKDSRG

SEQ ID NO: 12749 - protein, 765 aa, Artificial Sequence
  Synthetic Polypeptide
MALPVTALLLPLALLLHAARPEVQLVESGGGLVQPGGSLRLSCAASGFSFSDFWMSWVRQAPGKGLEWVATISQAGSEKDYVDSVKGRFTISRDNAKKSLYLQMNSLRAEDTAVYYCASGVYSFDYRGQGTLVTVSSGTGGGGSGGGGSGGGGSEFQSVLTQPPSVSGAPGQRVTISCTGSGSNIGAPYDVSWYQQLPGTAPKLLIYHNNKRPSGVPDRFSGSKSGTSASLAITGLQAEDEADYYCQSYDSSSISTIFGGGTKLTVLGALEIQNPDPAVYQLRDSKSSDKSVCLFTDFDSQTNVSQSKDSDVYITDKCVLDMRSMDFKSNSAVAWSNKSDFACANAFNNSIIPEDTFFPSPESSCDVKLVEKSFETDTNLNFQNLSVIGFRILLLKVAGFNLLMTLRLWSSRAKRSGSGVKQTLNFDLLKLAGDVESNPGPTSMDWIWRILFLVGAATGAHSFEQVQLVQSGAEVKKPGASVKVSCKVSGYTLTELSIHWVRQAPGKGLEWMGGFDPEENEIVYAQRFQGRVTMTEDTSTDTAYMELSSLRSEDTAVYYCAIVGSFSGIAYRPWGQGTMVTVSSTREDLKNVFPPEVAVFEPSEAEISHTQKATLVCLATGFYPDHVELSWWVNGKEVHSGVCTDPQPLKEQPALNDSRYCLSSRLRVSATFWQNPRNHFRCQVQFYGLSENDEWTQDRAKPVTQIVSAEAWGRADCGFTSESYQQGVLSATILYEILLGKATLYAVLVSALVLMAMVKRKDSRG

SEQ ID NO: 12750 - protein, 753 aa, Artificial Sequence
  Synthetic Polypeptide
MALPVTALLLPLALLLHAARPEVQLVESGGGLVQPGGSLRLSCAASGFSFSDFWMSWVRQAPGKGLEWVATISQAGSEKDYVDSVKGRFTISRDNAKKSLYLQMNSLRAEDTAVYYCASGVYSFDYRGQGTLVTVSSGTGGGGSGGGGSGGGGSEFDIQMTQSPSSLSASVGDRVTITCRASQGIRNNLAWYQQKPGKAPKRLIYAASNLQSGVPSRFTGSGSGTEFTLIVSSLQPEDFATYYCLQHHSYPLTSGGGTKVELEIQNPDPAVYQLRDSKSSDKSVCLFTDFDSQTNVSQSKDSDVYITDKCVLDMRSMDFKSNSAVAWSNKSDFACANAFNNSIIPEDTFFPSPESSCDVKLVEKSFETDTNLNFQNLSVIGFRILLLKVAGFNLLMTLRLWSSRAKRSGSGVKQTLNFDLLKLAGDVESNPGPTSMDWIWRILFLVGAATGAHSFEEVQVLESGGGLVQPGGSLRLSCAASGFTFSSYAMSWVRQAPGKGLEWVSAISGSGGSTNYADSVKGRFTISRDNSKNTLYLQMNSLRAEDTAVYYCAGSSGWSEYWGQGTLVTVSSTREDLKNVFPPEVAVFEPSEAEISHTQKATLVCLATGFYPDHVELSWWVNGKEVHSGVCTDPQPLKEQPALNDSRYCLSSRLRVSATFWQNPRNHFRCQVQFYGLSENDEWTQDRAKPVTQIVSAEAWGRADCGFTSESYQQGVLSATILYEILLGKATLYAVLVSALVLMAMVKRKDSRG

SEQ ID NO: 12751 - protein, 759 aa, Artificial Sequence
  Synthetic Polypeptide
MALPVTALLLPLALLLHAARPEVQLVESGGGLVQPGGSLRLSCAASGFSFSDFWMSWVRQAPGKGLEWVATISQAGSEKDYVDSVKGRFTISRDNAKKSLYLQMNSLRAEDTAVYYCASGVYSFDYRGQGTLVTVSSGTGGGGSGGGGSGGGGSEFDEIQLVQSGAEVKKPGESLRISCKGSGFNIEDYYIHWVRQMPGKGLEWMGRIDPENDETKYGPIFQGHVTISADTSINTVYLQWSSLKASDTAMYYCAFRGGVYWGQGTTVTVSSLEIQNPDPAVYQLRDSKSSDKSVCLFTDFDSQTNVSQSKDSDVYITDKCVLDMRSMDFKSNSAVAWSNKSDFACANAFNNSIIPEDTFFPSPESSCDVKLVEKSFETDTNLNFQNLSVIGFRILLLKVAGFNLLMTLRLWSSRAKRSGSGVKQTLNFDLLKLAGDVESNPGPTSMDWIWRILFLVGAATGAHSFEDVVMTQSPDSLAVSLGERATINCKSSQSLLDSDGKTYLNWLQQKPGQPPKRLISLVSKLDSGVPDRFSGSGSGTDFTLTISSLQAEDVAVYYCWQGTHFPGTFGGGTKVEIKTREDLKNVFPPEVAVFEPSEAEISHTQKATLVCLATGFYPDHVELSWWVNGKEVHSGVCTDPQPLKEQPALNDSRYCLSSRLRVSATFWQNPRNHFRCQVQFYGLSENDEWTQDRAKPVTQIVSAEAWGRADCGFTSESYQQGVLSATILYEILLGKATLYAVLVSALVLMAMVKRKDSRG

SEQ ID NO: 12752 - protein, 766 aa, Artificial Sequence
  Synthetic Polypeptide
MALPVTALLLPLALLLHAARPEVQLVESGGGLVQPGGSLRLSCAASGFSFSDFWMSWVRQAPGKGLEWVATISQAGSEKDYVDSVKGRFTISRDNAKKSLYLQMNSLRAEDTAVYYCASGVYSFDYRGQGTLVTVSSGTGGGGSGGGGSGGGGSEFDELVMTQSPSSLTVTAGEKVTMSCKSSQSLLNSGNQKNYLTWYQQKPGQPPKLLIYWASTRESGVPDRFTGSGSGTDFTLTISSVQAEDLAVYYCQNDYSYPLTFGAGTKLEIKLEIQNPDPAVYQLRDSKSSDKSVCLFTDFDSQTNVSQSKDSDVYITDKCVLDMRSMDFKSNSAVAWSNKSDFACANAFNNSIIPEDTFFPSPESSCDVKLVEKSFETDTNLNFQNLSVIGFRILLLKVAGFNLLMTLRLWSSRAKRSGSGVKQTLNFDLLKLAGDVESNPGPTSMDWIWRILFLVGAATGAHSFEEVQLLEQSGAELVRPGTSVKISCKASGYAFTNYWLGWVKQRPGHGLEWIGDIFPGSGNIHYNEKFKGKATLTADKSSSTAYMQLSSLTFEDSAVYFCARLRNWDEPMDYWGQGTTVTVSSTREDLKNVFPPEVAVFEPSEAEISHTQKATLVCLATGFYPDHVELSWWVNGKEVHSGVCTDPQPLKEQPALNDSRYCLSSRLRVSATFWQNPRNHFRCQVQFYGLSENDEWTQDRAKPVTQIVSAEAWGRADCGFTSESYQQGVLSATILYEILLGKATLYAVLVSALVLMAMVKRKDSRG

SEQ ID NO: 12753 - protein, 767 aa, Artificial Sequence
  Synthetic Polypeptide
MALPVTALLLPLALLLHAARPEVQLVESGGGLVQPGGSLRLSCAASGFSFSDFWMSWVRQAPGKGLEWVATISQAGSEKDYVDSVKGRFTISRDNAKKSLYLQMNSLRAEDTAVYYCASGVYSFDYRGQGTLVTVSSGTGGGGSGGGGSGGGGSEFDELQMTQSPSSLSASVGDRVTITCRASQSISSYLNWYQQKPGQPPKLLIYWASTRESGVPDRFSGSESGTNYTLTISSLQPEDFATYFCQQSDSLPITFGQGTRLDIQLEIQNPDPAVYQLRDSKSSDKSVCLFTDFDSQTNVSQSKDSDVYITDKCVLDMRSMDFKSNSAVAWSNKSDFACANAFNNSIIPEDTFFPSPESSCDVKLVEKSFETDTNLNFQNLSVIGFRILLLKVAGFNLLMTLRLWSSRAKRSGSGVKQTLNFDLLKLAGDVESNPGPTSMDWIWRILFLVGAATGAHSFEEVQLLESGGGVVQPGRSLRLSCAASGFTFSSYGMHWVRQAPGKGLEWVAVISYDGSNKYYADSVKGRFTISRDNSKNTLYLQMNSLRAEDTAVYYCAKDMGWGSGWRPYYYYGMDVWGQGTTVTVSSTREDLKNVFPPEVAVFEPSEAEISHTQKATLVCLATGFYPDHVELSWWVNGKEVHSGVCTDPQPLKEQPALNDSRYCLSSRLRVSATFWQNPRNHFRCQVQFYGLSENDEWTQDRAKPVTQIVSAEAWGRADCGFTSESYQQGVLSATILYEILLGKATLYAVLVSALVLMAMVKRKDSRG

SEQ ID NO: 12754 - protein, 764 aa, Artificial Sequence
  Synthetic Polypeptide
MALPVTALLLPLALLLHAARPEVQLVESGGGLVQPGGSLRLSCAASGFSFSDFWMSWVRQAPGKGLEWVATISQAGSEKDYVDSVKGRFTISRDNAKKSLYLQMNSLRAEDTAVYYCASGVYSFDYRGQGTLVTVSSGTGGGGSGGGGSGGGGSEFDDIQMTQSPSSLSASVGDRVTITCRASQSISSYLNWYQQKPGKAPKLLIYAASSLQSGVPSRFSGSGSGTDFTLTISSLQPEDLATYYCQQSYSTPFTFGPGTKVDIKLEIQNPDPAVYQLRDSKSSDKSVCLFTDFDSQTNVSQSKDSDVYITDKCVLDMRSMDFKSNSAVAWSNKSDFACANAFNNSIIPEDTFFPSPESSCDVKLVEKSFETDTNLNFQNLSVIGFRILLLKVAGFNLLMTLRLWSSRAKRSGSGVKQTLNFDLLKLAGDVESNPGPTSMDWIWRILFLVGAATGAHSFEVHEVQLVQSGAEVKKPGSSVKVSCKASGGTFSSYAISWVRQAPGQGLEWMGGIIPIFGTANYAQKFQGRVTITADKSTSTAYMELSSLRSEDTAVYYCATFALFGFREQAFDIWGQGTTVTVSSTREDLKNVFPPEVAVFEPSEAEISHTQKATLVCLATGFYPDHVELSWWVNGKEVHSGVCTDPQPLKEQPALNDSRYCLSSRLRVSATFWQNPRNHFRCQVQFYGLSENDEWTQDRAKPVTQIVSAEAWGRADCGFTSESYQQGVLSATILYEILLGKATLYAVLVSALVLMAMVKRKDSRG

SEQ ID NO: 12755 - protein, 762 aa, Artificial Sequence
  Synthetic Polypeptide
MALPVTALLLPLALLLHAARPEVQLVESGGGLVQPGGSLRLSCAASGFSFSDFWMSWVRQAPGKGLEWVATISQAGSEKDYVDSVKGRFTISRDNAKKSLYLQMNSLRAEDTAVYYCASGVYSFDYRGQGTLVTVSSGTGGGGSGGGGSGGGGSEFDIVLTQSPLSLAVSLGQPAIISCKASQSVSFAGTSLMHWYHQKPGQQPRLLIYRASNLEAGVPDRFSGSGSKTDFTLTISPVEAEDAATYYCQQSREYPYTFGGGTKLEIKRLEIQNPDPAVYQLRDSKSSDKSVCLFTDFDSQTNVSQSKDSDVYITDKCVLDMRSMDFKSNSAVAWSNKSDFACANAFNNSIIPEDTFFPSPESSCDVKLVEKSFETDTNLNFQNLSVIGFRILLLKVAGFNLLMTLRLWSSRAKRSGSGVKQTLNFDLLKLAGDVESNPGPTSMDWIWRILFLVGAATGAHSFEQVQLVQSGAEVVKPGASVKISCKASGYTFTGYFMNWVKQSPGQSLEWIGRIHPYDGDTFYNQKFQGKATLTVDKSSNTAHMELLSLTSEDFAVYYCTRYDGSRAMDYWGQGTTVTVSSTREDLKNVFPPEVAVFEPSEAEISHTQKATLVCLATGFYPDHVELSWWVNGKEVHSGVCTDPQPLKEQPALNDSRYCLSSRLRVSATFWQNPRNHFRCQVQFYGLSENDEWTQDRAKPVTQIVSAEAWGRADCGFTSESYQQGVLSATILYEILLGKATLYAVLVSALVLMAMVKRKDSRG

SEQ ID NO: 12756 - protein, 759 aa, Artificial Sequence
  Synthetic Polypeptide
MALPVTALLLPLALLLHAARPEVQLVESGGGLVQPGGSLRLSCAASGFSFSDFWMSWVRQAPGKGLEWVATISQAGSEKDYVDSVKGRFTISRDNAKKSLYLQMNSLRAEDTAVYYCASGVYSFDYRGQGTLVTVSSGTGGGGSGGGGSGGGGSEFDDVVMTQTPLSLPVTPGEPASISCRSSQSLVHRNGNTYLHWYLQKPGQSPKLLIHKVSNRFSGVPDRFSGSGSGTDFTLKISRVEAEDLGVYFCSQSTHVPPLTFGAGTKLELKLEIQNPDPAVYQLRDSKSSDKSVCLFTDFDSQTNVSQSKDSDVYITDKCVLDMRSMDFKSNSAVAWSNKSDFACANAFNNSIIPEDTFFPSPESSCDVKLVEKSFETDTNLNFQNLSVIGFRILLLKVAGFNLLMTLRLWSSRAKRSGSGVKQTLNFDLLKLAGDVESNPGPTSMDWIWRILFLVGAATGAHSFEEVQLVQSGAEVEKPGASVKISCKASGSSFTGYNMNWVRQNIGKSLEWIGAIDPYYGGTSYNQKFKGRATLTVDKSTSTAYMHLKSLRSEDTAVYYCVSGMEYWGQGTSVTVSSTREDLKNVFPPEVAVFEPSEAEISHTQKATLVCLATGFYPDHVELSWWVNGKEVHSGVCTDPQPLKEQPALNDSRYCLSSRLRVSATFWQNPRNHFRCQVQFYGLSENDEWTQDRAKPVTQIVSAEAWGRADCGFTSESYQQGVLSATILYEILLGKATLYAVLVSALVLMAMVKRKDSRG

SEQ ID NO: 12757 - protein, 757 aa, Artificial Sequence
  Synthetic Polypeptide
MALPVTALLLPLALLLHAARPEVQLVESGGGLVQPGGSLRLSCAASGFSFSDFWMSWVRQAPGKGLEWVATISQAGSEKDYVDSVKGRFTISRDNAKKSLYLQMNSLRAEDTAVYYCASGVYSFDYRGQGTLVTVSSGTGGGGSGGGGSGGGGSEFDEIVMTQTPATLSVSAGERVTITCKASQSVSNDVTWYQQKPGQAPRLLIYSASNRYSGVPARFSGSGYGTEFTFTISSVQSEDFAVYFCQQDYSSFGQGTKLEIKRLEIQNPDPAVYQLRDSKSSDKSVCLFTDFDSQTNVSQSKDSDVYITDKCVLDMRSMDFKSNSAVAWSNKSDFACANAFNNSIIPEDTFFPSPESSCDVKLVEKSFETDTNLNFQNLSVIGFRILLLKVAGFNLLMTLRLWSSRAKRSGSGVKQTLNFDLLKLAGDVESNPGPTSMDWIWRILFLVGAATGAHSFEQVQLVESGPGVVQPGRSLRISCAVSGFSVTNYGVHWVRQPPGKGLEWLGVIWAGGITNYNSAFMSRLTISKDNSKNTVYLQMNSLRAEDTAMYYCASRGGHYGYALDYWGQGTLVTVSSTREDLKNVFPPEVAVFEPSEAEISHTQKATLVCLATGFYPDHVELSWWVNGKEVHSGVCTDPQPLKEQPALNDSRYCLSSRLRVSATFWQNPRNHFRCQVQFYGLSENDEWTQDRAKPVTQIVSAEAWGRADCGFTSESYQQGVLSATILYEILLGKATLYAVLVSALVLMAMVKRKDSRG

SEQ ID NO: 12758 - protein, 759 aa, Artificial Sequence
  Synthetic Polypeptide
MALPVTALLLPLALLLHAARPEVQLVESGGGLVQPGGSLRLSCAASGFSFSDFWMSWVRQAPGKGLEWVATISQAGSEKDYVDSVKGRFTISRDNAKKSLYLQMNSLRAEDTAVYYCASGVYSFDYRGQGTLVTVSSGTGGGGSGGGGSGGGGSEFDIQMTQTASSLPASLGDRVTISCSASQDISNYLNWYQQKPDGTVKLLIFYSSNLHSGVPSRFSGGGSGTDYSLTISNLEPEDIATYFCHQYSKLPWTFGGGTKLEIKRLEIQNPDPAVYQLRDSKSSDKSVCLFTDFDSQTNVSQSKDSDVYITDKCVLDMRSMDFKSNSAVAWSNKSDFACANAFNNSIIPEDTFFPSPESSCDVKLVEKSFETDTNLNFQNLSVIGFRILLLKVAGFNLLMTLRLWSSRAKRSGSGVKQTLNFDLLKLAGDVESNPGPTSMDWIWRILFLVGAATGAHSFEEVTLVESGGDFVKPGGSLKVSCAASGFAFSHYAMSWVRQTPAKRLEWVAYISSGGSGTYYSDSVKGRFTISRDNAKNTLYLQMRSLRSEDSAMYFCTRVKLGTYYFDSWGQGTTLTVSSTREDLKNVFPPEVAVFEPSEAEISHTQKATLVCLATGFYPDHVELSWWVNGKEVHSGVCTDPQPLKEQPALNDSRYCLSSRLRVSATFWQNPRNHFRCQVQFYGLSENDEWTQDRAKPVTQIVSAEAWGRADCGFTSESYQQGVLSATILYEILLGKATLYAVLVSALVLMAMVKRKDSRG

SEQ ID NO: 12759 - protein, 761 aa, Artificial Sequence
  Synthetic Polypeptide
MALPVTALLLPLALLLHAARPEVQLVESGGGLVQPGGSLRLSCAASGFSFSDFWMSWVRQAPGKGLEWVATISQAGSEKDYVDSVKGRFTISRDNAKKSLYLQMNSLRAEDTAVYYCASGVYSFDYRGQGTLVTVSSGTGGGGSGGGGSGGGGSEFQFVLTQSPSASAALGASAKLTCTLSSAHKTYTIDWYQQQKGKAPRYLIQVKSDGTYTKATGVPDRFSGSSSGADRYLIIPSVQADDEADYYCGTDYTGGYVFGGGTQLTVTLEIQNPDPAVYQLRDSKSSDKSVCLFTDFDSQTNVSQSKDSDVYITDKCVLDMRSMDFKSNSAVAWSNKSDFACANAFNNSIIPEDTFFPSPESSCDVKLVEKSFETDTNLNFQNLSVIGFRILLLKVAGFNLLMTLRLWSSRAKRSGSGVKQTLNFDLLKLAGDVESNPGPTSMDWIWRILFLVGAATGAHSFEEQLKESGGGLFKPTDTLTLTCTVSGFSLSYYGVNWVRQAPGNGLEWIGTIGGSGDTYYASWAKSRSTIIRNTNENTVTLKMTSLTAADTATYFCVRYANIGYEYFNVWGPGTLVTVSSTREDLKNVFPPEVAVFEPSEAEISHTQKATLVCLATGFYPDHVELSWWVNGKEVHSGVCTDPQPLKEQPALNDSRYCLSSRLRVSATFWQNPRNHFRCQVQFYGLSENDEWTQDRAKPVTQIVSAEAWGRADCGFTSESYQQGVLSATILYEILLGKATLYAVLVSALVLMAMVKRKDSRG

SEQ ID NO: 12760 - protein, 766 aa, Artificial Sequence
  Synthetic Polypeptide
MALPVTALLLPLALLLHAARPEVQLVESGGGLVQPGGSLRLSCAASGFSFSDFWMSWVRQAPGKGLEWVATISQAGSEKDYVDSVKGRFTISRDNAKKSLYLQMNSLRAEDTAVYYCASGVYSFDYRGQGTLVTVSSGTGGGGSGGGGSGGGGSEFQFVLTQSPSVSAALGASAKLTCTLSSAHKTYTIDWYQQQQGEAPRYLMQVKSDGSYTKGTGVPDRFSGSSSGADRYLIIPSVQADDEAGYVCGADDNGGYVFGGGTQLTVTLEIQNPDPAVYQLRDSKSSDKSVCLFTDFDSQTNVSQSKDSDVYITDKCVLDMRSMDFKSNSAVAWSNKSDFACANAFNNSIIPEDTFFPSPESSCDVKLVEKSFETDTNLNFQNLSVIGFRILLLKVAGFNLLMTLRLWSSRAKRSGSGVKQTLNFDLLKLAGDVESNPGPTSMDWIWRILFLVGAATGAHSFEQSVKESEGGLFKPTDTLTLTCTVSGFSLSRHALTWVRQAPGNGLEWIGAIDNAGTTYYASWAKSRSTITRNTDLHTVTLKMTSLTASDTATYFCARVFYDINSGYYLDGMDLWGPGTLVTVSSTREDLKNVFPPEVAVFEPSEAEISHTQKATLVCLATGFYPDHVELSWWVNGKEVHSGVCTDPQPLKEQPALNDSRYCLSSRLRVSATFWQNPRNHFRCQVQFYGLSENDEWTQDRAKPVTQIVSAEAWGRADCGFTSESYQQGVLSATILYEILLGKATLYAVLVSALVLMAMVKRKDSRG

SEQ ID NO: 12761 - protein, 760 aa, Artificial Sequence
  Synthetic Polypeptide
MALPVTALLLPLALLLHAARPEVQLVESGGGLVQPGGSLRLSCAASGFSFSDFWMSWVRQAPGKGLEWVATISQAGSEKDYVDSVKGRFTISRDNAKKSLYLQMNSLRAEDTAVYYCASGVYSFDYRGQGTLVTVSSGTGGGGSGGGGSGGGGSEFDIQMTQSPSSLSASVGDRVTITCRASQGISSWLAWYQQKPEKAPKSLIYAASSLQSGVPSRFSGSGSGTDFTLTISSLQPEDFATYYCQQYNSYPPTFGGGTKVEIKLEIQNPDPAVYQLRDSKSSDKSVCLFTDFDSQTNVSQSKDSDVYITDKCVLDMRSMDFKSNSAVAWSNKSDFACANAFNNSIIPEDTFFPSPESSCDVKLVEKSFETDTNLNFQNLSVIGFRILLLKVAGFNLLMTLRLWSSRAKRSGSGVKQTLNFDLLKLAGDVESNPGPTSMDWIWRILFLVGAATGAHSFEEVQLVESGGGLVQPGESLRLSCVASGFTFSRYKMNWVRQAPGKGLEWVSYISRSGRDIYYADSVKGRFTISRDNAKNSLYLQMNSLRDEDTAVYYCAGTVTTYYYFGMDVWGHGTTVTVSSTREDLKNVFPPEVAVFEPSEAEISHTQKATLVCLATGFYPDHVELSWWVNGKEVHSGVCTDPQPLKEQPALNDSRYCLSSRLRVSATFWQNPRNHFRCQVQFYGLSENDEWTQDRAKPVTQIVSAEAWGRADCGFTSESYQQGVLSATILYEILLGKATLYAVLVSALVLMAMVKRKDSRG

SEQ ID NO: 12762 - protein, 761 aa, Artificial Sequence
  Synthetic Polypeptide
MALPVTALLLPLALLLHAARPEVQLVESGGGLVQPGGSLRLSCAASGFSFSDFWMSWVRQAPGKGLEWVATISQAGSEKDYVDSVKGRFTISRDNAKKSLYLQMNSLRAEDTAVYYCASGVYSFDYRGQGTLVTVSSGTGGGGSGGGGSGGGGSEFDIQMTQSPSSLSASVGDRVTITCRASQGISSWLAWYQQKPEKAPKSLIYAASSLQSGVPSRFSGSGSGTDFTLTISSLQPEDFATYYCQQYNSYPPTFGGGTKVEIKLEIQNPDPAVYQLRDSKSSDKSVCLFTDFDSQTNVSQSKDSDVYITDKCVLDMRSMDFKSNSAVAWSNKSDFACANAFNNSIIPEDTFFPSPESSCDVKLVEKSFETDTNLNFQNLSVIGFRILLLKVAGFNLLMTLRLWSSRAKRSGSGVKQTLNFDLLKLAGDVESNPGPTSMDWIWRILFLVGAATGAHSFEEVQLVESGGGSVQPGESLRLSCVASGFTFSRYKMNWVRQAPGKGLEWVSYISRSGRDIYYADSVKGRFTISRDNAKNSLYLQMNSLRDEDTAVYYCAGTVTTYYYDFGMDVWGQGTTVTVSSTREDLKNVFPPEVAVFEPSEAEISHTQKATLVCLATGFYPDHVELSWWVNGKEVHSGVCTDPQPLKEQPALNDSRYCLSSRLRVSATFWQNPRNHFRCQVQFYGLSENDEWTQDRAKPVTQIVSAEAWGRADCGFTSESYQQGVLSATILYEILLGKATLYAVLVSALVLMAMVKRKDSRG

SEQ ID NO: 12763 - protein, 759 aa, Artificial Sequence
  Synthetic Polypeptide
MALPVTALLLPLALLLHAARPEVQLVESGGGLVQPGGSLRLSCAASGFSFSDFWMSWVRQAPGKGLEWVATISQAGSEKDYVDSVKGRFTISRDNAKKSLYLQMNSLRAEDTAVYYCASGVYSFDYRGQGTLVTVSSGTGGGGSGGGGSGGGGSEFQSVLTQPPSASGTPGQRVTISCSGSRSNVGGNYVFWYQQVPGATPKLLIYRSNQRPSGVPDRFAGSKSGSSASLAISGLRSEDEADYYCATWDDSLSGFVFGTGTKVTVLGLEIQNPDPAVYQLRDSKSSDKSVCLFTDFDSQTNVSQSKDSDVYITDKCVLDMRSMDFKSNSAVAWSNKSDFACANAFNNSIIPEDTFFPSPESSCDVKLVEKSFETDTNLNFQNLSVIGFRILLLKVAGFNLLMTLRLWSSRAKRSGSGVKQTLNFDLLKLAGDVESNPGPTSMDWIWRILFLVGAATGAHSFEVQLVESGGGLVKPGGSLRLSCAASGFTFSDYYMSWIRQAPGKGLEWVSYISSSGSTIYYADSVKGRFTISRDNAKNSLYLQMNSLRAEDTAVYYCARGYGKAYDQWGQGTLVTVSSTREDLKNVFPPEVAVFEPSEAEISHTQKATLVCLATGFYPDHVELSWWVNGKEVHSGVCTDPQPLKEQPALNDSRYCLSSRLRVSATFWQNPRNHFRCQVQFYGLSENDEWTQDRAKPVTQIVSAEAWGRADCGFTSESYQQGVLSATILYEILLGKATLYAVLVSALVLMAMVKRKDSRG

SEQ ID NO: 12764 - protein, 758 aa, Artificial Sequence
  Synthetic Polypeptide
MALPVTALLLPLALLLHAARPEVQLVESGGGLVQPGGSLRLSCAASGFSFSDFWMSWVRQAPGKGLEWVATISQAGSEKDYVDSVKGRFTISRDNAKKSLYLQMNSLRAEDTAVYYCASGVYSFDYRGQGTLVTVSSGTGGGGSGGGGSGGGGSEFQSVVTQPPSMSAAPGQQVTISCSGGNSNIERNYVSWYLQLPGTAPKLVIFDNDRRPSGIPDRFSGSKSGTSATLGITGLQTGDEADYYCGTWDSSLRGWVFGGGTKLTVLGLEIQNPDPAVYQLRDSKSSDKSVCLFTDFDSQTNVSQSKDSDVYITDKCVLDMRSMDFKSNSAVAWSNKSDFACANAFNNSIIPEDTFFPSPESSCDVKLVEKSFETDTNLNFQNLSVIGFRILLLKVAGFNLLMTLRLWSSRAKRSGSGVKQTLNFDLLKLAGDVESNPGPTSMDWIWRILFLVGAATGAHSFEVQLVESGGGLIQPGGSLRLSCAASGFTFSNYAMNWVRQAPGKGLEWVSTINGRGSSTIYADSVKGRFTISRDNSKNTLYLQMNSLRAEDTATYYCARYISRGLGDSWGQGTLVTVTREDLKNVFPPEVAVFEPSEAEISHTQKATLVCLATGFYPDHVELSWWVNGKEVHSGVCTDPQPLKEQPALNDSRYCLSSRLRVSATFWQNPRNHFRCQVQFYGLSENDEWTQDRAKPVTQIVSAEAWGRADCGFTSESYQQGVLSATILYEILLGKATLYAVLVSALVLMAMVKRKDSRG

SEQ ID NO: 12765 - protein, 759 aa, Artificial Sequence
  Synthetic Polypeptide
MALPVTALLLPLALLLHAARPEVQLVESGGGLVQPGGSLRLSCAASGFSFSDFWMSWVRQAPGKGLEWVATISQAGSEKDYVDSVKGRFTISRDNAKKSLYLQMNSLRAEDTAVYYCASGVYSFDYRGQGTLVTVSSGTGGGGSGGGGSGGGGSEFDVVMTQTPLSLPVSLGDQASISCRSSQSLVHSNGNTYLHWYLQKPGQSPKLLIYKVSNRFSGVPDRFSGSGSGTDFTLKISRVEAEDLGVYFCSQNTPVPPKFGSGTKLEIKLEIQNPDPAVYQLRDSKSSDKSVCLFTDFDSQTNVSQSKDSDVYITDKCVLDMRSMDFKSNSAVAWSNKSDFACANAFNNSIIPEDTFFPSPESSCDVKLVEKSFETDTNLNFQNLSVIGFRILLLKVAGFNLLMTLRLWSSRAKRSGSGVKQTLNFDLLKLAGDVESNPGPTSMDWIWRILFLVGAATGAHSFEQVQLQQSGAELVRPGASVKLSCKASGYTFNDYEMHWVKQTPVHGLKWIGALEPKTGDTAYSQKFKGKATLTADKSSSTAYMELRSLTSEDSAVYYCTSCYYYTYSGQGTLVTVSATREDLKNVFPPEVAVFEPSEAEISHTQKATLVCLATGFYPDHVELSWWVNGKEVHSGVCTDPQPLKEQPALNDSRYCLSSRLRVSATFWQNPRNHFRCQVQFYGLSENDEWTQDRAKPVTQIVSAEAWGRADCGFTSESYQQGVLSATILYEILLGKATLYAVLVSALVLMAMVKRKDSRG

SEQ ID NO: 12766 - protein, 758 aa, Artificial Sequence
  Synthetic Polypeptide
MALPVTALLLPLALLLHAARPEVQLVESGGGLVQPGGSLRLSCAASGFSFSDFWMSWVRQAPGKGLEWVATISQAGSEKDYVDSVKGRFTISRDNAKKSLYLQMNSLRAEDTAVYYCASGVYSFDYRGQGTLVTVSSGTGGGGSGGGGSGGGGSEFDIQLTQSPSSLSASVGDRVTITCRASQGIRNDLGWYQQKPGKAPKRLIYAASSLQNGVPSRFSGSGSGTEFTLTISSLQPEDFATYYCLQHNTYPAFGQGTKVEIKRLEIQNPDPAVYQLRDSKSSDKSVCLFTDFDSQTNVSQSKDSDVYITDKCVLDMRSMDFKSNSAVAWSNKSDFACANAFNNSIIPEDTFFPSPESSCDVKLVEKSFETDTNLNFQNLSVIGFRILLLKVAGFNLLMTLRLWSSRAKRSGSGVKQTLNFDLLKLAGDVESNPGPTSMDWIWRILFLVGAATGAHSFEQVQLQESGPGLVKPSQTLSLTCTVSGGSISSFNYYWSWIRHHPGKGLEWIGYIYYSGSTYSNPSLKSRVTISVDTSKNQFSLTLSSVTAADTAVYYCARGYNWNYFDYWGQGTLVTVSSTREDLKNVFPPEVAVFEPSEAEISHTQKATLVCLATGFYPDHVELSWWVNGKEVHSGVCTDPQPLKEQPALNDSRYCLSSRLRVSATFWQNPRNHFRCQVQFYGLSENDEWTQDRAKPVTQIVSAEAWGRADCGFTSESYQQGVLSATILYEILLGKATLYAVLVSALVLMAMVKRKDSRG

SEQ ID NO: 12767 - protein, 760 aa, Artificial Sequence
  Synthetic Polypeptide
MALPVTALLLPLALLLHAARPEVQLVESGGGLVQPGGSLRLSCAASGFSFSDFWMSWVRQAPGKGLEWVATISQAGSEKDYVDSVKGRFTISRDNAKKSLYLQMNSLRAEDTAVYYCASGVYSFDYRGQGTLVTVSSGTGGGGSGGGGSGGGGSEFDDIVLTQSPASLAVSLGQSVTISCRASESVEYYGTSLMQWYQQKPGQPPKLLIYATSNVESGVPARFSGSGSGTDFSLNIHPVEEDDIAMYFCQQSRKLPSTFGGGTKLEIKLEIQNPDPAVYQLRDSKSSDKSVCLFTDFDSQTNVSQSKDSDVYITDKCVLDMRSMDFKSNSAVAWSNKSDFACANAFNNSIIPEDTFFPSPESSCDVKLVEKSFETDTNLNFQNLSVIGFRILLLKVAGFNLLMTLRLWSSRAKRSGSGVKQTLNFDLLKLAGDVESNPGPTSMDWIWRILFLVGAATGAHSFEDVRLQESGPGQVKPSQTVSLTCSVTGYSITNGNHWWNWIRQVSGSKLEWIGYISSSGSTDSNPSLKSRISITRDTSKNQLFLQLNSVTTEDIATYYCARGYYFDYWGQGTTLTVSSTREDLKNVFPPEVAVFEPSEAEISHTQKATLVCLATGFYPDHVELSWWVNGKEVHSGVCTDPQPLKEQPALNDSRYCLSSRLRVSATFWQNPRNHFRCQVQFYGLSENDEWTQDRAKPVTQIVSAEAWGRADCGFTSESYQQGVLSATILYEILLGKATLYAVLVSALVLMAMVKRKDSRG

SEQ ID NO: 12768 - protein, 759 aa, Artificial Sequence
  Synthetic Polypeptide
MALPVTALLLPLALLLHAARPEVQLVESGGGLVQPGGSLRLSCAASGFSFSDFWMSWVRQAPGKGLEWVATISQAGSEKDYVDSVKGRFTISRDNAKKSLYLQMNSLRAEDTAVYYCASGVYSFDYRGQGTLVTVSSGTGGGGSGGGGSGGGGSEFDIQMTQSPSSLSASVGDRVTITCRASQDVNTAVAWYQQKPGKAPKLLIYSASFLESGVPSRFSGSRSGTDFTLTISSLQPEDFATYYCQQHYTTPPTFGQTKVEIKRLEIQNPDPAVYQLRDSKSSDKSVCLFTDFDSQTNVSQSKDSDVYITDKCVLDMRSMDFKSNSAVAWSNKSDFACANAFNNSIIPEDTFFPSPESSCDVKLVEKSFETDTNLNFQNLSVIGFRILLLKVAGFNLLMTLRLWSSRAKRSGSGVKQTLNFDLLKLAGDVESNPGPTSMDWIWRILFLVGAATGAHSFEEVQLVESGGGLVQPGGSLRLSCAASGFNIKDTYIHWVRQAPGKGLEWVARIYPTNGYTRYADSVKGRFTISADTSKNTAYLQMNSLRAEDTAVYYCSRWGGDGFYAMDVWGQGTLVTVSSTREDLKNVFPPEVAVFEPSEAEISHTQKATLVCLATGFYPDHVELSWWVNGKEVHSGVCTDPQPLKEQPALNDSRYCLSSRLRVSATFWQNPRNHFRCQVQFYGLSENDEWTQDRAKPVTQIVSAEAWGRADCGFTSESYQQGVLSATILYEILLGKATLYAVLVSALVLMAMVKRKDSRG

SEQ ID NO: 12769 - protein, 758 aa, Artificial Sequence
  Synthetic Polypeptide
MALPVTALLLPLALLLHAARPEVQLVESGGGLVQPGGSLRLSCAASGFSFSDFWMSWVRQAPGKGLEWVATISQAGSEKDYVDSVKGRFTISRDNAKKSLYLQMNSLRAEDTAVYYCASGVYSFDYRGQGTLVTVSSGTGGGGSGGGGSGGGGSEFDQSVLTQPPSVSVAPGKTARIPCEGNYIGSSNVHWYQQKPGQAPVLVIHFDSDRPSGIPDRFSGSNSGNMATLTISRVEAGDEADYYCQVWENHGWVFGGGTKLTVLSLEIQNPDPAVYQLRDSKSSDKSVCLFTDFDSQTNVSQSKDSDVYITDKCVLDMRSMDFKSNSAVAWSNKSDFACANAFNNSIIPEDTFFPSPESSCDVKLVEKSFETDTNLNFQNLSVIGFRILLLKVAGFNLLMTLRLWSSRAKRSGSGVKQTLNFDLLKLAGDVESNPGPTSMDWIWRILFLVGAATGAHSFEEVQLVETGGGLVQPGESLRLSCAASGFTFSDYEMNWVRQAPGKGLEWVSYISSSGSTIYYADSVKGRFTIYRDNAKNSLYLQMNSLRAEDTALYYCARAWGVGPPDYWGQGTLVTVSSTREDLKNVFPPEVAVFEPSEAEISHTQKATLVCLATGFYPDHVELSWWVNGKEVHSGVCTDPQPLKEQPALNDSRYCLSSRLRVSATFWQNPRNHFRCQVQFYGLSENDEWTQDRAKPVTQIVSAEAWGRADCGFTSESYQQGVLSATILYEILLGKATLYAVLVSALVLMAMVKRKDSRG

SEQ ID NO: 12770 - protein, 766 aa, Artificial Sequence
  Synthetic Polypeptide
MALPVTALLLPLALLLHAARPEVQLVESGGGLVQPGGSLRLSCAASGFSFSDFWMSWVRQAPGKGLEWVATISQAGSEKDYVDSVKGRFTISRDNAKKSLYLQMNSLRAEDTAVYYCASGVYSFDYRGQGTLVTVSSGTGGGGSGGGGSGGGGSEFDIQMTQSPSSLSASVGDTVTITCQANGYLNWYQQRRGKAPKLLIYDGSKLERGVPSRFSGRRWGQEYNLTINNLQPEDIATYFCQVYEFVVPGTRLDLKRTVAAPLEIQNPDPAVYQLRDSKSSDKSVCLFTDFDSQTNVSQSKDSDVYITDKCVLDMRSMDFKSNSAVAWSNKSDFACANAFNNSIIPEDTFFPSPESSCDVKLVEKSFETDTNLNFQNLSVIGFRILLLKVAGFNLLMTLRLWSSRAKRSGSGVKQTLNFDLLKLAGDVESNPGPTSMDWIWRILFLVGAATGAHSFEQVQLLQSGAAVTKPGASVRVSCEASGYNIRDYFIHWWRQAPGQGLQWVGWINPKTGQPNNPRQFQGRVSLTRHASWDFDTFSFYMDLKALRSDDTAVYFCARQRSDYWDFDVWGSGTQVTVSSASTKGPTREDLKNVFPPEVAVFEPSEAEISHTQKATLVCLATGFYPDHVELSWWVNGKEVHSGVCTDPQPLKEQPALNDSRYCLSSRLRVSATFWQNPRNHFRCQVQFYGLSENDEWTQDRAKPVTQIVSAEAWGRADCGFTSESYQQGVLSATILYEILLGKATLYAVLVSALVLMAMVKRKDSRG

SEQ ID NO: 12771 - protein, 772 aa, Artificial Sequence
  Synthetic Polypeptide
MALPVTALLLPLALLLHAARPEVQLVESGGGLVQPGGSLRLSCAASGFSFSDFWMSWVRQAPGKGLEWVATISQAGSEKDYVDSVKGRFTISRDNAKKSLYLQMNSLRAEDTAVYYCASGVYSFDYRGQGTLVTVSSGTGGGGSGGGGSGGGGSEFQSALTQPPSASGSPGQSITISCTGTSNNFVSWYQQHAGKAPKLVIYDVNKRPSGVPDRFSGSKSGNTASLTVSGLQTDDEAVYYCGSLVGNWDVIFGGGTKLTVLLEIQNPDPAVYQLRDSKSSDKSVCLFTDFDSQTNVSQSKDSDVYITDKCVLDMRSMDFKSNSAVAWSNKSDFACANAFNNSIIPEDTFFPSPESSCDVKLVEKSFETDTNLNFQNLSVIGFRILLLKVAGFNLLMTLRLWSSRAKRSGSGVKQTLNFDLLKLAGDVESNPGPTSMDWIWRILFLVGAATGAHSFEQPQLQESGPTLVEASETLSLTCAVSGDSTAACNSFWGWVRQPPGKGLEWVGSLSHCASYWNRGWTYHNPSLKSRLTLALDTPKNLVFLKLNSVTAADTATYYCARFGGEVLRYTDWPKPAWVDLWGRGTLVTVSSTREDLKNVFPPEVAVFEPSEAEISHTQKATLVCLATGFYPDHVELSWWVNGKEVHSGVCTDPQPLKEQPALNDSRYCLSSRLRVSATFWQNPRNHFRCQVQFYGLSENDEWTQDRAKPVTQIVSAEAWGRADCGFTSESYQQGVLSATILYEILLGKATLYAVLVSALVLMAMVKRKDSRG

SEQ ID NO: 12772 - protein, 757 aa, Artificial Sequence
  Synthetic Polypeptide
MALPVTALLLPLALLLHAARPEVQLVESGGGLVQPGGSLRLSCAASGFSFSDFWMSWVRQAPGKGLEWVATISQAGSEKDYVDSVKGRFTISRDNAKKSLYLQMNSLRAEDTAVYYCASGVYSFDYRGQGTLVTVSSGTGGGGSGGGGSGGGGSEFEIVLTQSPGTLSLSPGETAIISCRTSQYGSLAWYQQRPGQAPRLVIYSGSTRAAGIPDRFSGSRWGPDYNLTISNLESGDFGVYYCQQYEFFGQGTKVQVDIKRLEIQNPDPAVYQLRDSKSSDKSVCLFTDFDSQTNVSQSKDSDVYITDKCVLDMRSMDFKSNSAVAWSNKSDFACANAFNNSIIPEDTFFPSPESSCDVKLVEKSFETDTNLNFQNLSVIGFRILLLKVAGFNLLMTLRLWSSRAKRSGSGVKQTLNFDLLKLAGDVESNPGPTSMDWIWRILFLVGAATGAHSFEQVQLVQSGGQMKKPGESMRISCRASGYEFIDCTLNWIRLAPGKRPEWMGWLKPRGGAVNYARPLQGRVTMTRDVYSDTAFLELRSLTVDDTAVYFCTRGKNCDYNWDFEHWGRGTPVIVSSTREDLKNVFPPEVAVFEPSEAEISHTQKATLVCLATGFYPDHVELSWWVNGKEVHSGVCTDPQPLKEQPALNDSRYCLSSRLRVSATFWQNPRNHFRCQVQFYGLSENDEWTQDRAKPVTQIVSAEAWGRADCGFTSESYQQGVLSATILYEILLGKATLYAVLVSALVLMAMVKRKDSRG

SEQ ID NO: 12773 - protein, 767 aa, Artificial Sequence
  Synthetic Polypeptide
MALPVTALLLPLALLLHAARPEVQLVESGGGLVQPGGSLRLSCAASGFSFSDFWMSWVRQAPGKGLEWVATISQAGSEKDYVDSVKGRFTISRDNAKKSLYLQMNSLRAEDTAVYYCASGVYSFDYRGQGTLVTVSSGTGGGGSGGGGSGGGGSEFELVLTQSPGTLSLSAGERATLSCRASQSVSSGSLAWYQQKPGQAPRLLIYGASTRATGIPDRFSGSGSGTDFTLTIGRLEPEDLAVYYCQQYGTSPYTFGQGTKLEILEIQNPDPAVYQLRDSKSSDKSVCLFTDFDSQTNVSQSKDSDVYITDKCVLDMRSMDFKSNSAVAWSNKSDFACANAFNNSIIPEDTFFPSPESSCDVKLVEKSFETDTNLNFQNLSVIGFRILLLKVAGFNLLMTLRLWSSRAKRSGSGVKQTLNFDLLKLAGDVESNPGPTSMDWIWRILFLVGAATGAHSFELEQSGAEVKKPGSSVQVSCKASGGTFSMYGFNWVRQAPGHGLEWMGGIIPIFGTSNYAQKFRGRVTFTADQATSTAYMELTNLRSDDTAVYYCARDFGPDWEDGDSYDGSGRGFFDFWGQGTLVTVSSTREDLKNVFPPEVAVFEPSEAEISHTQKATLVCLATGFYPDHVELSWWVNGKEVHSGVCTDPQPLKEQPALNDSRYCLSSRLRVSATFWQNPRNHFRCQVQFYGLSENDEWTQDRAKPVTQIVSAEAWGRADCGFTSESYQQGVLSATILYEILLGKATLYAVLVSALVLMAMVKRKDSRG

SEQ ID NO: 12774 - protein, 747 aa, Artificial Sequence
  Synthetic Polypeptide
MALPVTALLLPLALLLHAARPEVQLVESGGGLVQPGGSLRLSCAASGFSFSDFWMSWVRQAPGKGLEWVATISQAGSEKDYVDSVKGRFTISRDNAKKSLYLQMNSLRAEDTAVYYCASGVYSFDYRGQGTLVTVSSGTGGGGSGGGGSGGGGSEFDIQMTQSPSSLSASVGDRVTITCQASQDINNYLNWYQQKPGKAPKLLIYDASNLQTGVPSRFSGSGSGTDFTFTIEDIATYYCQQYTFGPGTKVDIKLEIQNPDPAVYQLRDSKSSDKSVCLFTDFDSQTNVSQSKDSDVYITDKCVLDMRSMDFKSNSAVAWSNKSDFACANAFNNSIIPEDTFFPSPESSCDVKLVEKSFETDTNLNFQNLSVIGFRILLLKVAGFNLLMTLRLWSSRAKRSGSGVKQTLNFDLLKLAGDVESNPGPTSMDWIWRILFLVGAATGAHSFEEVQLLESGGGLVQPGGSLRLSCAASGFTFSWYSMTWVRQAPGKGLEWVSSIVPWGDFTQYADSVKGRFTISRDNSKNTLYLQMNSLRAEDTAVYYCAKGPGWGSFDLWGRGTLVTVSSTREDLKNVFPPEVAVFEPSEAEISHTQKATLVCLATGFYPDHVELSWWVNGKEVHSGVCTDPQPLKEQPALNDSRYCLSSRLRVSATFWQNPRNHFRCQVQFYGLSENDEWTQDRAKPVTQIVSAEAWGRADCGFTSESYQQGVLSATILYEILLGKATLYAVLVSALVLMAMVKRKDSRG

SEQ ID NO: 12775 - protein, 757 aa, Artificial Sequence
  Synthetic Polypeptide
MALPVTALLLPLALLLHAARPEVQLVESGGGLVQPGGSLRLSCAASGFSFSDFWMSWVRQAPGKGLEWVATISQAGSEKDYVDSVKGRFTISRDNAKKSLYLQMNSLRAEDTAVYYCASGVYSFDYRGQGTLVTVSSGTGGGGSGGGGSGGGGSEFDIQMTQSPSSLSASVGDRVTITCTASLSVSSTYLHWYQQKPGSSPKLWIYSTSNLASGVPSRFSGSGSGTSYTLTISSLQPEDFATYYCHQYHRSPLTFGGGTKVEIKRLEIQNPDPAVYQLRDSKSSDKSVCLFTDFDSQTNVSQSKDSDVYITDKCVLDMRSMDFKSNSAVAWSNKSDFACANAFNNSIIPEDTFFPSPESSCDVKLVEKSFETDTNLNFQNLSVIGFRILLLKVAGFNLLMTLRLWSSRAKRSGSGVKQTLNFDLLKLAGDVESNPGPTSMDWIWRILFLVGAATGAHSFEEVQLVESGGGLVQPGGSLRLSCAASGFSLTKYGVHWVRQAPGKGLEWVGVKWAGGSTDYNSALMSRFTISKDNAKNSLYLQMNSLRAEDTAVYYCARDHRDAMDYWGQGTLVTVSSTREDLKNVFPPEVAVFEPSEAEISHTQKATLVCLATGFYPDHVELSWWVNGKEVHSGVCTDPQPLKEQPALNDSRYCLSSRLRVSATFWQNPRNHFRCQVQFYGLSENDEWTQDRAKPVTQIVSAEAWGRADCGFTSESYQQGVLSATILYEILLGKATLYAVLVSALVLMAMVKRKDSRG

SEQ ID NO: 12776 - protein, 761 aa, Artificial Sequence
  Synthetic Polypeptide
MALPVTALLLPLALLLHAARPEVQLVESGGGLVQPGGSLRLSCAASGFSFSDFWMSWVRQAPGKGLEWVATISQAGSEKDYVDSVKGRFTISRDNAKKSLYLQMNSLRAEDTAVYYCASGVYSFDYRGQGTLVTVSSGTGGGGSGGGGSGGGGSEFDIQMTQSPSSLSASVGDRVTITCKASQDVGTAVAWYQQKPGKAPKLLIYSASYRSTGVPSRFSGSGSGTDFTLTISSLQPEDFATYYCQHHYSAPWTFGGGTKVEIKLEIQNPDPAVYQLRDSKSSDKSVCLFTDFDSQTNVSQSKDSDVYITDKCVLDMRSMDFKSNSAVAWSNKSDFACANAFNNSIIPEDTFFPSPESSCDVKLVEKSFETDTNLNFQNLSVIGFRILLLKVAGFNLLMTLRLWSSRAKRSGSGVKQTLNFDLLKLAGDVESNPGPTSMDWIWRILFLVGAATGAHSFEEVQLVESGGGLVQPGGSLRLSCAASGFTFSRNGMSWVRQAPGKGLEWVATVSSGGSYIYYADSVKGRFTISRDNAKNSLYLQMNSLRAEDTAVYYCARQGTTALATRFFDVWGQGTLVTVSSTREDLKNVFPPEVAVFEPSEAEISHTQKATLVCLATGFYPDHVELSWWVNGKEVHSGVCTDPQPLKEQPALNDSRYCLSSRLRVSATFWQNPRNHFRCQVQFYGLSENDEWTQDRAKPVTQIVSAEAWGRADCGFTSESYQQGVLSATILYEILLGKATLYAVLVSALVLMAMVKRKDSRG

SEQ ID NO: 12777 - protein, 757 aa, Artificial Sequence
  Synthetic Polypeptide
MALPVTALLLPLALLLHAARPEVQLVESGGGLVQPGGSLRLSCAASGFSFSDFWMSWVRQAPGKGLEWVATISQAGSEKDYVDSVKGRFTISRDNAKKSLYLQMNSLRAEDTAVYYCASGVYSFDYRGQGTLVTVSSGTGGGGSGGGGSGGGGSEFDIQMTQSPPSLSASVGGKVTITCKASQDIDRYMAWYQDKPGKGPKLLIHDTSTLQPGIPSRFSGSGSGRDYSFSISNLEPEDIATYYCLQYDNLWTFGGGTKLEIKRLEIQNPDPAVYQLRDSKSSDKSVCLFTDFDSQTNVSQSKDSDVYITDKCVLDMRSMDFKSNSAVAWSNKSDFACANAFNNSIIPEDTFFPSPESSCDVKLVEKSFETDTNLNFQNLSVIGFRILLLKVAGFNLLMTLRLWSSRAKRSGSGVKQTLNFDLLKLAGDVESNPGPTSMDWIWRILFLVGAATGAHSFEQVQLVQSGAELVKPGASVKMSCKASGYIFTNYNIHWVKKSPGQGLEWIGAIYPGNGDAPYSQKFQDRATLTADTSSSTTYMELSSLTSEDSAVYYCVRANWDVAFAYWGQGTLVSVSSTREDLKNVFPPEVAVFEPSEAEISHTQKATLVCLATGFYPDHVELSWWVNGKEVHSGVCTDPQPLKEQPALNDSRYCLSSRLRVSATFWQNPRNHFRCQVQFYGLSENDEWTQDRAKPVTQIVSAEAWGRADCGFTSESYQQGVLSATILYEILLGKATLYAVLVSALVLMAMVKRKDSRG

SEQ ID NO: 12778 - protein, 758 aa, Artificial Sequence
  Synthetic Polypeptide
MALPVTALLLPLALLLHAARPEVQLVESGGGLVQPGGSLRLSCAASGFSFSDFWMSWVRQAPGKGLEWVATISQAGSEKDYVDSVKGRFTISRDNAKKSLYLQMNSLRAEDTAVYYCASGVYSFDYRGQGTLVTVSSGTGGGGSGGGGSGGGGSEFDIQMTQSPASLSASVGETVTITCRVSGNIHNYLAWYQQKQGKSPQLLVYNAKTLADGVPSRFSGSGSGTQYSLKINSLQPEDFGSYYCQHFWSNPYTFGGGTKLEIKLEIQNPDPAVYQLRDSKSSDKSVCLFTDFDSQTNVSQSKDSDVYITDKCVLDMRSMDFKSNSAVAWSNKSDFACANAFNNSIIPEDTFFPSPESSCDVKLVEKSFETDTNLNFQNLSVIGFRILLLKVAGFNLLMTLRLWSSRAKRSGSGVKQTLNFDLLKLAGDVESNPGPTSMDWIWRILFLVGAATGAHSFEQVQLQQSGASVKVSCKASELVRPGTGYAFTNYLIEWVKQRPGQGLEWIGVINPGSGGTNYNEKFKGKATLTADKSSSTAYMQLSSLTSDDSAVYFCARYRSYDWYFDVWGAGTTVTVSSTREDLKNVFPPEVAVFEPSEAEISHTQKATLVCLATGFYPDHVELSWWVNGKEVHSGVCTDPQPLKEQPALNDSRYCLSSRLRVSATFWQNPRNHFRCQVQFYGLSENDEWTQDRAKPVTQIVSAEAWGRADCGFTSESYQQGVLSATILYEILLGKATLYAVLVSALVLMAMVKRKDSRG

SEQ ID NO: 12779 - protein, 757 aa, Artificial Sequence
  Synthetic Polypeptide
MALPVTALLLPLALLLHAARPEVQLVESGGGLVQPGGSLRLSCAASGFSFSDFWMSWVRQAPGKGLEWVATISQAGSEKDYVDSVKGRFTISRDNAKKSLYLQMNSLRAEDTAVYYCASGVYSFDYRGQGTLVTVSSGTGGGGSGGGGSGGGGSEFDIQMTQSFSSLSASVGDRVTITCRASQDISNYLNWYQQKPGKAPKLLIYYTSRLHSGVPSRFSGSGSGTDYTLTISSLQPEDFATYFCQQGNTLPWTFGGGTKLEIKRLEIQNPDPAVYQLRDSKSSDKSVCLFTDFDSQTNVSQSKDSDVYITDKCVLDMRSMDFKSNSAVAWSNKSDFACANAFNNSIIPEDTFFPSPESSCDVKLVEKSFETDTNLNFQNLSVIGFRILLLKVAGFNLLMTLRLWSSRAKRSGSGVKQTLNFDLLKLAGDVESNPGPTSMDWIWRILFLVGAATGAHSFEEVQLVQSGGGLVQSGGSLRLSCRASGYTFTRYWMLWVRQRPGKGLEWVAEINPRNDRTNYNEKFKTRFTISVDRSKNTLYLQMDSLRAEDTAVYFCALGGGYAMDYWGQGTLVTVSSTREDLKNVFPPEVAVFEPSEAEISHTQKATLVCLATGFYPDHVELSWWVNGKEVHSGVCTDPQPLKEQPALNDSRYCLSSRLRVSATFWQNPRNHFRCQVQFYGLSENDEWTQDRAKPVTQIVSAEAWGRADCGFTSESYQQGVLSATILYEILLGKATLYAVLVSALVLMAMVKRKDSRG

SEQ ID NO: 12780 - protein, 758 aa, Artificial Sequence
  Synthetic Polypeptide
MALPVTALLLPLALLLHAARPEVQLVESGGGLVQPGGSLRLSCAASGFSFSDFWMSWVRQAPGKGLEWVATISQAGSEKDYVDSVKGRFTISRDNAKKSLYLQMNSLRAEDTAVYYCASGVYSFDYRGQGTLVTVSSGTGGGGSGGGGSGGGGSEFDIQMTQSPASLSASVGETVTIICRASVNIYSYLAWYQQKQGKSPQLLVYNAKILAEGVPSRFSGSGSGTQFSLKINSLQPEDFGSYYCQHHYGTFTFGSGTKLEIKRLEIQNPDPAVYQLRDSKSSDKSVCLFTDFDSQTNVSQSKDSDVYITDKCVLDMRSMDFKSNSAVAWSNKSDFACANAFNNSIIPEDTFFPSPESSCDVKLVEKSFETDTNLNFQNLSVIGFRILLLKVAGFNLLMTLRLWSSRAKRSGSGVKQTLNFDLLKLAGDVESNPGPTSMDWIWRILFLVGAATGAHSFEQVQLKESGPGLVAPSQSLSITCTISGFSLTSYGVHWVRQPPGKGLEWLVVIWSDGSTTYNSALKSRLSISKDNSKSQVFLKMNSLQTDDTAIYYCASHYGSTLAFASWGHGTLVTVSAATREDLKNVFPPEVAVFEPSEAEISHTQKATLVCLATGFYPDHVELSWWVNGKEVHSGVCTDPQPLKEQPALNDSRYCLSSRLRVSATFWQNPRNHFRCQVQFYGLSENDEWTQDRAKPVTQIVSAEAWGRADCGFTSESYQQGVLSATILYEILLGKATLYAVLVSALVLMAMVKRKDSRG

SEQ ID NO: 12781 - protein, 766 aa, Artificial Sequence
  Synthetic Polypeptide
MALPVTALLLPLALLLHAARPEVQLVESGGGLVQPGGSLRLSCAASGFSFSDFWMSWVRQAPGKGLEWVATISQAGSEKDYVDSVKGRFTISRDNAKKSLYLQMNSLRAEDTAVYYCASGVYSFDYRGQGTLVTVSSGTGGGGSGGGGSGGGGSEFDIVMTQSHKFMSTSVGDRVSVTCKASQNVGNNVAWYQQKPGQSPKVLIYSASYRYSGVPDRFTGSGSGTDFTLTISNVQSEDLAEYFCQQYNTYPFTFGSGTKLEIKLEIQNPDPAVYQLRDSKSSDKSVCLFTDFDSQTNVSQSKDSDVYITDKCVLDMRSMDFKSNSAVAWSNKSDFACANAFNNSIIPEDTFFPSPESSCDVKLVEKSFETDTNLNFQNLSVIGFRILLLKVAGFNLLMTLRLWSSRAKRSGSGVKQTLNFDLLKLAGDVESNPGPTSMDWIWRILFLVGAATGAHSFEEVQLEESGGGLVQPGGSMKLSCVASGFTFSNYWMNWVRQSPEKGLEWVAEIRFKSHNYATHFAESVKGRFTISRDDSKSSVYLQMNNLRAEDTGIYYCTRRIGNSDYDWWYFDVWGAGTSVTVSSASTREDLKNVFPPEVAVFEPSEAEISHTQKATLVCLATGFYPDHVELSWWVNGKEVHSGVCTDPQPLKEQPALNDSRYCLSSRLRVSATFWQNPRNHFRCQVQFYGLSENDEWTQDRAKPVTQIVSAEAWGRADCGFTSESYQQGVLSATILYEILLGKATLYAVLVSALVLMAMVKRKDSRG

SEQ ID NO: 12782 - protein, 759 aa, Artificial Sequence
  Synthetic Polypeptide
MALPVTALLLPLALLLHAARPEVQLVESGGGLVQPGGSLRLSCAASGFSFSDFWMSWVRQAPGKGLEWVATISQAGSEKDYVDSVKGRFTISRDNAKKSLYLQMNSLRAEDTAVYYCASGVYSFDYRGQGTLVTVSSGTGGGGSGGGGSGGGGSEFDQIVLTQSPAIMSASPGEKVTISCSASSSVSYMYWYQQKPGSSPKPWIYRTSNLASGVPARFSGSGSGTSYSLTISNMEAEDAAAYYCQQYHSYPTTFGGGTKLEVKLEIQNPDPAVYQLRDSKSSDKSVCLFTDFDSQTNVSQSKDSDVYITDKCVLDMRSMDFKSNSAVAWSNKSDFACANAFNNSIIPEDTFFPSPESSCDVKLVEKSFETDTNLNFQNLSVIGFRILLLKVAGFNLLMTLRLWSSRAKRSGSGVKQTLNFDLLKLAGDVESNPGPTSMDWIWRILFLVGAATGAHSFEEVQLVESGGGLVQPKGSLKLSCAASGFSFNTYAMNWVRQAPGKGLEWIAHIRSKSNNFATYYADSVKDRFSISRDASENILFLQMNNLKTEDTAMYYCVRQGGDFPMDYWGQGTSVTVSSTREDLKNVFPPEVAVFEPSEAEISHTQKATLVCLATGFYPDHVELSWWVNGKEVHSGVCTDPQPLKEQPALNDSRYCLSSRLRVSATFWQNPRNHFRCQVQFYGLSENDEWTQDRAKPVTQIVSAEAWGRADCGFTSESYQQGVLSATILYEILLGKATLYAVLVSALVLMAMVKRKDSRG

SEQ ID NO: 12783 - protein, 758 aa, Artificial Sequence
  Synthetic Polypeptide
MALPVTALLLPLALLLHAARPEVQLVESGGGLVQPGGSLRLSCAASGFSFSDFWMSWVRQAPGKGLEWVATISQAGSEKDYVDSVKGRFTISRDNAKKSLYLQMNSLRAEDTAVYYCASGVYSFDYRGQGTLVTVSSGTGGGGSGGGGSGGGGSEFDDIQMTQSSSSFSVSLGDRVTITCMASEDIYIRLAWYQQKPGNAPRLLISAATSLETGVPSRFSGSGSGKDYTLSITSLQTEDVGTYYCQQYWSSPWTFGGGTKLEINLEIQNPDPAVYQLRDSKSSDKSVCLFTDFDSQTNVSQSKDSDVYITDKCVLDMRSMDFKSNSAVAWSNKSDFACANAFNNSIIPEDTFFPSPESSCDVKLVEKSFETDTNLNFQNLSVIGFRILLLKVAGFNLLMTLRLWSSRAKRSGSGVKQTLNFDLLKLAGDVESNPGPTSMDWIWRILFLVGAATGAHSFEDVQLQESGPGLVKPSQSLSLTCTVTGYSITSDYTWNWIRQFPGNKLEWMGYITYSGSTSYNPSLKSRNSITRDTSKNQFFLQLNSVTTEDTATYYCARLGRRYTMDYWGQGTSVTVSSTREDLKNVFPPEVAVFEPSEAEISHTQKATLVCLATGFYPDHVELSWWVNGKEVHSGVCTDPQPLKEQPALNDSRYCLSSRLRVSATFWQNPRNHFRCQVQFYGLSENDEWTQDRAKPVTQIVSAEAWGRADCGFTSESYQQGVLSATILYEILLGKATLYAVLVSALVLMAMVKRKDSRG

SEQ ID NO: 12784 - protein, 761 aa, Artificial Sequence
  Synthetic Polypeptide
MALPVTALLLPLALLLHAARPEVQLVESGGGLVQPGGSLRLSCAASGFSFSDFWMSWVRQAPGKGLEWVATISQAGSEKDYVDSVKGRFTISRDNAKKSLYLQMNSLRAEDTAVYYCASGVYSFDYRGQGTLVTVSSGTGGGGSGGGGSGGGGSEFDDIQMTQSPSSLSASVGDRVTITCRASQSISSYLNWYQQKPGKAPKLLIYDASNLETGVPSRFSGSGSGTDFTFTISSLQPEDIATYYCQQYDNLPLTFGGGTKVDIKRLEIQNPDPAVYQLRDSKSSDKSVCLFTDFDSQTNVSQSKDSDVYITDKCVLDMRSMDFKSNSAVAWSNKSDFACANAFNNSIIPEDTFFPSPESSCDVKLVEKSFETDTNLNFQNLSVIGFRILLLKVAGFNLLMTLRLWSSRAKRSGSGVKQTLNFDLLKLAGDVESNPGPTSMDWIWRILFLVGAATGAHSFEQVQLVESGGGVVQPGRSLRLSCAASGFTFSSYAMHWVRQAPGKGLEWVAVISYDGSNKYYADSVKGRFTISRDNSKNTLYLQMNSLRAEDTAVYYCARAHNSSSWSFDYWGQGTLVTVSSTREDLKNVFPPEVAVFEPSEAEISHTQKATLVCLATGFYPDHVELSWWVNGKEVHSGVCTDPQPLKEQPALNDSRYCLSSRLRVSATFWQNPRNHFRCQVQFYGLSENDEWTQDRAKPVTQIVSAEAWGRADCGFTSESYQQGVLSATILYEILLGKATLYAVLVSALVLMAMVKRKDSRG

SEQ ID NO: 12785 - protein, 770 aa, Artificial Sequence
  Synthetic Polypeptide
MALPVTALLLPLALLLHAARPEVQLVESGGGLVQPGGSLRLSCAASGFSFSDFWMSWVRQAPGKGLEWVATISQAGSEKDYVDSVKGRFTISRDNAKKSLYLQMNSLRAEDTAVYYCASGVYSFDYRGQGTLVTVSSGTGGGGSGGGGSGGGGSEFDDVVMTQSPLSLPVSLGDQASISCRSSQRLVHSNGNTYLHWYLQKPGQSPKLLIYRVSNRFPGVPDRFSGSGSGTDFTLKISRVEAEDLGIYFCSQSTHVPYTFGGGTKLEIKRLEIQNPDPAVYQLRDSKSSDKSVCLFTDFDSQTNVSQSKDSDVYITDKCVLDMRSMDFKSNSAVAWSNKSDFACANAFNNSIIPEDTFFPSPESSCDVKLVEKSFETDTNLNFQNLSVIGFRILLLKVAGFNLLMTLRLWSSRAKRSGSGVKQTLNFDLLKLAGDVESNPGPTSMDWIWRILFLVGAATGAHSFEEVRLQQSGPDLIKPGASVKMSCKASGYTFTGYVMHWVKQRPGQGLEWIGFINPYNDDIQSNERFRGKATLTSDKSSTTAYMELSSLTSEDSAVYYCARGAGYNFDGAYRFFDFWGQGTTLTVSSTREDLKNVFPPEVAVFEPSEAEISHTQKATLVCLATGFYPDHVELSWWVNGKEVHSGVCTDPQPLKEQPALNDSRYCLSSRLRVSATFWQNPRNHFRCQVQFYGLSENDEWTQDRAKPVTQIVSAEAWGRADCGFTSESYQQGVLSATILYEILLGKATLYAVLVSALVLMAMVKRKDSRG

SEQ ID NO: 12786 - protein, 761 aa, Artificial Sequence
  Synthetic Polypeptide
MALPVTALLLPLALLLHAARPEVQLVESGGGLVQPGGSLRLSCAASGFSFSDFWMSWVRQAPGKGLEWVATISQAGSEKDYVDSVKGRFTISRDNAKKSLYLQMNSLRAEDTAVYYCASGVYSFDYRGQGTLVTVSSGTGGGGSGGGGSGGGGSEFDSYELTQPPSVSVSPGQTATISCSGDQLGGKYGHWYQKKPGQSPVLVLYQDRKRPAGIPERFSGSSSGNTITLTISGTQAVDEADYYCQAWDTNLGGVFGGGTKVTVLGQLEIQNPDPAVYQLRDSKSSDKSVCLFTDFDSQTNVSQSKDSDVYITDKCVLDMRSMDFKSNSAVAWSNKSDFACANAFNNSIIPEDTFFPSPESSCDVKLVEKSFETDTNLNFQNLSVIGFRILLLKVAGFNLLMTLRLWSSRAKRSGSGVKQTLNFDLLKLAGDVESNPGPTSMDWIWRILFLVGAATGAHSFEQVQLVESGAEVKKPGASVKVSCKASGYTFTGYYMHWVRQAPGQGLEWMGRINPNSGGTNYAQKFQGRVTMTRDTSISTAYMELSRLRSDDTAVYYCASPRGRGSAFDIWGQGTLVTVSSTREDLKNVFPPEVAVFEPSEAEISHTQKATLVCLATGFYPDHVELSWWVNGKEVHSGVCTDPQPLKEQPALNDSRYCLSSRLRVSATFWQNPRNHFRCQVQFYGLSENDEWTQDRAKPVTQIVSAEAWGRADCGFTSESYQQGVLSATILYEILLGKATLYAVLVSALVLMAMVKRKDSRG

SEQ ID NO: 12787 - protein, 764 aa, Artificial Sequence
  Synthetic Polypeptide
MALPVTALLLPLALLLHAARPEVQLVESGGGLVQPGGSLRLSCAASGFSFSDFWMSWVRQAPGKGLEWVATISQAGSEKDYVDSVKGRFTISRDNAKKSLYLQMNSLRAEDTAVYYCASGVYSFDYRGQGTLVTVSSGTGGGGSGGGGSGGGGSEFDNFMLTQPHSVSESPGKTVTISCTRSSGSIASKYVQWYQQRPGSSPTTVIYEDNQRPSGVPDRFSGSIDTSSNSASLTISGLRTEDEADYYCHSYDSNNHSVFGGGTKVTVLGQLEIQNPDPAVYQLRDSKSSDKSVCLFTDFDSQTNVSQSKDSDVYITDKCVLDMRSMDFKSNSAVAWSNKSDFACANAFNNSIIPEDTFFPSPESSCDVKLVEKSFETDTNLNFQNLSVIGFRILLLKVAGFNLLMTLRLWSSRAKRSGSGVKQTLNFDLLKLAGDVESNPGPTSMDWIWRILFLVGAATGAHSFEEVQLVESGGGVVQPGGSLRLSCAASGFTFSSYAMSWVRQAPGKGLEWVSAISGSGGSTYYADSVKGRFSISRDNSKNTLYLQMNSLRAEDTAVYYCARTRSSGAFDIWGQGTLVTVSSTREDLKNVFPPEVAVFEPSEAEISHTQKATLVCLATGFYPDHVELSWWVNGKEVHSGVCTDPQPLKEQPALNDSRYCLSSRLRVSATFWQNPRNHFRCQVQFYGLSENDEWTQDRAKPVTQIVSAEAWGRADCGFTSESYQQGVLSATILYEILLGKATLYAVLVSALVLMAMVKRKDSRG

SEQ ID NO: 12788 - protein, 759 aa, Artificial Sequence
  Synthetic Polypeptide
MALPVTALLLPLALLLHAARPEVQLVESGGGLVQPGGSLRLSCAASGFSFSDFWMSWVRQAPGKGLEWVATISQAGSEKDYVDSVKGRFTISRDNAKKSLYLQMNSLRAEDTAVYYCASGVYSFDYRGQGTLVTVSSGTGGGGSGGGGSGGGGSEFDIQMNQSPSSLSASLGDTITITCHASQNINVWLSWYQQKPGNIPKLLIYKASNLHTGVPSRFSGSGSGTGFTITISSLQPEDIATYYCQQGQSYPWTFGGGTKLEIKRLEIQNPDPAVYQLRDSKSSDKSVCLFTDFDSQTNVSQSKDSDVYITDKCVLDMRSMDFKSNSAVAWSNKSDFACANAFNNSIIPEDTFFPSPESSCDVKLVEKSFETDTNLNFQNLSVIGFRILLLKVAGFNLLMTLRLWSSRAKRSGSGVKQTLNFDLLKLAGDVESNPGPTSMDWIWRILFLVGAATGAHSFEEVQLQQSGPELVKPGASVKISCKASGYSFTGYFMNWVKQSHGKSLEYIGRFNPYNGETLYNQKFKGKATLTVDKSSSTVHMELLSVTSEDSAVYYCGRSGNDDAMDYWGQGTSVTVSSATREDLKNVFPPEVAVFEPSEAEISHTQKATLVCLATGFYPDHVELSWWVNGKEVHSGVCTDPQPLKEQPALNDSRYCLSSRLRVSATFWQNPRNHFRCQVQFYGLSENDEWTQDRAKPVTQIVSAEAWGRADCGFTSESYQQGVLSATILYEILLGKATLYAVLVSALVLMAMVKRKDSRG

SEQ ID NO: 12789 - protein, 760 aa, Artificial Sequence
  Synthetic Polypeptide
MALPVTALLLPLALLLHAARPEVQLVESGGGLVQPGGSLRLSCAASGFSFSDFWMSWVRQAPGKGLEWVATISQAGSEKDYVDSVKGRFTISRDNAKKSLYLQMNSLRAEDTAVYYCASGVYSFDYRGQGTLVTVSSGTGGGGSGGGGSGGGGSEFEIVLTQSPATLSLSPGERATLSCRASQSVRSYLAWYQQKPGQAPRLLIYDASNRATGIPARFSGSGSGTDFTLTISSLEPEDFAVYYCQQRSNWPPTFGQGTKVEIKLEIQNPDPAVYQLRDSKSSDKSVCLFTDFDSQTNVSQSKDSDVYITDKCVLDMRSMDFKSNSAVAWSNKSDFACANAFNNSIIPEDTFFPSPESSCDVKLVEKSFETDTNLNFQNLSVIGFRILLLKVAGFNLLMTLRLWSSRAKRSGSGVKQTLNFDLLKLAGDVESNPGPTSMDWIWRILFLVGAATGAHSFEQLQVQESGPGLVKPSETLSLTCTVSGGSISNSYFSWGWIRQPPGKGLEWIGSFYYGEKTYYNPSLKSRATISIDTSKSQFSLKLSSVTAADTAVYYCPRGPTMIRGVIDSWGQGTLVTVSSTREDLKNVFPPEVAVFEPSEAEISHTQKATLVCLATGFYPDHVELSWWVNGKEVHSGVCTDPQPLKEQPALNDSRYCLSSRLRVSATFWQNPRNHFRCQVQFYGLSENDEWTQDRAKPVTQIVSAEAWGRADCGFTSESYQQGVLSATILYEILLGKATLYAVLVSALVLMAMVKRKDSRG

SEQ ID NO: 12790 - protein, 769 aa, Artificial Sequence
  Synthetic Polypeptide
MALPVTALLLPLALLLHAARPEVQLVESGGGLVQPGGSLRLSCAASGFSFSDFWMSWVRQAPGKGLEWVATISQAGSEKDYVDSVKGRFTISRDNAKKSLYLQMNSLRAEDTAVYYCASGVYSFDYRGQGTLVTVSSGTGGGGSGGGGSGGGGSEFDIVMTQTPLSLPVTPGEPASISCRSSRSLLDSDDGNTYLDWYLQKPGQSPQLLIYTLSYRASGVPDRFSGSGSGTDFTLKISRVEAEDVGVYYCMQRVEFPITFGQGTRLEIKRLEIQNPDPAVYQLRDSKSSDKSVCLFTDFDSQTNVSQSKDSDVYITDKCVLDMRSMDFKSNSAVAWSNKSDFACANAFNNSIIPEDTFFPSPESSCDVKLVEKSFETDTNLNFQNLSVIGFRILLLKVAGFNLLMTLRLWSSRAKRSGSGVKQTLNFDLLKLAGDVESNPGPTSMDWIWRILFLVGAATGAHSFEQVQLVESGGGVVQPGRSLRLSCAASGFIFSRYGMHWVRQAPGKGLKWVAVIWYDGSNKLYADSVKGRFTISRDNSKNTLYLQMNSLRAEDTAVYYCARDYYDNSRHHWGFDYWGQGTLVTVSSTREDLKNVFPPEVAVFEPSEAEISHTQKATLVCLATGFYPDHVELSWWVNGKEVHSGVCTDPQPLKEQPALNDSRYCLSSRLRVSATFWQNPRNHFRCQVQFYGLSENDEWTQDRAKPVTQIVSAEAWGRADCGFTSESYQQGVLSATILYEILLGKATLYAVLVSALVLMAMVKRKDSRG

SEQ ID NO: 12791 - protein, 759 aa, Artificial Sequence
  Synthetic Polypeptide
MALPVTALLLPLALLLHAARPEVQLVESGGGLVQPGGSLRLSCAASGFSFSDFWMSWVRQAPGKGLEWVATISQAGSEKDYVDSVKGRFTISRDNAKKSLYLQMNSLRAEDTAVYYCASGVYSFDYRGQGTLVTVSSGTGGGGSGGGGSGGGGSEFEIQMTQSPSSMSASLGDTITITCQATQDIFKNLNWYQQKPGKPPSLLIYYATELAEGVPSRFSGSGSGSDYSLTISNLESEDFAAYYCLQFFEFPFTFGSGTKLEMKLEIQNPDPAVYQLRDSKSSDKSVCLFTDFDSQTNVSQSKDSDVYITDKCVLDMRSMDFKSNSAVAWSNKSDFACANAFNNSIIPEDTFFPSPESSCDVKLVEKSFETDTNLNFQNLSVIGFRILLLKVAGFNLLMTLRLWSSRAKRSGSGVKQTLNFDLLKLAGDVESNPGPTSMDWIWRILFLVGAATGAHSFEQVQLQQSGAELVRPGTSVKVSCKASGYVFTNYWIEWIKQRPGQGLEWIGVMNPGSGETTYNEKFKGKATLTADKSSSTAYMQLSSLTSVDSAVYFCARDHDRDYYAMDYWGQGTSVTVSSTREDLKNVFPPEVAVFEPSEAEISHTQKATLVCLATGFYPDHVELSWWVNGKEVHSGVCTDPQPLKEQPALNDSRYCLSSRLRVSATFWQNPRNHFRCQVQFYGLSENDEWTQDRAKPVTQIVSAEAWGRADCGFTSESYQQGVLSATILYEILLGKATLYAVLVSALVLMAMVKRKDSRG

SEQ ID NO: 12792 - protein, 756 aa, Artificial Sequence
  Synthetic Polypeptide
MALPVTALLLPLALLLHAARPEVQLVESGGGLVQPGGSLRLSCAASGFSFSDFWMSWVRQAPGKGLEWVATISQAGSEKDYVDSVKGRFTISRDNAKKSLYLQMNSLRAEDTAVYYCASGVYSFDYRGQGTLVTVSSGTGGGGSGGGGSGGGGSEFDILLTQSPAILSVSPGERVSFSCRASQNIGTSIHWYQQRTNGSPRLLIKYASESVSGIPSRFSGSGSGTDFTLSINSVESEDIADYYCQHTNSWPTTFGGGTKLEIKRLEIQNPDPAVYQLRDSKSSDKSVCLFTDFDSQTNVSQSKDSDVYITDKCVLDMRSMDFKSNSAVAWSNKSDFACANAFNNSIIPEDTFFPSPESSCDVKLVEKSFETDTNLNFQNLSVIGFRILLLKVAGFNLLMTLRLWSSRAKRSGSGVKQTLNFDLLKLAGDVESNPGPTSMDWIWRILFLVGAATGAHSFEQVQLQQSDAELVKPGASVKISCKASGYTFTDHAIHWVKQKPEQGLEWIGYFSPGNGDIKYNEKFKGKATLTADKSSSTAYMQLNSLTSEDSAVYFCKRSYGNYDYWGQGTTLTVSSTREDLKNVFPPEVAVFEPSEAEISHTQKATLVCLATGFYPDHVELSWWVNGKEVHSGVCTDPQPLKEQPALNDSRYCLSSRLRVSATFWQNPRNHFRCQVQFYGLSENDEWTQDRAKPVTQIVSAEAWGRADCGFTSESYQQGVLSATILYEILLGKATLYAVLVSALVLMAMVKRKDSRG

SEQ ID NO: 12793 - protein, 761 aa, Artificial Sequence
  Synthetic Polypeptide
MALPVTALLLPLALLLHAARPEVQLVESGGGLVQPGGSLRLSCAASGFSFSDFWMSWVRQAPGKGLEWVATISQAGSEKDYVDSVKGRFTISRDNAKKSLYLQMNSLRAEDTAVYYCASGVYSFDYRGQGTLVTVSSGTGGGGSGGGGSGGGGSEFDIVMTQSPDSLAVSLGERATINCKSSQSLLNSGDQKNYLTWYQQKPGQPPKLLIYWASTRESGVPDRFSGSGSGTDFTLTISSLQAEDVAVYYCQNDYSYPLTFGQGTKVEIKLEIQNPDPAVYQLRDSKSSDKSVCLFTDFDSQTNVSQSKDSDVYITDKCVLDMRSMDFKSNSAVAWSNKSDFACANAFNNSIIPEDTFFPSPESSCDVKLVEKSFETDTNLNFQNLSVIGFRILLLKVAGFNLLMTLRLWSSRAKRSGSGVKQTLNFDLLKLAGDVESNPGPTSMDWIWRILFLVGAATGAHSFEQVQLVQSGAEVKKTGSSVKVSCKASGYTFTDHAIHVWRQAPGQALEWMGHFSPGNTDIKYNDKFKGRVTLTVDRSMSTAYMELSSLRSEDTAMYYCKTSTFFFDYWGQGTMVTVSSTREDLKNVFPPEVAVFEPSEAEISHTQKATLVCLATGFYPDHVELSWWVNGKEVHSGVCTDPQPLKEQPALNDSRYCLSSRLRVSATFWQNPRNHFRCQVQFYGLSENDEWTQDRAKPVTQIVSAEAWGRADCGFTSESYQQGVLSATILYEILLGKATLYAVLVSALVLMAMVKRKDSRG

SEQ ID NO: 12794 - protein, 760 aa, Artificial Sequence
  Synthetic Polypeptide
MALPVTALLLPLALLLHAARPEVQLVESGGGLVQPGGSLRLSCAASGFSFSDFWMSWVRQAPGKGLEWVATISQAGSEKDYVDSVKGRFTISRDNAKKSLYLQMNSLRAEDTAVYYCASGVYSFDYRGQGTLVTVSSGTGGGGSGGGGSGGGGSEFDIQMTQSPSSLSASVGDRVTITCKASQDVSIAVAWYQQKPGKAPKVLIYSASYRYTGVPDRFSGSGSGTDFTFTISSLQPEDIAVYYCQQHYITPLTFGGGTKVEIKLEIQNPDPAVYQLRDSKSSDKSVCLFTDFDSQTNVSQSKDSDVYITDKCVLDMRSMDFKSNSAVAWSNKSDFACANAFNNSIIPEDTFFPSPESSCDVKLVEKSFETDTNLNFQNLSVIGFRILLLKVAGFNLLMTLRLWSSRAKRSGSGVKQTLNFDLLKLAGDVESNPGPTSMDWIWRILFLVGAATGAHSFEQIQLVQSGHEVKKPGASVKVSCKASGYTFTNYGMNWVRQAPGQGLEWMGWINTKTGEPTYAEEFKGRFVFSLETSASTAYLQISSLKAEDTAMYFCGRGGYGSSYWYFDVWGQGTTVTVSSTREDLKNVFPPEVAVFEPSEAEISHTQKATLVCLATGFYPDHVELSWWVNGKEVHSGVCTDPQPLKEQPALNDSRYCLSSRLRVSATFWQNPRNHFRCQVQFYGLSENDEWTQDRAKPVTQIVSAEAWGRADCGFTSESYQQGVLSATILYEILLGKATLYAVLVSALVLMAMVKRKDSRG

SEQ ID NO: 12795 - protein, 762 aa, Artificial Sequence
  Synthetic Polypeptide
MALPVTALLLPLALLLHAARPEVQLVESGGGLVQPGGSLRLSCAASGFSFSDFWMSWVRQAPGKGLEWVATISQAGSEKDYVDSVKGRFTISRDNAKKSLYLQMNSLRAEDTAVYYCASGVYSFDYRGQGTLVTVSSGTGGGGSGGGGSGGGGSEFDIVMTQSPDSLAVSLGERATINCRASKSVSTSGYSYMHWYQQKPGQPPKLLIYLASNLESGVPDRFSGSGSGTDFTLTISSLQAEDVAVYYCQHSRELPYTFGQGTKLEIKLEIQNPDPAVYQLRDSKSSDKSVCLFTDFDSQTNVSQSKDSDVYITDKCVLDMRSMDFKSNSAVAWSNKSDFACANAFNNSIIPEDTFFPSPESSCDVKLVEKSFETDTNLNFQNLSVIGFRILLLKVAGFNLLMTLRLWSSRAKRSGSGVKQTLNFDLLKLAGDVESNPGPTSMDWIWRILFLVGAATGAHSFEQVQLQESGPGLVKPSETLSLTCTVSGGSISSYGVHWIRQPPGKGLEWIGVIWTSGVTDYNSALMGRVTISVDTSKNQFSLKLSSVTAADTAVYYCARDGDYDRYTMDYWGQGTLVTVSSTREDLKNVFPPEVAVFEPSEAEISHTQKATLVCLATGFYPDHVELSWWVNGKEVHSGVCTDPQPLKEQPALNDSRYCLSSRLRVSATFWQNPRNHFRCQVQFYGLSENDEWTQDRAKPVTQIVSAEAWGRADCGFTSESYQQGVLSATILYEILLGKATLYAVLVSALVLMAMVKRKDSRG

SEQ ID NO: 12796 - protein, 762 aa, Artificial Sequence
  Synthetic Polypeptide
MALPVTALLLPLALLLHAARPEVQLVESGGGLVQPGGSLRLSCAASGFSFSDFWMSWVRQAPGKGLEWVATISQAGSEKDYVDSVKGRFTISRDNAKKSLYLQMNSLRAEDTAVYYCASGVYSFDYRGQGTLVTVSSGTGGGGSGGGGSGGGGSEFDIQMTQSPSSLSASVGDRVTITCRASQSIGTSLHWYQQKPGKAPKLLIKFASRLQSGVPSRFSGSGSGTDFTLTISSLQPEDFATYYCQQSPGFPPTFGQGTKLEIKRLEIQNPDPAVYQLRDSKSSDKSVCLFTDFDSQTNVSQSKDSDVYITDKCVLDMRSMDFKSNSAVAWSNKSDFACANAFNNSIIPEDTFFPSPESSCDVKLVEKSFETDTNLNFQNLSVIGFRILLLKVAGFNLLMTLRLWSSRAKRSGSGVKQTLNFDLLKLAGDVESNPGPTSMDWIWRILFLVGAATGAHSFEQVQLVESGGGLVKPGGSLRLSCAASGFSITTSGYYWTWIRQFPGKGLEWMGYIGYNSKTYYNPALKSRITISRDNAKNSLYLQMNSLRAEDTAVYYCARSLYGGYKDAFDSWGQGTLVTVSSTREDLKNVFPPEVAVFEPSEAEISHTQKATLVCLATGFYPDHVELSWWVNGKEVHSGVCTDPQPLKEQPALNDSRYCLSSRLRVSATFWQNPRNHFRCQVQFYGLSENDEWTQDRAKPVTQIVSAEAWGRADCGFTSESYQQGVLSATILYEILLGKATLYAVLVSALVLMAMVKRKDSRG

SEQ ID NO: 12797 - protein, 767 aa, Artificial Sequence
  Synthetic Polypeptide
MALPVTALLLPLALLLHAARPEVQLVESGGGLVQPGGSLRLSCAASGFSFSDFWMSWVRQAPGKGLEWVATISQAGSEKDYVDSVKGRFTISRDNAKKSLYLQMNSLRAEDTAVYYCASGVYSFDYRGQGTLVTVSSGTGGGGSGGGGSGGGGSEFDEIVLTQSPLSLPVTPGEPASISCRSSQSLLHSIGYNYLDWYLQKPGQSPQLLIYLGSNRASGVPDRFSGSGSGTDFTLKISRVEAEDVGVYYCMQALQTPLTFGGGTKVEIKRLEIQNPDPAVYQLRDSKSSDKSVCLFTDFDSQTNVSQSKDSDVYITDKCVLDMRSMDFKSNSAVAWSNKSDFACANAFNNSIIPEDTFFPSPESSCDVKLVEKSFETDTNLNFQNLSVIGFRILLLKVAGFNLLMTLRLWSSRAKRSGSGVKQTLNFDLLKLAGDVESNPGPTSMDWIWRILFLVGAATGAHSFEEVQLVESGGGVVQPGRSLRLSCAASGFTFRSYGMHWVRQAPGKGLEWVAVISYDGSNKYYTDSVNGRFTISRDNSKNTLYLQMNSLRAEDTAVYYCARGGGYYETSGPDYWGQGTLVTVSSTREDLKNVFPPEVAVFEPSEAEISHTQKATLVCLATGFYPDHVELSWWVNGKEVHSGVCTDPQPLKEQPALNDSRYCLSSRLRVSATFWQNPRNHFRCQVQFYGLSENDEWTQDRAKPVTQIVSAEAWGRADCGFTSESYQQGVLSATILYEILLGKATLYAVLVSALVLMAMVKRKDSRG

SEQ ID NO: 12798 - protein, 765 aa, Artificial Sequence
  Synthetic Polypeptide
MALPVTALLLPLALLLHAARPEVQLVESGGGLVQPGGSLRLSCAASGFSFSDFWMSWVRQAPGKGLEWVATISQAGSEKDYVDSVKGRFTISRDNAKKSLYLQMNSLRAEDTAVYYCASGVYSFDYRGQGTLVTVSSGTGGGGSGGGGSGGGGSEFDDVVMTQSPLSLPVTPGEPASISCRSSQSLLHSIGYNYLHWFLQKPGQSPQLLIYLGSNRASGVPDRFSGSGSGTDFTLKISRVEAEDVGVYYCMQALQTPPTFGQGTRLEIKRLEIQNPDPAVYQLRDSKSSDKSVCLFTDFDSQTNVSQSKDSDVYITDKCVLDMRSMDFKSNSAVAWSNKSDFACANAFNNSIIPEDTFFPSPESSCDVKLVEKSFETDTNLNFQNLSVIGFRILLLKVAGFNLLMTLRLWSSRAKRSGSGVKQTLNFDLLKLAGDVESNPGPTSMDWIWRILFLVGAATGAHSFEQLQLQESGPGLVKPSGTLSLTCAVSGGSISSSNWWSWVRQPPGKGLEWIGEIYHSGSTNYNPSLKSRVTISVDKSKNQFSLKLSSVTAADTAVYYCVGSPYGDYVLDYWGQGTLVTVSSTREDLKNVFPPEVAVFEPSEAEISHTQKATLVCLATGFYPDHVELSWWVNGKEVHSGVCTDPQPLKEQPALNDSRYCLSSRLRVSATFWQNPRNHFRCQVQFYGLSENDEWTQDRAKPVTQIVSAEAWGRADCGFTSESYQQGVLSATILYEILLGKATLYAVLVSALVLMAMVKRKDSRG

SEQ ID NO: 12799 - protein, 763 aa, Artificial Sequence
  Synthetic Polypeptide
MALPVTALLLPLALLLHAARPEVQLVESGGGLVQPGGSLRLSCAASGFSFSDFWMSWVRQAPGKGLEWVATISQAGSEKDYVDSVKGRFTISRDNAKKSLYLQMNSLRAEDTAVYYCASGVYSFDYRGQGTLVTVSSGTGGGGSGGGGSGGGGSEFDEIVLTQSPGTLSLSLGERATLSCRASQSISSSFLAWYQQKPGQAPKLLIYAASTRATGIPDRFSGSGSGTDFTLTISRLEPEDFAVYYCQQYGRSLSFGGGTKVEVKLEIQNPDPAVYQLRDSKSSDKSVCLFTDFDSQTNVSQSKDSDVYITDKCVLDMRSMDFKSNSAVAWSNKSDFACANAFNNSIIPEDTFFPSPESSCDVKLVEKSFETDTNLNFQNLSVIGFRILLLKVAGFNLLMTLRLWSSRAKRSGSGVKQTLNFDLLKLAGDVESNPGPTSMDWIWRILFLVGAATGAHSFEQVQLQQSGPGLVKPSQTLSLTCAISGDSVSGNSATWNWIRQSPSRGLEWLGRTYYRSKWNHDYAESVKSRITINPDTSKNQFSLQLNSVTPEDTAVYYCARGDSSSWYAFDYWGQGTLVTVSSTREDLKNVFPPEVAVFEPSEAEISHTQKATLVCLATGFYPDHVELSWWVNGKEVHSGVCTDPQPLKEQPALNDSRYCLSSRLRVSATFWQNPRNHFRCQVQFYGLSENDEWTQDRAKPVTQIVSAEAWGRADCGFTSESYQQGVLSATILYEILLGKATLYAVLVSALVLMAMVKRKDSRG

SEQ ID NO: 12800 - protein, 762 aa, Artificial Sequence
  Synthetic Polypeptide
MALPVTALLLPLALLLHAARPEVQLVESGGGLVQPGGSLRLSCAASGFSFSDFWMSWVRQAPGKGLEWVATISQAGSEKDYVDSVKGRFTISRDNAKKSLYLQMNSLRAEDTAVYYCASGVYSFDYRGQGTLVTVSSGTGGGGSGGGGSGGGGSEFDQSVVTQPPSVSVAPGKTARITCGRNNIGSKSVHWYQQKPGQAPVLVVYDDSDRPSGIPERFSGSNSGNTATLTISRVEAGDEADYYCQVWDSSSDHVVFGGGTKLTVLGLEIQNPDPAVYQLRDSKSSDKSVCLFTDFDSQTNVSQSKDSDVYITDKCVLDMRSMDFKSNSAVAWSNKSDFACANAFNNSIIPEDTFFPSPESSCDVKLVEKSFETDTNLNFQNLSVIGFRILLLKVAGFNLLMTLRLWSSRAKRSGSGVKQTLNFDLLKLAGDVESNPGPTSMDWIWRILFLVGAATGAHSFEVQLVQSGGGVMRPGGSLRLSCAASGFTFDDYGMSWVRQAPGKGLEWVSGINWNGGSTGYADSVRGRFTISRDNAKNSLYLQMNSLRAEDTALYYCARERGYGYHDPHDYWGQGTLVTVSSTREDLKNVFPPEVAVFEPSEAEISHTQKATLVCLATGFYPDHVELSWWVNGKEVHSGVCTDPQPLKEQPALNDSRYCLSSRLRVSATFWQNPRNHFRCQVQFYGLSENDEWTQDRAKPVTQIVSAEAWGRADCGFTSESYQQGVLSATILYEILLGKATLYAVLVSALVLMAMVKRKDSRG

SEQ ID NO: 12801 - protein, 775 aa, Artificial Sequence
  Synthetic Polypeptide
MALPVTALLLPLALLLHAARPEVQLVESGGGLVQPGGSLRLSCAASGFSFSDFWMSWVRQAPGKGLEWVATISQAGSEKDYVDSVKGRFTISRDNAKKSLYLQMNSLRAEDTAVYYCASGVYSFDYRGQGTLVTVSSGTGGGGSGGGGSGGGGSEFEQKLISEEDLEFQAVVTQPPSASGTPGQRVTISCSGSSSNIGSNTVNWYQQVPGTAPKLLIYSNNQRPSGVPDRFSGSKSGTSASLAISGLQSEDEADYYCAAWDDSLNGWVFGGGTKLTVLLEIQNPDPAVYQLRDSKSSDKSVCLFTDFDSQTNVSQSKDSDVYITDKCVLDMRSMDFKSNSAVAWSNKSDFACANAFNNSIIPEDTFFPSPESSCDVKLVEKSFETDTNLNFQNLSVIGFRILLLKVAGFNLLMTLRLWSSRAKRSGSGVKQTLNFDLLKLAGDVESNPGPTSMDWIWRILFLVGAATGAHSFEQMQLVQSGAEVKEPGESLRISCKGSGYSFTNFWISWVRQMPGKGLEWMGRVDPGYSYSTYSPSFQGHVTISADKSTSTAYLQWNSLKASDTAMYYCARVQYSGYYDWFDPWGQGTLVTVSSTREDLKNVFPPEVAVFEPSEAEISHTQKATLVCLATGFYPDHVELSWWVNGKEVHSGVCTDPQPLKEQPALNDSRYCLSSRLRVSATFWQNPRNHFRCQVQFYGLSENDEWTQDRAKPVTQIVSAEAWGRADCGFTSESYQQGVLSATILYEILLGKATLYAVLVSALVLMAMVKRKDSRG

SEQ ID NO: 12802 - protein, 769 aa, Artificial Sequence
  Synthetic Polypeptide
MALPVTALLLPLALLLHAARPEVQLVESGGGLVQPGGSLRLSCAASGFSFSDFWMSWVRQAPGKGLEWVATISQAGSEKDYVDSVKGRFTISRDNAKKSLYLQMNSLRAEDTAVYYCASGVYSFDYRGQGTLVTVSSGTGGGGSGGGGSGGGGSEFEQKLISEEDLEFDIQMTQSPSTLSASVGDRVTITCRASQNINKWLAWYQQRPGKAPQLLIYKASSLESGVPSRFSGSGSGTEYTLTISSLQPDDFATYYCQQYNSYATFGQGTKVEIKRLEIQNPDPAVYQLRDSKSSDKSVCLFTDFDSQTNVSQSKDSDVYITDKCVLDMRSMDFKSNSAVAWSNKSDFACANAFNNSIIPEDTFFPSPESSCDVKLVEKSFETDTNLNFQNLSVIGFRILLLKVAGFNLLMTLRLWSSRAKRSGSGVKQTLNFDLLKLAGDVESNPGPTSMDWIWRILFLVGAATGAHSFEQVQLVQSGAEVKKPGESLKISCKGSGYNFSNKWIGWVRQLPGRGLEWIAIIYPGYSDITYSPSFQGRVTISADTSINTAYLHWHSLKASDTAMYYCVRHTALAGFDYWGLGTLVTVSSTREDLKNVFPPEVAVFEPSEAEISHTQKATLVCLATGFYPDHVELSWWVNGKEVHSGVCTDPQPLKEQPALNDSRYCLSSRLRVSATFWQNPRNHFRCQVQFYGLSENDEWTQDRAKPVTQIVSAEAWGRADCGFTSESYQQGVLSATILYEILLGKATLYAVLVSALVLMAMVKRKDSRG

SEQ ID NO: 12803 - protein, 761 aa, Artificial Sequence
  Synthetic Polypeptide
MALPVTALLLPLALLLHAARPEVQLVESGGGLVQPGGSLRLSCAASGFSFSDFWMSWVRQAPGKGLEWVATISQAGSEKDYVDSVKGRFTISRDNAKKSLYLQMNSLRAEDTAVYYCASGVYSFDYRGQGTLVTVSSGTGGGGSGGGGSGGGGSEFDIVLTQSPASLAVSLGQRATISCRASESVDNYGNTFMHWYQQKPGQPPKLLIYRASNLESGIPARFSGSGSRTDFTLTINPVEADDVATYYCQQSNEDPPTFGAGTKLELKLEIQNPDPAVYQLRDSKSSDKSVCLFTDFDSQTNVSQSKDSDVYITDKCVLDMRSMDFKSNSAVAWSNKSDFACANAFNNSIIPEDTFFPSPESSCDVKLVEKSFETDTNLNFQNLSVIGFRILLLKVAGFNLLMTLRLWSSRAKRSGSGVKQTLNFDLLKLAGDVESNPGPTSMDWIWRILFLVGAATGAHSFEQIQLVQSGPELKKPGETVKISCKASGYIFTNYGMNWVKQAPGKSFKWMGWINTYTGESTYSADFKGRFAFSLETSASTAYLHINDLKNEDTATYFCARSGGYDPMDYWGQGTSVTVSSTREDLKNVFPPEVAVFEPSEAEISHTQKATLVCLATGFYPDHVELSWWVNGKEVHSGVCTDPQPLKEQPALNDSRYCLSSRLRVSATFWQNPRNHFRCQVQFYGLSENDEWTQDRAKPVTQIVSAEAWGRADCGFTSESYQQGVLSATILYEILLGKATLYAVLVSALVLMAMVKRKDSRG

SEQ ID NO: 12804 - protein, 760 aa, Artificial Sequence
  Synthetic Polypeptide
MALPVTALLLPLALLLHAARPEVQLVESGGGLVQPGGSLRLSCAASGFSFSDFWMSWVRQAPGKGLEWVATISQAGSEKDYVDSVKGRFTISRDNAKKSLYLQMNSLRAEDTAVYYCASGVYSFDYRGQGTLVTVSSGTGGGGSGGGGSGGGGSEFDEIVLTQSPGTLSLSPGERATLSCRASQSVSNTYLAWYHQRPGQAPRLLIYGASSRATGIPDRFSGSGSGTDFALTISSLEPEDFAVYYCQQYSNSWTFGQGTKVEIKRLEIQNPDPAVYQLRDSKSSDKSVCLFTDFDSQTNVSQSKDSDVYITDKCVLDMRSMDFKSNSAVAWSNKSDFACANAFNNSIIPEDTFFPSPESSCDVKLVEKSFETDTNLNFQNLSVIGFRILLLKVAGFNLLMTLRLWSSRAKRSGSGVKQTLNFDLLKLAGDVESNPGPTSMDWIWRILFLVGAATGAHSFEQVQLVESGGGVVQPGRSLRLSCAASGFTFSSYDMHWVRQAPGKGLEWVAVISYDGTNEYYADSVKGRFTISRDTSKNTLYLQMNSLRAEDTAVYYCARERYFDWSFDYWGQGTLVSVSSTREDLKNVFPPEVAVFEPSEAEISHTQKATLVCLATGFYPDHVELSWWVNGKEVHSGVCTDPQPLKEQPALNDSRYCLSSRLRVSATFWQNPRNHFRCQVQFYGLSENDEWTQDRAKPVTQIVSAEAWGRADCGFTSESYQQGVLSATILYEILLGKATLYAVLVSALVLMAMVKRKDSRG

SEQ ID NO: 12805 - protein, 759 aa, Artificial Sequence
  Synthetic Polypeptide
MALPVTALLLPLALLLHAARPEVQLVESGGGLVQPGGSLRLSCAASGFSFSDFWMSWVRQAPGKGLEWVATISQAGSEKDYVDSVKGRFTISRDNAKKSLYLQMNSLRAEDTAVYYCASGVYSFDYRGQGTLVTVSSGTGGGGSGGGGSGGGGSEFDELTQDPAVSVALGQTVRITCQGDSLRSNYANWYQQKPGQAPVLVIYGQNNRPSGIPDRFSGSSSGNTASLTITGAQAADEADYYCDSRVSTGNHVVFGGGTKLTVLGQLEIQNPDPAVYQLRDSKSSDKSVCLFTDFDSQTNVSQSKDSDVYITDKCVLDMRSMDFKSNSAVAWSNKSDFACANAFNNSIIPEDTFFPSPESSCDVKLVEKSFETDTNLNFQNLSVIGFRILLLKVAGFNLLMTLRLWSSRAKRSGSGVKQTLNFDLLKLAGDVESNPGPTSMDWIWRILFLVGAATGAHSFEEVQLVQSGAEVKKPGASVKVSCKASGYTFTSYAMHWVRQAPGQRLEWMGWINAGNGNTKYSQKFQGRVTITRDTSASTAYMELSSLRSEDTAVYYCARDISYGSFDYWGQGTLVTVSSTREDLKNVFPPEVAVFEPSEAEISHTQKATLVCLATGFYPDHVELSWWVNGKEVHSGVCTDPQPLKEQPALNDSRYCLSSRLRVSATFWQNPRNHFRCQVQFYGLSENDEWTQDRAKPVTQIVSAEAWGRADCGFTSESYQQGVLSATILYEILLGKATLYAVLVSALVLMAMVKRKDSRG

SEQ ID NO: 12806 - protein, 761 aa, Artificial Sequence
  Synthetic Polypeptide
MALPVTALLLPLALLLHAARPEVQLVESGGGLVQPGGSLRLSCAASGFSFSDFWMSWVRQAPGKGLEWVATISQAGSEKDYVDSVKGRFTISRDNAKKSLYLQMNSLRAEDTAVYYCASGVYSFDYRGQGTLVTVSSGTGGGGSGGGGSGGGGSEFDDIVLTQTPATLSVTPGDSVSLSCRASQSISNNLHWYQQKSHESPRLLIKNASQSISGIPSKFSGSGSGTDFTLRINSVETEDFGMYFCQQSNSWPYTFGSGTKLEIKLEIQNPDPAVYQLRDSKSSDKSVCLFTDFDSQTNVSQSKDSDVYITDKCVLDMRSMDFKSNSAVAWSNKSDFACANAFNNSIIPEDTFFPSPESSCDVKLVEKSFETDTNLNFQNLSVIGFRILLLKVAGFNLLMTLRLWSSRAKRSGSGVKQTLNFDLLKLAGDVESNPGPTSMDWIWRILFLVGAATGAHSFEQVKLQQSGPELVKPGASVKISCKASGYSFTGYYMHWVKQSHGNILDWIGYIYPYNGVSSYNQKFKGKATLTVDKSSSTAYMELRSLTSEDSAVYYCARERGLYQLRAMDYWGQGTSVTVSSTREDLKNVFPPEVAVFEPSEAEISHTQKATLVCLATGFYPDHVELSWWVNGKEVHSGVCTDPQPLKEQPALNDSRYCLSSRLRVSATFWQNPRNHFRCQVQFYGLSENDEWTQDRAKPVTQIVSAEAWGRADCGFTSESYQQGVLSATILYEILLGKATLYAVLVSALVLMAMVKRKDSRG

SEQ ID NO: 12807 - protein, 752 aa, Artificial Sequence
  Synthetic Polypeptide
MALPVTALLLPLALLLHAARPEVQLVESGGGLVQPGGSLRLSCAASGFSFSDFWMSWVRQAPGKGLEWVATISQAGSEKDYVDSVKGRFTISRDNAKKSLYLQMNSLRAEDTAVYYCASGVYSFDYRGQGTLVTVSSGTGGGGSGGGGSGGGGSEFDDIVMTQTPAIMSASPGQKVTITCSASSSVNYMHWYQQKLGSSPKLWIYDTSKLAPGVPARFSGSGSGTSYSLTISSMEAEDAASYFCHQWSSYPYTFGSGTKLEIKLEIQNPDPAVYQLRDSKSSDKSVCLFTDFDSQTNVSQSKDSDVYITDKCVLDMRSMDFKSNSAVAWSNKSDFACANAFNNSIIPEDTFFPSPESSCDVKLVEKSFETDTNLNFQNLSVIGFRILLLKVAGFNLLMTLRLWSSRAKRSGSGVKQTLNFDLLKLAGDVESNPGPTSMDWIWRILFLVGAATGAHSFEEVQLQESGPDLVKPSQSLSLTCTVTGYSITSGYGWHWIRQFPGNKLEWMGYIHYSGSTTYNPSLKSRISISRDTSKNQFFLQLNSVTTEDTATYYCARSLRYWGQGTTLTVSSTREDLKNVFPPEVAVFEPSEAEISHTQKATLVCLATGFYPDHVELSWWVNGKEVHSGVCTDPQPLKEQPALNDSRYCLSSRLRVSATFWQNPRNHFRCQVQFYGLSENDEWTQDRAKPVTQIVSAEAWGRADCGFTSESYQQGVLSATILYEILLGKATLYAVLVSALVLMAMVKRKDSRG

SEQ ID NO: 12808 - protein, 755 aa, Artificial Sequence
  Synthetic Polypeptide
MALPVTALLLPLALLLHAARPEVQLVESGGGLVQPGGSLRLSCAASGFSFSDFWMSWVRQAPGKGLEWVATISQAGSEKDYVDSVKGRFTISRDNAKKSLYLQMNSLRAEDTAVYYCASGVYSFDYRGQGTLVTVSSGTGGGGSGGGGSGGGGSEFDDIQMTQSPSSLSASVGDRVTITCSATSSISYMHWYQQKPGKAPKGWIYDTSKLAHGVPSRFSGSGSGTDFTLTISSLQPEDFATYYCHQRRSYPFTFGQGTKVEIKLEIQNPDPAVYQLRDSKSSDKSVCLFTDFDSQTNVSQSKDSDVYITDKCVLDMRSMDFKSNSAVAWSNKSDFACANAFNNSIIPEDTFFPSPESSCDVKLVEKSFETDTNLNFQNLSVIGFRILLLKVAGFNLLMTLRLWSSRAKRSGSGVKQTLNFDLLKLAGDVESNPGPTSMDWIWRILFLVGAATGAHSFEEVQLVQSGAEVKKPGASVKVSCKASGYTFTNFWIHWVRQAPGQGLEWIGEIDPSDSYTNYNQKFKGRVTITRDTSTSTAYLELSSLRSEDTAVYYCAREITTVDYWGQGTLVTVSSTREDLKNVFPPEVAVFEPSEAEISHTQKATLVCLATGFYPDHVELSWWVNGKEVHSGVCTDPQPLKEQPALNDSRYCLSSRLRVSATFWQNPRNHFRCQVQFYGLSENDEWTQDRAKPVTQIVSAEAWGRADCGFTSESYQQGVLSATILYEILLGKATLYAVLVSALVLMAMVKRKDSRG

SEQ ID NO: 12809 - protein, 762 aa, Artificial Sequence
  Synthetic Polypeptide
MALPVTALLLPLALLLHAARPEVQLVESGGGLVQPGGSLRLSCAASGFSFSDFWMSWVRQAPGKGLEWVATISQAGSEKDYVDSVKGRFTISRDNAKKSLYLQMNSLRAEDTAVYYCASGVYSFDYRGQGTLVTVSSGTGGGGSGGGGSGGGGSEFDDIQMTQSPSSLSASVGDRVTITCKASQGFNKYVAWYQQKPGKAPKLLIYYTSTLQPGVPSRFSGSGSGRDYTLTISSLQPEDFATYYCLQYGNLLYAFGQGTKVEIKRLEIQNPDPAVYQLRDSKSSDKSVCLFTDFDSQTNVSQSKDSDVYITDKCVLDMRSMDFKSNSAVAWSNKSDFACANAFNNSIIPEDTFFPSPESSCDVKLVEKSFETDTNLNFQNLSVIGFRILLLKVAGFNLLMTLRLWSSRAKRSGSGVKQTLNFDLLKLAGDVESNPGPTSMDWIWRILFLVGAATGAHSFEEVQLVQSGAEVKKPGASVKVSCKASGYTFTSYWIGWVRQAPGQGLEWIGDIYPGGGYTNYNEKFKGRVTITRDTSTSTAYLELSSLRSEDTAVYYCARLDGSSYRGAMDSWGQGTLVTVSSTREDLKNVFPPEVAVFEPSEAEISHTQKATLVCLATGFYPDHVELSWWVNGKEVHSGVCTDPQPLKEQPALNDSRYCLSSRLRVSATFWQNPRNHFRCQVQFYGLSENDEWTQDRAKPVTQIVSAEAWGRADCGFTSESYQQGVLSATILYEILLGKATLYAVLVSALVLMAMVKRKDSRG

SEQ ID NO: 12810 - protein, 758 aa, Artificial Sequence
  Synthetic Polypeptide
MALPVTALLLPLALLLHAARPEVQLVESGGGLVQPGGSLRLSCAASGFSFSDFWMSWVRQAPGKGLEWVATISQAGSEKDYVDSVKGRFTISRDNAKKSLYLQMNSLRAEDTAVYYCASGVYSFDYRGQGTLVTVSSGTGGGGSGGGGSGGGGSEFDDIQMTQSPSSLSASVGDRVTITCRASQDIRYYLNWYQQKPGKAPKLLIYVASSLQSGVPSRFSGSGSGTEFTLTVSSLQPEDFATYYCLQVYSTPRTFGQGTKVEIKLEIQNPDPAVYQLRDSKSSDKSVCLFTDFDSQTNVSQSKDSDVYITDKCVLDMRSMDFKSNSAVAWSNKSDFACANAFNNSIIPEDTFFPSPESSCDVKLVEKSFETDTNLNFQNLSVIGFRILLLKVAGFNLLMTLRLWSSRAKRSGSGVKQTLNFDLLKLAGDVESNPGPTSMDWIWRILFLVGAATGAHSFEEVQLVESGGGLAKPGGSLRLSCAASGFRFTFNNYYMDWVRQAPGQGLEWVSRISSSGDPTWYADSVKGRFTISRENAKNTLFLQMNSLRAEDTAVYYCASLTTGSDSWGQGVLVTVSSTREDLKNVFPPEVAVFEPSEAEISHTQKATLVCLATGFYPDHVELSWWVNGKEVHSGVCTDPQPLKEQPALNDSRYCLSSRLRVSATFWQNPRNHFRCQVQFYGLSENDEWTQDRAKPVTQIVSAEAWGRADCGFTSESYQQGVLSATILYEILLGKATLYAVLVSALVLMAMVKRKDSRG

SEQ ID NO: 12811 - protein, 758 aa, Artificial Sequence
  Synthetic Polypeptide
MALPVTALLLPLALLLHAARPEVQLVESGGGLVQPGGSLRLSCAASGFSFSDFWMSWVRQAPGKGLEWVATISQAGSEKDYVDSVKGRFTISRDNAKKSLYLQMNSLRAEDTAVYYCASGVYSFDYRGQGTLVTVSSGTGGGGSGGGGSGGGGSEFEIVMTQSPATLSVSPGERATLSCRASQSVSRNLAWYQQKPGQAPRLLIYGASTRATGIPARFSGSGSGTEFTLTIGSLQSEDFAVYYCQQYKTWPRTFGQGTNVEIKLEIQNPDPAVYQLRDSKSSDKSVCLFTDFDSQTNVSQSKDSDVYITDKCVLDMRSMDFKSNSAVAWSNKSDFACANAFNNSIIPEDTFFPSPESSCDVKLVEKSFETDTNLNFQNLSVIGFRILLLKVAGFNLLMTLRLWSSRAKRSGSGVKQTLNFDLLKLAGDVESNPGPTSMDWIWRILFLVGAATGAHSFEQVQLQQWGAGLLKPSETLSLTCAVFGGSFSGYYWSWIRQPPGKGLEWIGEINHRGNTNDNPSLKSRVTISVDTSKNQFALKLSSVTAADTAVYYCARERGYTYGNFDHWGQGTLVTVSSTREDLKNVFPPEVAVFEPSEAEISHTQKATLVCLATGFYPDHVELSWWVNGKEVHSGVCTDPQPLKEQPALNDSRYCLSSRLRVSATFWQNPRNHFRCQVQFYGLSENDEWTQDRAKPVTQIVSAEAWGRADCGFTSESYQQGVLSATILYEILLGKATLYAVLVSALVLMAMVKRKDSRG

SEQ ID NO: 12812 - protein, 759 aa, Artificial Sequence
  Synthetic Polypeptide
MALPVTALLLPLALLLHAARPEVQLVESGGGLVQPGGSLRLSCAASGFSFSDFWMSWVRQAPGKGLEWVATISQAGSEKDYVDSVKGRFTISRDNAKKSLYLQMNSLRAEDTAVYYCASGVYSFDYRGQGTLVTVSSGTGGGGSGGGGSGGGGSEFEIVMTPSSATLSVSPGERATLSCRASQSVSRNLAWYQQKPGQAPRLLIYGASTRATGIPARFSGSGSGTEFTLTISSLQSEDFAVYYCHQYSNWMCSFGQGTKLEIKLEIQNPDPAVYQLRDSKSSDKSVCLFTDFDSQTNVSQSKDSDVYITDKCVLDMRSMDFKSNSAVAWSNKSDFACANAFNNSIIPEDTFFPSPESSCDVKLVEKSFETDTNLNFQNLSVIGFRILLLKVAGFNLLMTLRLWSSRAKRSGSGVKQTLNFDLLKLAGDVESNPGPTSMDWIWRILFLVGAATGAHSFEEVQLLESGGGLVQPGGSLRLSCAASGFTFSRYAMNWVRQAPGKGLEWVSGISGSGGRTYYADSVKGRFTISRDNSKNTLYLQMNSLRAEDTAVYYCAKDRDFWSGPFDYWGQGTLVTVSSTREDLKNVFPPEVAVFEPSEAEISHTQKATLVCLATGFYPDHVELSWWVNGKEVHSGVCTDPQPLKEQPALNDSRYCLSSRLRVSATFWQNPRNHFRCQVQFYGLSENDEWTQDRAKPVTQIVSAEAWGRADCGFTSESYQQGVLSATILYEILLGKATLYAVLVSALVLMAMVKRKDSRG

SEQ ID NO: 12813 - protein, 764 aa, Artificial Sequence
  Synthetic Polypeptide
MALPVTALLLPLALLLHAARPEVQLVESGGGLVQPGGSLRLSCAASGFSFSDFWMSWVRQAPGKGLEWVATISQAGSEKDYVDSVKGRFTISRDNAKKSLYLQMNSLRAEDTAVYYCASGVYSFDYRGQGTLVTVSSGTGGGGSGGGGSGGGGSEFDIQMTQSPSSLSASVGDRVTITCKASKNIRSYLAWYQQKPGKAPKLLIYSGSTLHSGVPSRFSGSGSGTDFTLTISSLQPEDFATYYCQQHHEYPLTFGQGTKVEIKRLEIQNPDPAVYQLRDSKSSDKSVCLFTDFDSQTNVSQSKDSDVYITDKCVLDMRSMDFKSNSAVAWSNKSDFACANAFNNSIIPEDTFFPSPESSCDVKLVEKSFETDTNLNFQNLSVIGFRILLLKVAGFNLLMTLRLWSSRAKRSGSGVKQTLNFDLLKLAGDVESNPGPTSMDWIWRILFLVGAATGAHSFEQVQLQESGPGLVKPSETLSLTCTVSGYTITSGYDWSWIRQPPGKGLEWIGYINYGGSTNYKPSLGSRVTISVDTSKNQFSLKLSSVTAADTAVYYCARYNEYKSYIYDWYFDFWGQGTLVTVSSTREDLKNVFPPEVAVFEPSEAEISHTQKATLVCLATGFYPDHVELSWWVNGKEVHSGVCTDPQPLKEQPALNDSRYCLSSRLRVSATFWQNPRNHFRCQVQFYGLSENDEWTQDRAKPVTQIVSAEAWGRADCGFTSESYQQGVLSATILYEILLGKATLYAVLVSALVLMAMVKRKDSRG

SEQ ID NO: 12814 - protein, 766 aa, Artificial Sequence
  Synthetic Polypeptide
MALPVTALLLPLALLLHAARPEVQLVESGGGLVQPGGSLRLSCAASGFSFSDFWMSWVRQAPGKGLEWVATISQAGSEKDYVDSVKGRFTISRDNAKKSLYLQMNSLRAEDTAVYYCASGVYSFDYRGQGTLVTVSSGTGGGGSGGGGSGGGGSEFQSVVTQPPSVSAAPGQKVTISCSGSSSNIGNNYVSWYQQLPGTAPKLLIYDNNKRPSGIPDRFSGSKSGTSATLGITGLQTGDEADYYCGTWDGSLYTMLFGGGTKLTVLLEIQNPDPAVYQLRDSKSSDKSVCLFTDFDSQTNVSQSKDSDVYITDKCVLDMRSMDFKSNSAVAWSNKSDFACANAFNNSIIPEDTFFPSPESSCDVKLVEKSFETDTNLNFQNLSVIGFRILLLKVAGFNLLMTLRLWSSRAKRSGSGVKQTLNFDLLKLAGDVESNPGPTSMDWIWRILFLVGAATGAHSFEEVQLVESGGGLVKPGGSLRLSCAASGFTFSNAWMSWVRQAPGKGLEWVGFIRSKAYGGTTEYAASVKGRFTISRDDSKSIAYLQMNNLKTEDTAVYYCARDGLYSSSWYDSDYWGQGTLVTVSSTREDLKNVFPPEVAVFEPSEAEISHTQKATLVCLATGFYPDHVELSWWVNGKEVHSGVCTDPQPLKEQPALNDSRYCLSSRLRVSATFWQNPRNHFRCQVQFYGLSENDEWTQDRAKPVTQIVSAEAWGRADCGFTSESYQQGVLSATILYEILLGKATLYAVLVSALVLMAMVKRKDSRG

SEQ ID NO: 12815 - protein, 771 aa, Artificial Sequence
  Synthetic Polypeptide
MALPVTALLLPLALLLHAARPEVQLVESGGGLVQPGGSLRLSCAASGFSFSDFWMSWVRQAPGKGLEWVATISQAGSEKDYVDSVKGRFTISRDNAKKSLYLQMNSLRAEDTAVYYCASGVYSFDYRGQGTLVTVSSGTGGGGSGGGGSGGGGSEFQSVLTQPPSVSGAPGQRVTISCTGSSSNIGAGYDVHWYQQLPGTAPKLLIFGNSNRPSGVPDRFSGFKSGTSASLAITGLQAEDEADYFCQSYDSSLSGSGVFGTGTKVTVLGLEIQNPDPAVYQLRDSKSSDKSVCLFTDFDSQTNVSQSKDSDVYITDKCVLDMRSMDFKSNSAVAWSNKSDFACANAFNNSIIPEDTFFPSPESSCDVKLVEKSFETDTNLNFQNLSVIGFRILLLKVAGFNLLMTLRLWSSRAKRSGSGVKQTLNFDLLKLAGDVESNPGPTSMDWIWRILFLVGAATGAHSFEQMQLVQSGGGLVQPGRSLRLSCAASGFTFDDYAMHWVRQAPGKGLEWVSGISWNSGSIGYADSVKGRFTISRDNAKNSLYLQMNSLRAEDTALYYCAKDIHSGSYYGLLYYAMDVWGQGTTVTVSSTREDLKNVFPPEVAVFEPSEAEISHTQKATLVCLATGFYPDHVELSWWVNGKEVHSGVCTDPQPLKEQPALNDSRYCLSSRLRVSATFWQNPRNHFRCQVQFYGLSENDEWTQDRAKPVTQIVSAEAWGRADCGFTSESYQQGVLSATILYEILLGKATLYAVLVSALVLMAMVKRKDSRG

SEQ ID NO: 12816 - protein, 771 aa, Artificial Sequence
  Synthetic Polypeptide
MALPVTALLLPLALLLHAARPEVQLVESGGGLVQPGGSLRLSCAASGFSFSDFWMSWVRQAPGKGLEWVATISQAGSEKDYVDSVKGRFTISRDNAKKSLYLQMNSLRAEDTAVYYCASGVYSFDYRGQGTLVTVSSGTGGGGSGGGGSGGGGSEFLPVLTQPPSASGTPGQRVTISCSGRSSNIGSNSVNWYRQLPGAAPKLLIYSNNQRPPGVPVRFSGSKSGTSASLAISGLQSEDEATYYCATWDDNLNVHYVFGTGTKVTVLGSRLEIQNPDPAVYQLRDSKSSDKSVCLFTDFDSQTNVSQSKDSDVYITDKCVLDMRSMDFKSNSAVAWSNKSDFACANAFNNSIIPEDTFFPSPESSCDVKLVEKSFETDTNLNFQNLSVIGFRILLLKVAGFNLLMTLRLWSSRAKRSGSGVKQTLNFDLLKLAGDVESNPGPTSMDWIWRILFLVGAATGAHSFELEMAQVQLVQSGAEVKKPGSSVKVSCKASGGTFSSYAISWVRQAPGQGLEWMGRIIPILGIANYAQKFQGRVTITADKSTSTAYMELSSLRSEDTAVYYCARGGYYSHDMWSEDWGQGTLVTVSSTREDLKNVFPPEVAVFEPSEAEISHTQKATLVCLATGFYPDHVELSWWVNGKEVHSGVCTDPQPLKEQPALNDSRYCLSSRLRVSATFWQNPRNHFRCQVQFYGLSENDEWTQDRAKPVTQIVSAEAWGRADCGFTSESYQQGVLSATILYEILLGKATLYAVLVSALVLMAMVKRKDSRG

SEQ ID NO: 12817 - protein, 765 aa, Artificial Sequence
  Synthetic Polypeptide
MALPVTALLLPLALLLHAARPEVQLVESGGGLVQPGGSLRLSCAASGFSFSDFWMSWVRQAPGKGLEWVATISQAGSEKDYVDSVKGRFTISRDNAKKSLYLQMNSLRAEDTAVYYCASGVYSFDYRGQGTLVTVSSGTGGGGSGGGGSGGGGSEFDFVMTQSPDSLAVSLGERVTMSCKSSQSLLNSGNQKNYLTWYQQKPGQPPKLLIYWASTRESGVPDRFSGSGSGTDFTLTISSLQAEDVAVYYCQNDYSYPYTFGQGTKLEIKLEIQNPDPAVYQLRDSKSSDKSVCLFTDFDSQTNVSQSKDSDVYITDKCVLDMRSMDFKSNSAVAWSNKSDFACANAFNNSIIPEDTFFPSPESSCDVKLVEKSFETDTNLNFQNLSVIGFRILLLKVAGFNLLMTLRLWSSRAKRSGSGVKQTLNFDLLKLAGDVESNPGPTSMDWIWRILFLVGAATGAHSFEEVQLVQSGAELKKPGASVKVSCKASGYTFTDYYMKWVRQAPGQGLEWIGDIIPSNGATFYNQKFKGRVTITVDKSTSTAYMELSSLRSEDTAVYYCARSHLLRASWFAYWGQGTLVTVSSTREDLKNVFPPEVAVFEPSEAEISHTQKATLVCLATGFYPDHVELSWWVNGKEVHSGVCTDPQPLKEQPALNDSRYCLSSRLRVSATFWQNPRNHFRCQVQFYGLSENDEWTQDRAKPVTQIVSAEAWGRADCGFTSESYQQGVLSATILYEILLGKATLYAVLVSALVLMAMVKRKDSRG

SEQ ID NO: 12818 - protein, 765 aa, Artificial Sequence
  Synthetic Polypeptide
MALPVTALLLPLALLLHAARPEVQLVESGGGLVQPGGSLRLSCAASGFSFSDFWMSWVRQAPGKGLEWVATISQAGSEKDYVDSVKGRFTISRDNAKKSLYLQMNSLRAEDTAVYYCASGVYSFDYRGQGTLVTVSSGTGGGGSGGGGSGGGGSEFDFVMTQSPDSLAVSLGERVTMSCKSSQSLLNSGNQKNYLTWYQQKPGQPPKLLIYWASTRESGVPDRFSGSGSGTDFTLTISSLQAEDVAVYYCQNDYSYPYTFGQGTKLEIKLEIQNPDPAVYQLRDSKSSDKSVCLFTDFDSQTNVSQSKDSDVYITDKCVLDMRSMDFKSNSAVAWSNKSDFACANAFNNSIIPEDTFFPSPESSCDVKLVEKSFETDTNLNFQNLSVIGFRILLLKVAGFNLLMTLRLWSSRAKRSGSGVKQTLNFDLLKLAGDVESNPGPTSMDWIWRILFLVGAATGAHSFEQVQLVQSGAELKKPGASVKVSCKASGYTFTDYYMKWVRQAPGQGLEWIGDIIPSNGATFYNQKFKGRVTITVDKSTSTAYMELSSLRSEDTAVYYCARSHLLRASWFAYWGQGTLVTVSSTREDLKNVFPPEVAVFEPSEAEISHTQKATLVCLATGFYPDHVELSWWVNGKEVHSGVCTDPQPLKEQPALNDSRYCLSSRLRVSATFWQNPRNHFRCQVQFYGLSENDEWTQDRAKPVTQIVSAEAWGRADCGFTSESYQQGVLSATILYEILLGKATLYAVLVSALVLMAMVKRKDSRG

SEQ ID NO: 12819 - protein, 755 aa, Artificial Sequence
  Synthetic Polypeptide
MALPVTALLLPLALLLHAARPEVQLVESGGGLVQPGGSLRLSCAASGFSFSDFWMSWVRQAPGKGLEWVATISQAGSEKDYVDSVKGRFTISRDNAKKSLYLQMNSLRAEDTAVYYCASGVYSFDYRGQGTLVTVSSGTGGGGSGGGGSGGGGSEFDVQITQSPSYLAASPGETITINCRASKSISKDLAWYQEKPGKTNKLLIYSGSTLQSGIPSRFSGSGSGTDFTLTISSLEPEDFAMYYCQQHNKYPYTFGGGTKLEIKRLEIQNPDPAVYQLRDSKSSDKSVCLFTDFDSQTNVSQSKDSDVYITDKCVLDMRSMDFKSNSAVAWSNKSDFACANAFNNSIIPEDTFFPSPESSCDVKLVEKSFETDTNLNFQNLSVIGFRILLLKVAGFNLLMTLRLWSSRAKRSGSGVKQTLNFDLLKLAGDVESNPGPTSMDWIWRILFLVGAATGAHSFEQVQLQQPGAELVRPGASVKLSCKASGYTFTSYWMNWVKQRPDQGLEWIGRIDPYDSETHYNQKFKDKAILTVDKSSSTAYMQLSSLTSEDSAVYYCARGNWDDYWGQGTTLTVSSTREDLKNVFPPEVAVFEPSEAEISHTQKATLVCLATGFYPDHVELSWWVNGKEVHSGVCTDPQPLKEQPALNDSRYCLSSRLRVSATFWQNPRNHFRCQVQFYGLSENDEWTQDRAKPVTQIVSAEAWGRADCGFTSESYQQGVLSATILYEILLGKATLYAVLVSALVLMAMVKRKDSRG

SEQ ID NO: 12820 - protein, 757 aa, Artificial Sequence
  Synthetic Polypeptide
MALPVTALLLPLALLLHAARPEVQLVESGGGLVQPGGSLRLSCAASGFSFSDFWMSWVRQAPGKGLEWVATISQAGSEKDYVDSVKGRFTISRDNAKKSLYLQMNSLRAEDTAVYYCASGVYSFDYRGQGTLVTVSSGTGGGGSGGGGSGGGGSEFEIVLTQSPTSMTASPGEQVTITCRASSSINYMHWYQQKPGASPRPWIYETSKLASGVPDRFSGSASGTSYSLTINNMEAEDAATYYCQQWNYPSWTFGGGTKLELKLEIQNPDPAVYQLRDSKSSDKSVCLFTDFDSQTNVSQSKDSDVYITDKCVLDMRSMDFKSNSAVAWSNKSDFACANAFNNSIIPEDTFFPSPESSCDVKLVEKSFETDTNLNFQNLSVIGFRILLLKVAGFNLLMTLRLWSSRAKRSGSGVKQTLNFDLLKLAGDVESNPGPTSMDWIWRILFLVGAATGAHSFEEVQLVESGGGLVQPGRSLKLSCAASGFTFSDYNMAWVRQAPKKGLEWVATILYDGGRTYYRGSVKGRFTISRDNAKSTLYLRMDSLRSEDTATYYCATHSRGTDYFDYWGQGVMVTVSSTREDLKNVFPPEVAVFEPSEAEISHTQKATLVCLATGFYPDHVELSWWVNGKEVHSGVCTDPQPLKEQPALNDSRYCLSSRLRVSATFWQNPRNHFRCQVQFYGLSENDEWTQDRAKPVTQIVSAEAWGRADCGFTSESYQQGVLSATILYEILLGKATLYAVLVSALVLMAMVKRKDSRG

SEQ ID NO: 12821 - protein, 766 aa, Artificial Sequence
  Synthetic Polypeptide
MALPVTALLLPLALLLHAARPEVQLVESGGGLVQPGGSLRLSCAASGFSFSDFWMSWVRQAPGKGLEWVATISQAGSEKDYVDSVKGRFTISRDNAKKSLYLQMNSLRAEDTAVYYCASGVYSFDYRGQGTLVTVSSGTGGGGSGGGGSGGGGSEFDIVMTQSPSSLAVSEGETVTINCKSSQSFLSSGDGKNYVAWYQYKPGQSPKLLIYWASTRQSGVPDRFIGSGSGTDFTLTISTVQAEDLAIYYCQQYYDTPLTFGSGTKLEIKLEIQNPDPAVYQLRDSKSSDKSVCLFTDFDSQTNVSQSKDSDVYITDKCVLDMRSMDFKSNSAVAWSNKSDFACANAFNNSIIPEDTFFPSPESSCDVKLVEKSFETDTNLNFQNLSVIGFRILLLKVAGFNLLMTLRLWSSRAKRSGSGVKQTLNFDLLKLAGDVESNPGPTSMDWIWRILFLVGAATGAHSFEEVKLQESGPSLVQSSQTLSLTCTVSGFSLTSYHIHWVRQTPGKGLEWMGVMWSDGDTSYNSALKSRLSISRDTSQSQVFLKMNSLQTEDTATYYCARGYYSSYLYLWFAYWGQGTLVTVSSTREDLKNVFPPEVAVFEPSEAEISHTQKATLVCLATGFYPDHVELSWWVNGKEVHSGVCTDPQPLKEQPALNDSRYCLSSRLRVSATFWQNPRNHFRCQVQFYGLSENDEWTQDRAKPVTQIVSAEAWGRADCGFTSESYQQGVLSATILYEILLGKATLYAVLVSALVLMAMVKRKDSRG

SEQ ID NO: 12822 - protein, 770 aa, Artificial Sequence
  Synthetic Polypeptide
MALPVTALLLPLALLLHAARPEVQLVESGGGLVQPGGSLRLSCAASGFSFSDFWMSWVRQAPGKGLEWVATISQAGSEKDYVDSVKGRFTISRDNAKKSLYLQMNSLRAEDTAVYYCASGVYSFDYRGQGTLVTVSSGTGGGGSGGGGSGGGGSEFDVLMTQTPVSLPVSLGGQVSISCRSSQSLVHSDGDTYLHWYLQKPGQSPQLLIYRVSNRFSGVPDRFSGSGSGTDFTLKISRVEPEDLGLYYCLQTTHFPPWTFGGGTKLEMKLEIQNPDPAVYQLRDSKSSDKSVCLFTDFDSQTNVSQSKDSDVYITDKCVLDMRSMDFKSNSAVAWSNKSDFACANAFNNSIIPEDTFFPSPESSCDVKLVEKSFETDTNLNFQNLSVIGFRILLLKVAGFNLLMTLRLWSSRAKRSGSGVKQTLNFDLLKLAGDVESNPGPTSMDWIWRILFLVGAATGAHSFEQVQLQQSGPELRRPGSSVRLSCKASGYRIKDFLIHWIKNRPEHGLEWIGWIDPEDGETKYAQKFQTKATLTADTSSNTAYMQLSSLTSEDTATYFCARWGDVYYGLMRGHVMDAWGQGTSVTVSSTREDLKNVFPPEVAVFEPSEAEISHTQKATLVCLATGFYPDHVELSWWVNGKEVHSGVCTDPQPLKEQPALNDSRYCLSSRLRVSATFWQNPRNHFRCQVQFYGLSENDEWTQDRAKPVTQIVSAEAWGRADCGFTSESYQQGVLSATILYEILLGKATLYAVLVSALVLMAMVKRKDSRG

SEQ ID NO: 12823 - protein, 765 aa, Artificial Sequence
  Synthetic Polypeptide
MALPVTALLLPLALLLHAARPEVQLVESGGGLVQPGGSLRLSCAASGFSFSDFWMSWVRQAPGKGLEWVATISQAGSEKDYVDSVKGRFTISRDNAKKSLYLQMNSLRAEDTAVYYCASGVYSFDYRGQGTLVTVSSGTGGGGSGGGGSGGGGSEFDIVMTQSPATLSLSPGERATLSCRSSKSLQNVNGNTYLYWFQQKPGQSPQLLIYRMSNLNSGVPDRFSGSGSGTEFTLTISSLEPEDFAVYYCMQHLEYPITFGAGTKLEIKLEIQNPDPAVYQLRDSKSSDKSVCLFTDFDSQTNVSQSKDSDVYITDKCVLDMRSMDFKSNSAVAWSNKSDFACANAFNNSIIPEDTFFPSPESSCDVKLVEKSFETDTNLNFQNLSVIGFRILLLKVAGFNLLMTLRLWSSRAKRSGSGVKQTLNFDLLKLAGDVESNPGPTSMDWIWRILFLVGAATGAHSFEEVQLVESGGGLVKPGGSLKLSCAASGYTFTSYVMHWVRQAPGKGLEWIGYINPYNDGTKYNEKFQGRVTISSDKSISTAYMELSSLRSEDTAMYYCARGTYYYGTRVFDYWGQGTLVTVSSTREDLKNVFPPEVAVFEPSEAEISHTQKATLVCLATGFYPDHVELSWWVNGKEVHSGVCTDPQPLKEQPALNDSRYCLSSRLRVSATFWQNPRNHFRCQVQFYGLSENDEWTQDRAKPVTQIVSAEAWGRADCGFTSESYQQGVLSATILYEILLGKATLYAVLVSALVLMAMVKRKDSRG

SEQ ID NO: 12824 - protein, 761 aa, Artificial Sequence
  Synthetic Polypeptide
MALPVTALLLPLALLLHAARPEVQLVESGGGLVQPGGSLRLSCAASGFSFSDFWMSWVRQAPGKGLEWVATISQAGSEKDYVDSVKGRFTISRDNAKKSLYLQMNSLRAEDTAVYYCASGVYSFDYRGQGTLVTVSSGTGGGGSGGGGSGGGGSEFDIQMTQSPSSLSASVGDRVTITCKASDHINNWLAWYQQKPGQAPKLLIYGATTLETGVPSRFSGSGSGTDYTLTISSLQPEDFATYYCQQSWNTPWTFGQGTKLEIKRLEIQNPDPAVYQLRDSKSSDKSVCLFTDFDSQTNVSQSKDSDVYITDKCVLDMRSMDFKSNSAVAWSNKSDFACANAFNNSIIPEDTFFPSPESSCDVKLVEKSFETDTNLNFQNLSVIGFRILLLKVAGFNLLMTLRLWSSRAKRSGSGVKQTLNFDLLKLAGDVESNPGPTSMDWIWRILFLVGAATGAHSFEQVQLQQPGAELVKPGASVKMSCKASGYAFSSYWINWMKQKPGQGLEWIGQIYPGDGDTNYNGKFKGRATLTADTSSSTAYMQLSSLTSEDSAVYFCARSITTVVGCAMDYWGQGTSVTVSSTREDLKNVFPPEVAVFEPSEAEISHTQKATLVCLATGFYPDHVELSWWVNGKEVHSGVCTDPQPLKEQPALNDSRYCLSSRLRVSATFWQNPRNHFRCQVQFYGLSENDEWTQDRAKPVTQIVSAEAWGRADCGFTSESYQQGVLSATILYEILLGKATLYAVLVSALVLMAMVKRKDSRG

SEQ ID NO: 12825 - protein, 763 aa, Artificial Sequence
  Synthetic Polypeptide
MALPVTALLLPLALLLHAARPEVQLVESGGGLVQPGGSLRLSCAASGFSFSDFWMSWVRQAPGKGLEWVATISQAGSEKDYVDSVKGRFTISRDNAKKSLYLQMNSLRAEDTAVYYCASGVYSFDYRGQGTLVTVSSGTGGGGSGGGGSGGGGSEFQIVLSQSPAILSASPGEKVTMTCRASSSVSYMHWYQQKPGSSPKPWIYATSNLASGVPARFSGSGSGTSYSFTISRVEAEDAATYYCQQWTFNPPTFGGGTRLEIKRTVAALEIQNPDPAVYQLRDSKSSDKSVCLFTDFDSQTNVSQSKDSDVYITDKCVLDMRSMDFKSNSAVAWSNKSDFACANAFNNSIIPEDTFFPSPESSCDVKLVEKSFETDTNLNFQNLSVIGFRILLLKVAGFNLLMTLRLWSSRAKRSGSGVKQTLNFDLLKLAGDVESNPGPTSMDWIWRILFLVGAATGAHSFEQAYLQQSGAELVRPGASVKMSCKASGYTFTSYNMHWVKQTPRQGLEWIGGIYPGNGDTSYNQKFKGKATLTVGKSSSTAYMQLSSLTSEDSAVYFCARYDYNYAMDYWGQGTSVTVSSASTREDLKNVFPPEVAVFEPSEAEISHTQKATLVCLATGFYPDHVELSWWVNGKEVHSGVCTDPQPLKEQPALNDSRYCLSSRLRVSATFWQNPRNHFRCQVQFYGLSENDEWTQDRAKPVTQIVSAEAWGRADCGFTSESYQQGVLSATILYEILLGKATLYAVLVSALVLMAMVKRKDSRG

SEQ ID NO: 12826 - protein, 761 aa, Artificial Sequence
  Synthetic Polypeptide
MALPVTALLLPLALLLHAARPEVQLVESGGGLVQPGGSLRLSCAASGFSFSDFWMSWVRQAPGKGLEWVATISQAGSEKDYVDSVKGRFTISRDNAKKSLYLQMNSLRAEDTAVYYCASGVYSFDYRGQGTLVTVSSGTGGGGSGGGGSGGGGSEFEIVLTQSPATLSLSPGERATLSCRASQSVSSYLAWYQQKPGQAPRLLIYDASNRATGIPARFSGSGSGTDFTLTISSLEPEDFAVYYCQQRSNWPITFGQGTRLEIKLEIQNPDPAVYQLRDSKSSDKSVCLFTDFDSQTNVSQSKDSDVYITDKCVLDMRSMDFKSNSAVAWSNKSDFACANAFNNSIIPEDTFFPSPESSCDVKLVEKSFETDTNLNFQNLSVIGFRILLLKVAGFNLLMTLRLWSSRAKRSGSGVKQTLNFDLLKLAGDVESNPGPTSMDWIWRILFLVGAATGAHSFEEVQLVESGGGLVQPDRSLRLSCAASGFTFHDYAMHWVRQAPGKGLEWVSTISWNSGTIGYADSVKGRFTISRDNAKNSLYLQMNSLRAEDTALYYCAKDIQYGNYYYGMDVWGQGTTVTVSSTREDLKNVFPPEVAVFEPSEAEISHTQKATLVCLATGFYPDHVELSWWVNGKEVHSGVCTDPQPLKEQPALNDSRYCLSSRLRVSATFWQNPRNHFRCQVQFYGLSENDEWTQDRAKPVTQIVSAEAWGRADCGFTSESYQQGVLSATILYEILLGKATLYAVLVSALVLMAMVKRKDSRG

SEQ ID NO: 12827 - protein, 756 aa, Artificial Sequence
  Synthetic Polypeptide
MALPVTALLLPLALLLHAARPEVQLVESGGGLVQPGGSLRLSCAASGFSFSDFWMSWVRQAPGKGLEWVATISQAGSEKDYVDSVKGRFTISRDNAKKSLYLQMNSLRAEDTAVYYCASGVYSFDYRGQGTLVTVSSGTGGGGSGGGGSGGGGSEFDIQMTQSPSSLSASVGDRVTINCKASQDINSYLSWFQQKPGKAPKTLIYRANRLVDGVPSRFSGSGSGQDYTLTISSLQPEDFATYYCLQYDEFPLTFGGGTKVEIKLEIQNPDPAVYQLRDSKSSDKSVCLFTDFDSQTNVSQSKDSDVYITDKCVLDMRSMDFKSNSAVAWSNKSDFACANAFNNSIIPEDTFFPSPESSCDVKLVEKSFETDTNLNFQNLSVIGFRILLLKVAGFNLLMTLRLWSSRAKRSGSGVKQTLNFDLLKLAGDVESNPGPTSMDWIWRILFLVGAATGAHSFEQVQLVQSGAEVKKPGASVKVSCKASGYTFTNYDINWVRQAPGQGLEWIGWIYPGDGSTKYNEKFKAKATLTADTSTSTAYMELRSLRSDDTAVYYCASGYEDAMDYWGQGTTVTVSSTREDLKNVFPPEVAVFEPSEAEISHTQKATLVCLATGFYPDHVELSWWVNGKEVHSGVCTDPQPLKEQPALNDSRYCLSSRLRVSATFWQNPRNHFRCQVQFYGLSENDEWTQDRAKPVTQIVSAEAWGRADCGFTSESYQQGVLSATILYEILLGKATLYAVLVSALVLMAMVKRKDSRG

SEQ ID NO: 12828 - protein, 758 aa, Artificial Sequence
  Synthetic Polypeptide
MALPVTALLLPLALLLHAARPEVQLVESGGGLVQPGGSLRLSCAASGFSFSDFWMSWVRQAPGKGLEWVATISQAGSEKDYVDSVKGRFTISRDNAKKSLYLQMNSLRAEDTAVYYCASGVYSFDYRGQGTLVTVSSGTGGGGSGGGGSGGGGSEFDIVMTQTPLSLSVTPGQPASISCKSSQSLLDGDGKTYLNWLLQKPGQSPQRLIYLVSKLDSGVPDRFSGSGSGTDFTLKISRVEAEDVGVYYCWQGTHFPRTFGQGTKLEIKLEIQNPDPAVYQLRDSKSSDKSVCLFTDFDSQTNVSQSKDSDVYITDKCVLDMRSMDFKSNSAVAWSNKSDFACANAFNNSIIPEDTFFPSPESSCDVKLVEKSFETDTNLNFQNLSVIGFRILLLKVAGFNLLMTLRLWSSRAKRSGSGVKQTLNFDLLKLAGDVESNPGPTSMDWIWRILFLVGAATGAHSFEQVQLVQSGAEVKKPGASVKVSCKASGYTFKDTYIHWVRQAPGQGLEWMGRIDPANGNTKYDPKFQGRVTMTRDTSISTAYMELSRLRSDDTAVYYCARRGGVDWGQGTLVTVSSTREDLKNVFPPEVAVFEPSEAEISHTQKATLVCLATGFYPDHVELSWWVNGKEVHSGVCTDPQPLKEQPALNDSRYCLSSRLRVSATFWQNPRNHFRCQVQFYGLSENDEWTQDRAKPVTQIVSAEAWGRADCGFTSESYQQGVLSATILYEILLGKATLYAVLVSALVLMAMVKRKDSRG

SEQ ID NO: 12829 - protein, 759 aa, Artificial Sequence
  Synthetic Polypeptide
MALPVTALLLPLALLLHAARPEVQLVESGGGLVQPGGSLRLSCAASGFSFSDFWMSWVRQAPGKGLEWVATISQAGSEKDYVDSVKGRFTISRDNAKKSLYLQMNSLRAEDTAVYYCASGVYSFDYRGQGTLVTVSSGTGGGGSGGGGSGGGGSEFDIQMTQSPSSLSASVGDRVTITCKASQDVSTAVAWFQQKPGKAPKLLIYSPSYRYTGVPSRFSGSGSGTDFTLTISSLQPEDFTYYCQQLYSTPYTFGQGTKVEIKLEIQNPDPAVYQLRDSKSSDKSVCLFTDFDSQTNVSQSKDSDVYITDKCVLDMRSMDFKSNSAVAWSNKSDFACANAFNNSIIPEDTFFPSPESSCDVKLVEKSFETDTNLNFQNLSVIGFRILLLKVAGFNLLMTLRLWSSRAKRSGSGVKQTLNFDLLKLAGDVESNPGPTSMDWIWRILFLVGAATGAHSFEEVQLVQSGAEVKKPGASVKVSCKASGYTFTDYYLDVVVRQAPGQGLEWIGRVNPYNGGTIYNQKFKGRVTLTRDTSTSTAYLELSSLRSEDTAVYYCARDHYRYDPLLDYWGQGTLVTVSSTREDLKNVFPPEVAVFEPSEAEISHTQKATLVCLATGFYPDHVELSWWVNGKEVHSGVCTDPQPLKEQPALNDSRYCLSSRLRVSATFWQNPRNHFRCQVQFYGLSENDEWTQDRAKPVTQIVSAEAWGRADCGFTSESYQQGVLSATILYEILLGKATLYAVLVSALVLMAMVKRKDSRG

SEQ ID NO: 12830 - protein, 765 aa, Artificial Sequence
  Synthetic Polypeptide
MALPVTALLLPLALLLHAARPEVQLVESGGGLVQPGGSLRLSCAASGFSFSDFWMSWVRQAPGKGLEWVATISQAGSEKDYVDSVKGRFTISRDNAKKSLYLQMNSLRAEDTAVYYCASGVYSFDYRGQGTLVTVSSGTGGGGSGGGGSGGGGSEFDIQMTQSPSSLSASVGDRVTITCRASQSVSTSSYNYMHWYQQKPGKPPKLLIKYASNLESGVPSRFSGSGSGTDFTLTISSLQPEDFATYYCQHSWEIPLTFGQGTKVEIKLEIQNPDPAVYQLRDSKSSDKSVCLFTDFDSQTNVSQSKDSDVYITDKCVLDMRSMDFKSNSAVAWSNKSDFACANAFNNSIIPEDTFFPSPESSCDVKLVEKSFETDTNLNFQNLSVIGFRILLLKVAGFNLLMTLRLWSSRAKRSGSGVKQTLNFDLLKLAGDVESNPGPTSMDWIWRILFLVGAATGAHSFEEVQLVQSGAEVKKPGASVKVSCKASGYSFTDYYMHWVRQAPGQGLEWIGRINPYNGAAFYSQNFKDRVTLTVDTSTSTAYLELSSLRSEDTAVYYCAIERGADLEGYAMDYWGQGTLVTVSSTREDLKNVFPPEVAVFEPSEAEISHTQKATLVCLATGFYPDHVELSWWVNGKEVHSGVCTDPQPLKEQPALNDSRYCLSSRLRVSATFWQNPRNHFRCQVQFYGLSENDEWTQDRAKPVTQIVSAEAWGRADCGFTSESYQQGVLSATILYEILLGKATLYAVLVSALVLMAMVKRKDSRG

SEQ ID NO: 12831 - protein, 763 aa, Artificial Sequence
  Synthetic Polypeptide
MALPVTALLLPLALLLHAARPEVQLVESGGGLVQPGGSLRLSCAASGFSFSDFWMSWVRQAPGKGLEWVATISQAGSEKDYVDSVKGRFTISRDNAKKSLYLQMNSLRAEDTAVYYCASGVYSFDYRGQGTLVTVSSGTGGGGSGGGGSGGGGSEFEIVLTQSPATLSASPGERVTLTCRASSNVISSYVHWYQQKPGSSPRLFLYSTSNLASGVPSRFSGSGSGTDFTFTISSLEAEDAATYYCQQYSGYPLTFGQGTRLEIKLEIQNPDPAVYQLRDSKSSDKSVCLFTDFDSQTNVSQSKDSDVYITDKCVLDMRSMDFKSNSAVAWSNKSDFACANAFNNSIIPEDTFFPSPESSCDVKLVEKSFETDTNLNFQNLSVIGFRILLLKVAGFNLLMTLRLWSSRAKRSGSGVKQTLNFDLLKLAGDVESNPGPTSMDWIWRILFLVGAATGAHSFEQVQLQESGPGLVKPSETLSLTCAVSGYSITSAYYWNWIRQPPGKGLEWIGYISYDGRNNYNPSLKNRITINPDTSKNQFSLQLNSVTPEDTAVYYCAREGDYDVGNYYAMDYWGQGTLVTVSSTREDLKNVFPPEVAVFEPSEAEISHTQKATLVCLATGFYPDHVELSWWVNGKEVHSGVCTDPQPLKEQPALNDSRYCLSSRLRVSATFWQNPRNHFRCQVQFYGLSENDEWTQDRAKPVTQIVSAEAWGRADCGFTSESYQQGVLSATILYEILLGKATLYAVLVSALVLMAMVKRKDSRG

SEQ ID NO: 12832 - protein, 763 aa, Artificial Sequence
  Synthetic Polypeptide
MALPVTALLLPLALLLHAARPEVQLVESGGGLVQPGGSLRLSCAASGFSFSDFWMSWVRQAPGKGLEWVATISQAGSEKDYVDSVKGRFTISRDNAKKSLYLQMNSLRAEDTAVYYCASGVYSFDYRGQGTLVTVSSGTGGGGSGGGGSGGGGSEFEIVLTQSPATLSLSPGERATLSCRASSNVISSYVHWYQQKPGQAPRLLIYSTSNLASGIPARFSGSGSGTDFTLTISSLEPEDFAVYYCQQYSGYPLTFGQGTRLEIKLEIQNPDPAVYQLRDSKSSDKSVCLFTDFDSQTNVSQSKDSDVYITDKCVLDMRSMDFKSNSAVAWSNKSDFACANAFNNSIIPEDTFFPSPESSCDVKLVEKSFETDTNLNFQNLSVIGFRILLLKVAGFNLLMTLRLWSSRAKRSGSGVKQTLNFDLLKLAGDVESNPGPTSMDWIWRILFLVGAATGAHSFEEVQLVESGGGLVQPGRSLRLSCAASGYSITSAYYWNWVRQAPGKGLEWVSYISYDGRNNYNPSLKNRFTISRDNAKKSLYLQMNSLRAEDTALYYCAKEGDYDVGNYYAMDYWGQGTTVTVSSTREDLKNVFPPEVAVFEPSEAEISHTQKATLVCLATGFYPDHVELSWWVNGKEVHSGVCTDPQPLKEQPALNDSRYCLSSRLRVSATFWQNPRNHFRCQVQFYGLSENDEWTQDRAKPVTQIVSAEAWGRADCGFTSESYQQGVLSATILYEILLGKATLYAVLVSALVLMAMVKRKDSRG

SEQ ID NO: 12833 - protein, 762 aa, Artificial Sequence
  Synthetic Polypeptide
MALPVTALLLPLALLLHAARPEVQLVESGGGLVQPGGSLRLSCAASGFSFSDFWMSWVRQAPGKGLEWVATISQAGSEKDYVDSVKGRFTISRDNAKKSLYLQMNSLRAEDTAVYYCASGVYSFDYRGQGTLVTVSSGTGGGGSGGGGSGGGGSEFDVVMTQTPLSLPVSLGDQASISCRSSQSLVHSNGNTYLRWYLQKPGQSPKVLIYKVSNRVSGVPDRFSGSGSGTDFTLKINRVEAEDLGVYFCSQSTHVPWTFGGGTKLEIKLEIQNPDPAVYQLRDSKSSDKSVCLFTDFDSQTNVSQSKDSDVYITDKCVLDMRSMDFKSNSAVAWSNKSDFACANAFNNSIIPEDTFFPSPESSCDVKLVEKSFETDTNLNFQNLSVIGFRILLLKVAGFNLLMTLRLWSSRAKRSGSGVKQTLNFDLLKLAGDVESNPGPTSMDWIWRILFLVGAATGAHSFEGVKLDETGGGLVQPGGAMKLSCVTSGFTFGHYWMNWVRQSPEKGLEWVAQFRNKPYNYETYYSDSVKGRFTISRDDSKSSVYLQMNNLRVEDTGIYYCTGASYGMEYLGQGTSVTVSTTREDLKNVFPPEVAVFEPSEAEISHTQKATLVCLATGFYPDHVELSWWVNGKEVHSGVCTDPQPLKEQPALNDSRYCLSSRLRVSATFWQNPRNHFRCQVQFYGLSENDEWTQDRAKPVTQIVSAEAWGRADCGFTSESYQQGVLSATILYEILLGKATLYAVLVSALVLMAMVKRKDSRG

SEQ ID NO: 12834 - protein, 768 aa, Artificial Sequence
  Synthetic Polypeptide
MALPVTALLLPLALLLHAARPEVQLVESGGGLVQPGGSLRLSCAASGFSFSDFWMSWVRQAPGKGLEWVATISQAGSEKDYVDSVKGRFTISRDNAKKSLYLQMNSLRAEDTAVYYCASGVYSFDYRGQGTLVTVSSGTGGGGSGGGGSGGGGSEFQVQLVESGGNLVQPGGSLRLSCAASGFTFGSFSMSWVRQAPGGGLEWVAGLSARSSLTHYADSVKGRFTISRDNAKNSVYLQMNSLRVEDTAVYYCARRSYDSSGYWGHFYSYMDVWGQGTLVTVSLEIQNPDPAVYQLRDSKSSDKSVCLFTDFDSQTNVSQSKDSDVYITDKCVLDMRSMDFKSNSAVAWSNKSDFACANAFNNSIIPEDTFFPSPESSCDVKLVEKSFETDTNLNFQNLSVIGFRILLLKVAGFNLLMTLRLWSSRAKRSGSGVKQTLNFDLLKLAGDVESNPGPTSMDWIWRILFLVGAATGAHSFESVLTQPSSVSAAPGQKVTISCSGSTSNIGNNYVSWYQQHPGKAPKLMIYDVSKRPSGVPDRFSGSKSGNSASLDISGLQSEDEADYYCAAWDDSLSEFLFGTGTKLTVLGTREDLKNVFPPEVAVFEPSEAEISHTQKATLVCLATGFYPDHVELSWWVNGKEVHSGVCTDPQPLKEQPALNDSRYCLSSRLRVSATFWQNPRNHFRCQVQFYGLSENDEWTQDRAKPVTQIVSAEAWGRADCGFTSESYQQGVLSATILYEILLGKATLYAVLVSALVLMAMVKRKDSRG

SEQ ID NO: 12835 - protein, 763 aa, Artificial Sequence
  Synthetic Polypeptide
MALPVTALLLPLALLLHAARPEVQLVESGGGLVQPGGSLRLSCAASGFSFSDFWMSWVRQAPGKGLEWVATISQAGSEKDYVDSVKGRFTISRDNAKKSLYLQMNSLRAEDTAVYYCASGVYSFDYRGQGTLVTVSSGTGGGGSGGGGSGGGGSEFDVVMTQSPSSLSASVGDRVTITCQSSLDISHYLNWYQQKPGKAPKLLIYDASNLETGVPSRFSGSGSGTHFTFTISSLQPEDFATYYCQQYDNLPLTFGGGTKLEIKRLEIQNPDPAVYQLRDSKSSDKSVCLFTDFDSQTNVSQSKDSDVYITDKCVLDMRSMDFKSNSAVAWSNKSDFACANAFNNSIIPEDTFFPSPESSCDVKLVEKSFETDTNLNFQNLSVIGFRILLLKVAGFNLLMTLRLWSSRAKRSGSGVKQTLNFDLLKLAGDVESNPGPTSMDWIWRILFLVGAATGAHSFEQVQLVQSGGGVVQPGGSLRVSCAASGVTLSDYGMHWVRQAPGKGLEWVAFIRNDGSDKYYADSVKGRFTISRDNSEKTVSLQMSSLRAEDTAVYYCAKNGESGPLDYWYLDLWGRGTLVTVSSTREDLKNVFPPEVAVFEPSEAEISHTQKATLVCLATGFYPDHVELSWWVNGKEVHSGVCTDPQPLKEQPALNDSRYCLSSRLRVSATFWQNPRNHFRCQVQFYGLSENDEWTQDRAKPVTQIVSAEAWGRADCGFTSESYQQGVLSATILYEILLGKATLYAVLVSALVLMAMVKRKDSRG

SEQ ID NO: 12836 - protein, 767 aa, Artificial Sequence
  Synthetic Polypeptide
MALPVTALLLPLALLLHAARPEVQLVESGGGLVQPGGSLRLSCAASGFSFSDFWMSWVRQAPGKGLEWVATISQAGSEKDYVDSVKGRFTISRDNAKKSLYLQMNSLRAEDTAVYYCASGVYSFDYRGQGTLVTVSSGTGGGGSGGGGSGGGGSEFSYELTQPPSVSGTPGQRVAISCSGSSSNIGTRMVTWYQHVPGTAPKLLIFNNNQRPSGVPDRFSASKSGTSASLAIIGLQSDDEADYYCATWDDNVKSYVFGTGTKVTVLGSRLEIQNPDPAVYQLRDSKSSDKSVCLFTDFDSQTNVSQSKDSDVYITDKCVLDMRSMDFKSNSAVAWSNKSDFACANAFNNSIIPEDTFFPSPESSCDVKLVEKSFETDTNLNFQNLSVIGFRILLLKVAGFNLLMTLRLWSSRAKRSGSGVKQTLNFDLLKLAGDVESNPGPTSMDWIWRILFLVGAATGAHSFELEMAQVQLQQWGAGLLKPSETLSLTCAVYGGSFSGYYWSWIRQPPGKGLEWIGEINHSGSTNYNPSLKSRVTISVDTSKNQFSLKLSSVTAADTAVYYCARAPQSWYVGDVWGQGTLVTVSSTREDLKNVFPPEVAVFEPSEAEISHTQKATLVCLATGFYPDHVELSWWVNGKEVHSGVCTDPQPLKEQPALNDSRYCLSSRLRVSATFWQNPRNHFRCQVQFYGLSENDEWTQDRAKPVTQIVSAEAWGRADCGFTSESYQQGVLSATILYEILLGKATLYAVLVSALVLMAMVKRKDSRG

SEQ ID NO: 12837 - protein, 764 aa, Artificial Sequence
  Synthetic Polypeptide
MALPVTALLLPLALLLHAARPEVQLVESGGGLVQPGGSLRLSCAASGFSFSDFWMSWVRQAPGKGLEWVATISQAGSEKDYVDSVKGRFTISRDNAKKSLYLQMNSLRAEDTAVYYCASGVYSFDYRGQGTLVTVSSGTGGGGSGGGGSGGGGSEFQSVLTQPPSLSVAPGKTASITCGGNNIGMKSVHWYQQRPGQAPVLVIYYDSDRPSGIPGRFSGSNSGNTATLTISRVEAGDEADYYCQVWDTTGDHPGYVFGTGTKVTVLLEIQNPDPAVYQLRDSKSSDKSVCLFTDFDSQTNVSQSKDSDVYITDKCVLDMRSMDFKSNSAVAWSNKSDFACANAFNNSIIPEDTFFPSPESSCDVKLVEKSFETDTNLNFQNLSVIGFRILLLKVAGFNLLMTLRLWSSRAKRSGSGVKQTLNFDLLKLAGDVESNPGPTSMDWIWRILFLVGAATGAHSFEQVQLVQSGAEVKKPGSSVKVSCKASGGTFSSYAISWVRQAPGQGLEWMGGIIPIFGTANYAQKFQGRVTITADESTSTAYMELSSLRSEDTAVYYCARGVYGYSGSAPYDEWGQGTLVTVSSTREDLKNVFPPEVAVFEPSEAEISHTQKATLVCLATGFYPDHVELSWWVNGKEVHSGVCTDPQPLKEQPALNDSRYCLSSRLRVSATFWQNPRNHFRCQVQFYGLSENDEWTQDRAKPVTQIVSAEAWGRADCGFTSESYQQGVLSATILYEILLGKATLYAVLVSALVLMAMVKRKDSRG

SEQ ID NO: 12838 - protein, 762 aa, Artificial Sequence
  Synthetic Polypeptide
MALPVTALLLPLALLLHAARPEVQLVESGGGLVQPGGSLRLSCAASGFSFSDFWMSWVRQAPGKGLEWVATISQAGSEKDYVDSVKGRFTISRDNAKKSLYLQMNSLRAEDTAVYYCASGVYSFDYRGQGTLVTVSSGTGGGGSGGGGSGGGGSEFEVQLVESGGGLVQPGRSLRLSCAASGFTFDDYAMHWVRQAPGKGLEWVSGISWNSGSIGYADSVKGRFTISRDNAKNSLYLQMNSLRAEDTALYYCAKDKGGGYYDFWSGSDYWGQGTLVTVSSLEIQNPDPAVYQLRDSKSSDKSVCLFTDFDSQTNVSQSKDSDVYITDKCVLDMRSMDFKSNSAVAWSNKSDFACANAFNNSIIPEDTFFPSPESSCDVKLVEKSFETDTNLNFQNLSVIGFRILLLKVAGFNLLMTLRLWSSRAKRSGSGVKQTLNFDLLKLAGDVESNPGPTSMDWIWRILFLVGAATGAHSFESSELTQDPAVSVALGQTVRITCQGDSLRSYYASWYQQKPGQAPVLVIYGKNNRPSGIPDRFSGSSSGNTASLTITGAQAEDEADYYCNSRDSSGWVFGGGTKLTVLTREDLKNVFPPEVAVFEPSEAEISHTQKATLVCLATGFYPDHVELSWWVNGKEVHSGVCTDPQPLKEQPALNDSRYCLSSRLRVSATFWQNPRNHFRCQVQFYGLSENDEWTQDRAKPVTQIVSAEAWGRADCGFTSESYQQGVLSATILYEILLGKATLYAVLVSALVLMAMVKRKDSRG

SEQ ID NO: 12839 - protein, 771 aa, Artificial Sequence
  Synthetic Polypeptide
MALPVTALLLPLALLLHAARPEVQLVESGGGLVQPGGSLRLSCAASGFSFSDFWMSWVRQAPGKGLEWVATISQAGSEKDYVDSVKGRFTISRDNAKKSLYLQMNSLRAEDTAVYYCASGVYSFDYRGQGTLVTVSSGTGGGGSGGGGSGGGGSEFEVQLQQSGPGLVKPSQTLSLTCAISGDSVLSNSDTWNWIRQSPSRGLEWLGRTYHRSTWYDDYASSVRGRVSINVDTSKNQYSLQLNAVTPEDTGVYYCARDRLQDGNSWSDAFDVWGQGTMVTVSSLEIQNPDPAVYQLRDSKSSDKSVCLFTDFDSQTNVSQSKDSDVYITDKCVLDMRSMDFKSNSAVAWSNKSDFACANAFNNSIIPEDTFFPSPESSCDVKLVEKSFETDTNLNFQNLSVIGFRILLLKVAGFNLLMTLRLWSSRAKRSGSGVKQTLNFDLLKLAGDVESNPGPTSMDWIWRILFLVGAATGAHSFEQSALTQPASVSGSPGQSITISCTGTSSDVGGYNYVSWYQQHPGKAPKLMIYDVSNRPSGVSNRFSGSKSGNTASLTISGLQAEDEADYYCSSYTSSSTLVYVFGTGTKVTVLTREDLKNVFPPEVAVFEPSEAEISHTQKATLVCLATGFYPDHVELSWWVNGKEVHSGVCTDPQPLKEQPALNDSRYCLSSRLRVSATFWQNPRNHFRCQVQFYGLSENDEWTQDRAKPVTQIVSAEAWGRADCGFTSESYQQGVLSATILYEILLGKATLYAVLVSALVLMAMVKRKDSRG

SEQ ID NO: 12840 - protein, 749 aa, Artificial Sequence
  Synthetic Polypeptide
MALPVTALLLPLALLLHAARPEVQLVESGGGLVQPGGSLRLSCAASGFSFSDFWMSWVRQAPGKGLEWVATISQAGSEKDYVDSVKGRFTISRDNAKKSLYLQMNSLRAEDTAVYYCASGVYSFDYRGQGTLVTVSSGTGGGGSGGGGSGGGGSEFQVQLVQSGAEVKKPGASVKVSCKASGYTFTSYDINWVRQATGQGLEWMGWMNPNSGNTGYAQKFQGRVTMTRNTSISTAYMELSSLRSEDTAVYYCARGDSTKVEIKLEIQNPDPAVYQLRDSKSSDKSVCLFTDFDSQTNVSQSKDSDVYITDKCVLDMRSMDFKSNSAVAWSNKSDFACANAFNNSIIPEDTFFPSPESSCDVKLVEKSFETDTNLNFQNLSVIGFRILLLKVAGFNLLMTLRLWSSRAKRSGSGVKQTLNFDLLKLAGDVESNPGPTSMDWIWRILFLVGAATGAHSFEQSVLTQPRSVSGSPGQSVTISCTGTSSDVGGYNYVSWYQQHPGEAPKLIIYDADKRPSGISNRFSSGKSGNTASLTISGLQVEDEADYYCCSYAGGSTWVFGGGTKVTVLTREDLKNVFPPEVAVFEPSEAEISHTQKATLVCLATGFYPDHVELSWWVNGKEVHSGVCTDPQPLKEQPALNDSRYCLSSRLRVSATFWQNPRNHFRCQVQFYGLSENDEWTQDRAKPVTQIVSAEAWGRADCGFTSESYQQGVLSATILYEILLGKATLYAVLVSALVLMAMVKRKDSRG

SEQ ID NO: 12841 - protein, 771 aa, Artificial Sequence
  Synthetic Polypeptide
MALPVTALLLPLALLLHAARPEVQLVESGGGLVQPGGSLRLSCAASGFSFSDFWMSWVRQAPGKGLEWVATISQAGSEKDYVDSVKGRFTISRDNAKKSLYLQMNSLRAEDTAVYYCASGVYSFDYRGQGTLVTVSSGTGGGGSGGGGSGGGGSEFEVQLQQSGPGLVKPSQTLSLTCAISGDSVSSNSAAWNWIRQSPSRGLEWLGRTYYRSKWYSDYAVSVKSRITINPDTSKNQFSLQLNSVTPEDTAVYYCARDPYDFWSGYPDAFDIWGQGTMVTVSSLEIQNPDPAVYQLRDSKSSDKSVCLFTDFDSQTNVSQSKDSDVYITDKCVLDMRSMDFKSNSAVAWSNKSDFACANAFNNSIIPEDTFFPSPESSCDVKLVEKSFETDTNLNFQNLSVIGFRILLLKVAGFNLLMTLRLWSSRAKRSGSGVKQTLNFDLLKLAGDVESNPGPTSMDWIWRILFLVGAATGAHSFEQSALTQPASVSGSPGQSITISCTGTSSDVGGYNYVSWYQQHPGKAPKVIISEVNNRPSGVSHRFSGSKSGNTASLTISGLQAEDEADYFCSSYTSGRTLYVFGTGSKVTVLGTREDLKNVFPPEVAVFEPSEAEISHTQKATLVCLATGFYPDHVELSWWVNGKEVHSGVCTDPQPLKEQPALNDSRYCLSSRLRVSATFWQNPRNHFRCQVQFYGLSENDEWTQDRAKPVTQIVSAEAWGRADCGFTSESYQQGVLSATILYEILLGKATLYAVLVSALVLMAMVKRKDSRG

SEQ ID NO: 12842 - protein, 770 aa, Artificial Sequence
  Synthetic Polypeptide
MALPVTALLLPLALLLHAARPEVQLVESGGGLVQPGGSLRLSCAASGFSFSDFWMSWVRQAPGKGLEWVATISQAGSEKDYVDSVKGRFTISRDNAKKSLYLQMNSLRAEDTAVYYCASGVYSFDYRGQGTLVTVSSGTGGGGSGGGGSGGGGSEFQSALTQPASASGSPGQSVTISCTGTSSDVGGYNYVSWYQQHPGKAPKLMIYDVSNRPSGVSNRFSGSKSGNTASLTISGLQAEDEADYYCSSYTSSSTLYVFGTGTQLTVLLEIQNPDPAVYQLRDSKSSDKSVCLFTDFDSQTNVSQSKDSDVYITDKCVLDMRSMDFKSNSAVAWSNKSDFACANAFNNSIIPEDTFFPSPESSCDVKLVEKSFETDTNLNFQNLSVIGFRILLLKVAGFNLLMTLRLWSSRAKRSGSGVKQTLNFDLLKLAGDVESNPGPTSMDWIWRILFLVGAATGAHSFEEVQLQQSGPGLVKPSQTLSLTCAISGDSMLSNSDTWNWIRQSPSRGLEWLGRTYHRSTWYDDYASSVRGRVSINVDTSKNQYSLQLNAVTPEDTGVYYCARVRLQDGNSWSDAFDVWGQGTMVTVSSTREDLKNVFPPEVAVFEPSEAEISHTQKATLVCLATGFYPDHVELSWWVNGKEVHSGVCTDPQPLKEQPALNDSRYCLSSRLRVSATFWQNPRNHFRCQVQFYGLSENDEWTQDRAKPVTQIVSAEAWGRADCGFTSESYQQGVLSATILYEILLGKATLYAVLVSALVLMAMVKRKDSRG

SEQ ID NO: 12843 - protein, 770 aa, Artificial Sequence
  Synthetic Polypeptide
MALPVTALLLPLALLLHAARPEVQLVESGGGLVQPGGSLRLSCAASGFSFSDFWMSWVRQAPGKGLEWVATISQAGSEKDYVDSVKGRFTISRDNAKKSLYLQMNSLRAEDTAVYYCASGVYSFDYRGQGTLVTVSSGTGGGGSGGGGSGGGGSEFDVMLTQTPLSLPVSLGDQASISCRSSQSILHSTGDTYLEWYLQKPGQSPKLLINKVSNRLSGVPDRFSGSGSGTDFTLKISRVEAEDLGVYYCFQGSHVPWTFGGGTKLEIKRADAAPTVSIFPLEIQNPDPAVYQLRDSKSSDKSVCLFTDFDSQTNVSQSKDSDVYITDKCVLDMRSMDFKSNSAVAWSNKSDFACANAFNNSIIPEDTFFPSPESSCDVKLVEKSFETDTNLNFQNLSVIGFRILLLKVAGFNLLMTLRLWSSRAKRSGSGVKQTLNFDLLKLAGDVESNPGPTSMDWIWRILFLVGAATGAHSFEQVKLQQSGPSLVKPGASVKMSCKASGYTFTDFYMKWVKQSHGKSLEWIGDINPNIGDTFYNQKFKGKATLTVDKSSSTAYMQLNSLTSEDSAVYFCSVGYFDVWGAGTTVTVSSTREDLKNVFPPEVAVFEPSEAEISHTQKATLVCLATGFYPDHVELSWWVNGKEVHSGVCTDPQPLKEQPALNDSRYCLSSRLRVSATFWQNPRNHFRCQVQFYGLSENDEWTQDRAKPVTQIVSAEAWGRADCGFTSESYQQGVLSATILYEILLGKATLYAVLVSALVLMAMVKRKDSRG

SEQ ID NO: 12844 - protein, 766 aa, Artificial Sequence
  Synthetic Polypeptide
MALPVTALLLPLALLLHAARPEVQLVESGGGLVQPGGSLRLSCAASGFSFSDFWMSWVRQAPGKGLEWVATISQAGSEKDYVDSVKGRFTISRDNAKKSLYLQMNSLRAEDTAVYYCASGVYSFDYRGQGTLVTVSSGTGGGGSGGGGSGGGGSEFEIVLTQSPATLSLSPGERATLSCRASQSVSIYLAWYQQKPGQAPRLLIYDASNRATGIPARFSGSGSGTDFTLTISSLEPEDFAVYYCQQRSNWPPFTFGPGTKVDIKLEIQNPDPAVYQLRDSKSSDKSVCLFTDFDSQTNVSQSKDSDVYITDKCVLDMRSMDFKSNSAVAWSNKSDFACANAFNNSIIPEDTFFPSPESSCDVKLVEKSFETDTNLNFQNLSVIGFRILLLKVAGFNLLMTLRLWSSRAKRSGSGVKQTLNFDLLKLAGDVESNPGPTSMDWIWRILFLVGAATGAHSFEQVQLVESGGGVVQPGRSLRLSCAASGFTFSSYGMHWVRQAPGKGLEWVAVIWDDGSNKYYVDSVKGRFTISRDNSKNTLYLQMNSLRAEDTAVYYCARDDYYGSGSFNSYYGTDVWGQGTTVTVSSTREDLKNVFPPEVAVFEPSEAEISHTQKATLVCLATGFYPDHVELSWWVNGKEVHSGVCTDPQPLKEQPALNDSRYCLSSRLRVSATFWQNPRNHFRCQVQFYGLSENDEWTQDRAKPVTQIVSAEAWGRADCGFTSESYQQGVLSATILYEILLGKATLYAVLVSALVLMAMVKRKDSRG

SEQ ID NO: 12845 - protein, 751 aa, Artificial Sequence
  Synthetic Polypeptide
MALPVTALLLPLALLLHAARPEVQLVESGGGLVQPGGSLRLSCAASGFSFSDFWMSWVRQAPGKGLEWVATISQAGSEKDYVDSVKGRFTISRDNAKKSLYLQMNSLRAEDTAVYYCASGVYSFDYRGQGTLVTVSSGTGGGGSGGGGSGGGGSEFDIQMTQSPSSLSASVGDRVTITCRASQGISSWLAWYQQKPEKAPKSLIYAASSLQSGVPSRFSGSGSGTDFTLTISSLQPEDFATYYCQQYNSYPYTFGQGTKLEIKLEIQNPDPAVYQLRDSKSSDKSVCLFTDFDSQTNVSQSKDSDVYITDKCVLDMRSMDFKSNSAVAWSNKSDFACANAFNNSIIPEDTFFPSPESSCDVKLVEKSFETDTNLNFQNLSVIGFRILLLKVAGFNLLMTLRLWSSRAKRSGSGVKQTLNFDLLKLAGDVESNPGPTSMDWIWRILFLVGAATGAHSFEEVQLVQSGGGLVHPGGSLRLSCAGSGFTFSTYLMYWVRQAPGKTLEWVSAIGSGGDTYYADSVKGRFTISRDNAKNSLYLQMNSLRAEDMAVYYCARGLGYWGQGTLVTVSSTREDLKNVFPPEVAVFEPSEAEISHTQKATLVCLATGFYPDHVELSWWVNGKEVHSGVCTDPQPLKEQPALNDSRYCLSSRLRVSATFWQNPRNHFRCQVQFYGLSENDEWTQDRAKPVTQIVSAEAWGRADCGFTSESYQQGVLSATILYEILLGKATLYAVLVSALVLMAMVKRKDSRG

SEQ ID NO: 12846 - protein, 770 aa, Artificial Sequence
  Synthetic Polypeptide
MALPVTALLLPLALLLHAARPEVQLVESGGGLVQPGGSLRLSCAASGFSFSDFWMSWVRQAPGKGLEWVATISQAGSEKDYVDSVKGRFTISRDNAKKSLYLQMNSLRAEDTAVYYCASGVYSFDYRGQGTLVTVSSGTGGGGSGGGGSGGGGSEFLPVLTQPPSVSVAPGKTARITCGGNNIGSKSVHWYQQKPGQAPVLVVYDDSDRPSGIPERFSGSNSGNTATLTISRVEAGDEADYYCQVWDSSSDYVVFGGGTKLTVLLEIQNPDPAVYQLRDSKSSDKSVCLFTDFDSQTNVSQSKDSDVYITDKCVLDMRSMDFKSNSAVAWSNKSDFACANAFNNSIIPEDTFFPSPESSCDVKLVEKSFETDTNLNFQNLSVIGFRILLLKVAGFNLLMTLRLWSSRAKRSGSGVKQTLNFDLLKLAGDVESNPGPTSMDWIWRILFLVGAATGAHSFEEVQLVQSGAEVKKPGESLKISCKGSGYSFTSYWIGWVRQMPGKGLEWMGIIYPGDSDTRYSPSFQGQVTISADKSISTAYLQWSSLKASDTAMYYCARQVWGWQGGMYPRSNWWYNLDSWGQGTLVTVSSTREDLKNVFPPEVAVFEPSEAEISHTQKATLVCLATGFYPDHVELSWWVNGKEVHSGVCTDPQPLKEQPALNDSRYCLSSRLRVSATFWQNPRNHFRCQVQFYGLSENDEWTQDRAKPVTQIVSAEAWGRADCGFTSESYQQGVLSATILYEILLGKATLYAVLVSALVLMAMVKRKDSRG

SEQ ID NO: 12847 - protein, 763 aa, Artificial Sequence
  Synthetic Polypeptide
MALPVTALLLPLALLLHAARPEVQLVESGGGLVQPGGSLRLSCAASGFSFSDFWMSWVRQAPGKGLEWVATISQAGSEKDYVDSVKGRFTISRDNAKKSLYLQMNSLRAEDTAVYYCASGVYSFDYRGQGTLVTVSSGTGGGGSGGGGSGGGGSEFELVMTQSPASLAVSLGQRATISCRASESVDSYGKSFMHWYQLKPGQPPKLLIYRASNLESGVPARFSGSGSRTDFTLTIDPVEADDAATYYCQQNNEDPWTFGGGTKLEIKLEIQNPDPAVYQLRDSKSSDKSVCLFTDFDSQTNVSQSKDSDVYITDKCVLDMRSMDFKSNSAVAWSNKSDFACANAFNNSIIPEDTFFPSPESSCDVKLVEKSFETDTNLNFQNLSVIGFRILLLKVAGFNLLMTLRLWSSRAKRSGSGVKQTLNFDLLKLAGDVESNPGPTSMDWIWRILFLVGAATGAHSFEEVQLEQSGPELVKPGASVKMSCKASGYTFTNYYMKWVKQSHGKSLEWIGDLNPNNGDTFYNQKFKGKATLTVDKSSNTAYMQLNSLTSEDSAVYYCARTGRYEENAMDYWGQGTSVTVSSTREDLKNVFPPEVAVFEPSEAEISHTQKATLVCLATGFYPDHVELSWWVNGKEVHSGVCTDPQPLKEQPALNDSRYCLSSRLRVSATFWQNPRNHFRCQVQFYGLSENDEWTQDRAKPVTQIVSAEAWGRADCGFTSESYQQGVLSATILYEILLGKATLYAVLVSALVLMAMVKRKDSRG

SEQ ID NO: 12848 - protein, 757 aa, Artificial Sequence
  Synthetic Polypeptide
MALPVTALLLPLALLLHAARPEVQLVESGGGLVQPGGSLRLSCAASGFSFSDFWMSWVRQAPGKGLEWVATISQAGSEKDYVDSVKGRFTISRDNAKKSLYLQMNSLRAEDTAVYYCASGVYSFDYRGQGTLVTVSSGTGGGGSGGGGSGGGGSEFDVVMTQSPSSLSASVGDRVTITCMASEDIYIRLAWYQQKPGNAPKLLIYAATSLETGVPSRFSGSGSGTDFTLTISSLQPEDFATYYCQQYWSSPWTFGGGTKVEIKLEIQNPDPAVYQLRDSKSSDKSVCLFTDFDSQTNVSQSKDSDVYITDKCVLDMRSMDFKSNSAVAWSNKSDFACANAFNNSIIPEDTFFPSPESSCDVKLVEKSFETDTNLNFQNLSVIGFRILLLKVAGFNLLMTLRLWSSRAKRSGSGVKQTLNFDLLKLAGDVESNPGPTSMDWIWRILFLVGAATGAHSFEQVQLQESGPGLVKPSQTLSLTCTVSGYSITSDYTWNWIRQPPGNGLEWIGYITYSGSTSYNPSLKSRVLISVDTSKNQVSLKLSSVTAADTAVYYCARLGRRYTMDYWGQGTTVTVSSTREDLKNVFPPEVAVFEPSEAEISHTQKATLVCLATGFYPDHVELSWWVNGKEVHSGVCTDPQPLKEQPALNDSRYCLSSRLRVSATFWQNPRNHFRCQVQFYGLSENDEWTQDRAKPVTQIVSAEAWGRADCGFTSESYQQGVLSATILYEILLGKATLYAVLVSALVLMAMVKRKDSRG

SEQ ID NO: 12849 - protein, 761 aa, Artificial Sequence; identical to SEQ ID NO: 12712
  Synthetic Polypeptide

SEQ ID NO: 12850 - protein, 761 aa, Artificial Sequence
  Synthetic Polypeptide
MALPVTALLLPLALLLHAARPEVQLVESGGGLVQPGGSLRLSCAASGFSFSDFWMSWVRQAPGKGLEWVATISQAGSEKDYVDSVKGRFTISRDNAKKSLYLQMNSLRAEDTAVYYCASGVYSFDYRGQGTLVTVSSGTGGGGSGGGGSGGGGSEFDIVLTQSPATLSLSPGDRATLSCRASESVTILGSHLIYWYQQKPGQAPRLLIQLASNVQTGIPARFSGSGSRTDFTLTISSLEPEDFAVYYCLQSRTIPRTFGQGTKLEIKRLEIQNPDPAVYQLRDSKSSDKSVCLFTDFDSQTNVSQSKDSDVYITDKCVLDMRSMDFKSNSAVAWSNKSDFACANAFNNSIIPEDTFFPSPESSCDVKLVEKSFETDTNLNFQNLSVIGFRILLLKVAGFNLLMTLRLWSSRAKRSGSGVKQTLNFDLLKLAGDVESNPGPTSMDWIWRILFLVGAATGAHSFEQVQLVQSGSELKKPGESVKISCKASGYTFTHYSMNWVRQAPGQGLEWMGRINTETGEPLYADDFKGRFVFSLDTSASTAYLQISSLKAEDTAVYYCSNDYLYSLDYWGQGTLVTVSSTREDLKNVFPPEVAVFEPSEAEISHTQKATLVCLATGFYPDHVELSWWVNGKEVHSGVCTDPQPLKEQPALNDSRYCLSSRLRVSATFWQNPRNHFRCQVQFYGLSENDEWTQDRAKPVTQIVSAEAWGRADCGFTSESYQQGVLSATILYEILLGKATLYAVLVSALVLMAMVKRKDSRG

SEQ ID NO: 12851 - protein, 762 aa, Artificial Sequence
  Synthetic Polypeptide
MALPVTALLLPLALLLHAARPEVQLVESGGGLVQPGGSLRLSCAASGFSFSDFWMSWVRQAPGKGLEWVATISQAGSEKDYVDSVKGRFTISRDNAKKSLYLQMNSLRAEDTAVYYCASGVYSFDYRGQGTLVTVSSGTGGGGSGGGGSGGGGSEFDIQLTQSPSFLSASVGDRVTITCRASQGISTDLNWYQQKPGKAPKLLIYAASNLESGVPSRFSGSGSGTEFTLTISSLQPEDFATYYCQQSYNWPYTFGGGTKVEIKRLEIQNPDPAVYQLRDSKSSDKSVCLFTDFDSQTNVSQSKDSDVYITDKCVLDMRSMDFKSNSAVAWSNKSDFACANAFNNSIIPEDTFFPSPESSCDVKLVEKSFETDTNLNFQNLSVIGFRILLLKVAGFNLLMTLRLWSSRAKRSGSGVKQTLNFDLLKLAGDVESNPGPTSMDWIWRILFLVGAATGAHSFEEVQLVESGGGLVKPGGSLRLSCAASGFTFSNFEMNWVRQAPGKGLEWVSGISSNGRYINYADSVKGRFTISRDNAKNSLYLQMNSLRAEDTAVYYCARVVDFDQDYNGFDYWGQGTLVTVSSTREDLKNVFPPEVAVFEPSEAEISHTQKATLVCLATGFYPDHVELSWWVNGKEVHSGVCTDPQPLKEQPALNDSRYCLSSRLRVSATFWQNPRNHFRCQVQFYGLSENDEWTQDRAKPVTQIVSAEAWGRADCGFTSESYQQGVLSATILYEILLGKATLYAVLVSALVLMAMVKRKDSRG

SEQ ID NO: 12852 - protein, 760 aa, Artificial Sequence
  Synthetic Polypeptide
MALPVTALLLPLALLLHAARPEVQLVESGGGLVQPGGSLRLSCAASGFSFSDFWMSWVRQAPGKGLEWVATISQAGSEKDYVDSVKGRFTISRDNAKKSLYLQMNSLRAEDTAVYYCASGVYSFDYRGQGTLVTVSSGTGGGGSGGGGSGGGGSEFDIQLTQSPSFLSASVGDRVTITCSLSLGISTWRDWFPPRLGRGLEPLTYAASTLQSGVPSRFSGSGSGTEFTLTISSLQPEDFATYYCQQLNSYPLTFGGGTKVEIKRLEIQNPDPAVYQLRDSKSSDKSVCLFTDFDSQTNVSQSKDSDVYITDKCVLDMRSMDFKSNSAVAWSNKSDFACANAFNNSIIPEDTFFPSPESSCDVKLVEKSFETDTNLNFQNLSVIGFRILLLKVAGFNLLMTLRLWSSRAKRSGSGVKQTLNFDLLKLAGDVESNPGPTSMDWIWRILFLVGAATGAHSFEEVQLVESGGGLVKPGGSLRLSCAASGFTFSTYGMSWVRQAPGKGLEWVAYINNGSGYIYYADSVKGRFTISRDNAKNSLYLQMNSLRAEDTAVYYCARGQWWSGGDFDYWGQGTLVTVSSTREDLKNVFPPEVAVFEPSEAEISHTQKATLVCLATGFYPDHVELSWWVNGKEVHSGVCTDPQPLKEQPALNDSRYCLSSRLRVSATFWQNPRNHFRCQVQFYGLSENDEWTQDRAKPVTQIVSAEAWGRADCGFTSESYQQGVLSATILYEILLGKATLYAVLVSALVLMAMVKRKDSRG

SEQ ID NO: 12853 - protein, 761 aa, Artificial Sequence
  Synthetic Polypeptide
MALPVTALLLPLALLLHAARPEVQLVESGGGLVQPGGSLRLSCAASGFSFSDFWMSWVRQAPGKGLEWVATISQAGSEKDYVDSVKGRFTISRDNAKKSLYLQMNSLRAEDTAVYYCASGVYSFDYRGQGTLVTVSSGTGGGGSGGGGSGGGGSEFEIVLTQSPATLSLSPGERATLSCSASSSVSYMYWYQQKPGQAPRLLIYRTSNLASGIPARFSGSGSGTDFTLTISSLEPEDFAVYYCQQYHSYPTTFGQGTKVEIKRTVLEIQNPDPAVYQLRDSKSSDKSVCLFTDFDSQTNVSQSKDSDVYITDKCVLDMRSMDFKSNSAVAWSNKSDFACANAFNNSIIPEDTFFPSPESSCDVKLVEKSFETDTNLNFQNLSVIGFRILLLKVAGFNLLMTLRLWSSRAKRSGSGVKQTLNFDLLKLAGDVESNPGPTSMDWIWRILFLVGAATGAHSFEEVQLVESGGGLVQPGGSLRLSCAASGFSFNTYAMNWVRQAPGKGLEWVSHIRSKSNNFATYYADSVKDRFTISRDNAKNSLYLQMNSLRAEDTAVYYCARQGGDFPMDYWGQGTLVTVSSTREDLKNVFPPEVAVFEPSEAEISHTQKATLVCLATGFYPDHVELSWWVNGKEVHSGVCTDPQPLKEQPALNDSRYCLSSRLRVSATFWQNPRNHFRCQVQFYGLSENDEWTQDRAKPVTQIVSAEAWGRADCGFTSESYQQGVLSATILYEILLGKATLYAVLVSALVLMAMVKRKDSRG

SEQ ID NO: 12854 - protein, 757 aa, Artificial Sequence
  Synthetic Polypeptide
MALPVTALLLPLALLLHAARPEVQLVESGGGLVQPGGSLRLSCAASGFSFSDFWMSWVRQAPGKGLEWVATISQAGSEKDYVDSVKGRFTISRDNAKKSLYLQMNSLRAEDTAVYYCASGVYSFDYRGQGTLVTVSSGTGGGGSGGGGSGGGGSEFDVVMTQSPSSLSASVGDRVTITCKASEDIYIRLAWYQQKPGKAPKLLIYAATSLETGVPSRFSGSGSGTDFTLTISSLQPEDFATYYCQQYWTTPWTFGGGTKVEIKLEIQNPDPAVYQLRDSKSSDKSVCLFTDFDSQTNVSQSKDSDVYITDKCVLDMRSMDFKSNSAVAWSNKSDFACANAFNNSIIPEDTFFPSPESSCDVKLVEKSFETDTNLNFQNLSVIGFRILLLKVAGFNLLMTLRLWSSRAKRSGSGVKQTLNFDLLKLAGDVESNPGPTSMDWIWRILFLVGAATGAHSFEQVQLQESGPGLVKPSQTLSLTCTVSGYSITIDYTWNWIRQPPGKGLEWIGYITYSGSTDYNPSLKSRVLISVDTSKNQVSLKLSSVTAADTAVYYCARLGRRYALDYWGQGTTVTVSSTREDLKNVFPPEVAVFEPSEAEISHTQKATLVCLATGFYPDHVELSWWVNGKEVHSGVCTDPQPLKEQPALNDSRYCLSSRLRVSATFWQNPRNHFRCQVQFYGLSENDEWTQDRAKPVTQIVSAEAWGRADCGFTSESYQQGVLSATILYEILLGKATLYAVLVSALVLMAMVKRKDSRG

SEQ ID NO: 12855 - protein, 761 aa, Artificial Sequence
  Synthetic Polypeptide
MALPVTALLLPLALLLHAARPEVQLVESGGGLVQPGGSLRLSCAASGFSFSDFWMSWVRQAPGKGLEWVATISQAGSEKDYVDSVKGRFTISRDNAKKSLYLQMNSLRAEDTAVYYCASGVYSFDYRGQGTLVTVSSGTGGGGSGGGGSGGGGSEFDIQMTQTTSSLSASLGDRVTISCRASQDISNYLNWYQQKPDGTVKLLIYYTSILHSGVPSRFSGSGSGTDYSLTISNLEQEDFATYFCQQGNTLPWTFGGGTKLEIKALEIQNPDPAVYQLRDSKSSDKSVCLFTDFDSQTNVSQSKDSDVYITDKCVLDMRSMDFKSNSAVAWSNKSDFACANAFNNSIIPEDTFFPSPESSCDVKLVEKSFETDTNLNFQNLSVIGFRILLLKVAGFNLLMTLRLWSSRAKRSGSGVKQTLNFDLLKLAGDVESNPGPTSMDWIWRILFLVGAATGAHSFEVQLVESGGGLVKPGGSLKLSCAASGFAFSIYDMSWVRQTPEKRLEWVAYISSGGGTYYPDTVKGRFTISRDNAKNTLYLQMSSLKSEDTAMYYCARHSGYGTHWGVLFAYWGQGTLVTVSATREDLKNVFPPEVAVFEPSEAEISHTQKATLVCLATGFYPDHVELSWWVNGKEVHSGVCTDPQPLKEQPALNDSRYCLSSRLRVSATFWQNPRNHFRCQVQFYGLSENDEWTQDRAKPVTQIVSAEAWGRADCGFTSESYQQGVLSATILYEILLGKATLYAVLVSALVLMAMVKRKDSRG

SEQ ID NO: 12856 - protein, 772 aa, Artificial Sequence
  Synthetic Polypeptide
MALPVTALLLPLALLLHAARPEVQLVESGGGLVQPGGSLRLSCAASGFSFSDFWMSWVRQAPGKGLEWVATISQAGSEKDYVDSVKGRFTISRDNAKKSLYLQMNSLRAEDTAVYYCASGVYSFDYRGQGTLVTVSSGTGGGGSGGGGSGGGGSEFDIVMTQSPDSLAVSLGERATINCKSSQSLLYRSNQKNYLAWYQQKPGQPPKLLIYWASTRESGVPDRFSGSGSGTDFTLTISSLQAEDVAVYYCQQYYNYPRTFGQGTKVEIKRTVLEIQNPDPAVYQLRDSKSSDKSVCLFTDFDSQTNVSQSKDSDVYITDKCVLDMRSMDFKSNSAVAWSNKSDFACANAFNNSIIPEDTFFPSPESSCDVKLVEKSFETDTNLNFQNLSVIGFRILLLKVAGFNLLMTLRLWSSRAKRSGSGVKQTLNFDLLKLAGDVESNPGPTSMDWIWRILFLVGAATGAHSFEEVQLLESGGGLVQPGGSLRLSCAASGYSITSDYAWNWVRQAPGKGLEWVSYISNSGSTSYNPSLKSRFTISRDNSKNTLYLQMNSLRAEDTAVYYCAKERNYDYDDYYYAMDYWGQGTLVTVSSTREDLKNVFPPEVAVFEPSEAEISHTQKATLVCLATGFYPDHVELSWWVNGKEVHSGVCTDPQPLKEQPALNDSRYCLSSRLRVSATFWQNPRNHFRCQVQFYGLSENDEWTQDRAKPVTQIVSAEAWGRADCGFTSESYQQGVLSATILYEILLGKATLYAVLVSALVLMAMVKRKDSRG

SEQ ID NO: 12857 - protein, 765 aa, Artificial Sequence
  Synthetic Polypeptide
MALPVTALLLPLALLLHAARPEVQLVESGGGLVQPGGSLRLSCAASGFSFSDFWMSWVRQAPGKGLEWVATISQAGSEKDYVDSVKGRFTISRDNAKKSLYLQMNSLRAEDTAVYYCASGVYSFDYRGQGTLVTVSSGTGGGGSGGGGSGGGGSEFDVVMTQSPLSLPVTLGQPASISCRSSQSLLHSSGNTYLEWYQQRPGQSPRPLIYKISTRFSGVPDRFSGSGSGTDFTLKISRVEAEDVGVYYCFQGSHVPYTFGGGTKVEIKRLEIQNPDPAVYQLRDSKSSDKSVCLFTDFDSQTNVSQSKDSDVYITDKCVLDMRSMDFKSNSAVAWSNKSDFACANAFNNSIIPEDTFFPSPESSCDVKLVEKSFETDTNLNFQNLSVIGFRILLLKVAGFNLLMTLRLWSSRAKRSGSGVKQTLNFDLLKLAGDVESNPGPTSMDWIWRILFLVGAATGAHSFEQVQLVQSGAEVKKPGASVKVSCKASGLTIEDYYMHWVRQAPGQGLEWMGWIDPENGDTEYGPKFQGRVTMTRDTSINTAYMELSRLRSDDTAVYYCAVHNAHYGTWFAYWGQGTLVTVSSTREDLKNVFPPEVAVFEPSEAEISHTQKATLVCLATGFYPDHVELSWWVNGKEVHSGVCTDPQPLKEQPALNDSRYCLSSRLRVSATFWQNPRNHFRCQVQFYGLSENDEWTQDRAKPVTQIVSAEAWGRADCGFTSESYQQGVLSATILYEILLGKATLYAVLVSALVLMAMVKRKDSRG

SEQ ID NO: 12858 - protein, 757 aa, Artificial Sequence
  Synthetic Polypeptide
MALPVTALLLPLALLLHAARPEVQLVESGGGLVQPGGSLRLSCAASGFSFSDFWMSWVRQAPGKGLEWVATISQAGSEKDYVDSVKGRFTISRDNAKKSLYLQMNSLRAEDTAVYYCASGVYSFDYRGQGTLVTVSSGTGGGGSGGGGSGGGGSEFDIQMTQSPSSLSASVGDRVTITCRASENIYSNLAWYQQKPGKAPKLLIYAATNLADGVPSRFSGSGSGTDFTLTISSLQPEDFATYYCQHFWGTPTFGQGTKVEIKRTVLEIQNPDPAVYQLRDSKSSDKSVCLFTDFDSQTNVSQSKDSDVYITDKCVLDMRSMDFKSNSAVAWSNKSDFACANAFNNSIIPEDTFFPSPESSCDVKLVEKSFETDTNLNFQNLSVIGFRILLLKVAGFNLLMTLRLWSSRAKRSGSGVKQTLNFDLLKLAGDVESNPGPTSMDWIWRILFLVGAATGAHSFEEVQLVESGGGLVQPGGSLRLSCAASGFSLTNYGVHWVRQAPGKGLEWVSVIWSGGSTDYNAAFISRFTISADTSKNTAYLQMNSLRAEDTAVYYCARELIHAMDNWGQGTLVTVSSTREDLKNVFPPEVAVFEPSEAEISHTQKATLVCLATGFYPDHVELSWWVNGKEVHSGVCTDPQPLKEQPALNDSRYCLSSRLRVSATFWQNPRNHFRCQVQFYGLSENDEWTQDRAKPVTQIVSAEAWGRADCGFTSESYQQGVLSATILYEILLGKATLYAVLVSALVLMAMVKRKDSRG

SEQ ID NO: 12859 - protein, 764 aa, Artificial Sequence
  Synthetic Polypeptide
MALPVTALLLPLALLLHAARPEVQLVESGGGLVQPGGSLRLSCAASGFSFSDFWMSWVRQAPGKGLEWVATISQAGSEKDYVDSVKGRFTISRDNAKKSLYLQMNSLRAEDTAVYYCASGVYSFDYRGQGTLVTVSSGTGGGGSGGGGSGGGGSEFDFVMTQSPLSLPVTPGEPASISCRSSQSIVHSNGNTYLEWYLQKPGQSPQLLIYKVSNRFSGVPDRFSGSGSGTDFTLKISRVEAEDVGVYYCFQGSHVPLTFGQGTKLEIKRLEIQNPDPAVYQLRDSKSSDKSVCLFTDFDSQTNVSQSKDSDVYITDKCVLDMRSMDFKSNSAVAWSNKSDFACANAFNNSIIPEDTFFPSPESSCDVKLVEKSFETDTNLNFQNLSVIGFRILLLKVAGFNLLMTLRLWSSRAKRSGSGVKQTLNFDLLKLAGDVESNPGPTSMDWIWRILFLVGAATGAHSFEEVQLVESGAEVKKPGASVKVSCKASGYTFTSYWIHWVRQAPGQGLEWMGENDPSNGRTNYNEKFKNRVTLTVDTSISTAYMELSRLRSDDTAVYYCARGPNYFYSMDYWGQGTMVTVSSTREDLKNVFPPEVAVFEPSEAEISHTQKATLVCLATGFYPDHVELSWWVNGKEVHSGVCTDPQPLKEQPALNDSRYCLSSRLRVSATFWQNPRNHFRCQVQFYGLSENDEWTQDRAKPVTQIVSAEAWGRADCGFTSESYQQGVLSATILYEILLGKATLYAVLVSALVLMAMVKRKDSRG

SEQ ID NO: 12860 - protein, 757 aa, Artificial Sequence
  Synthetic Polypeptide
MALPVTALLLPLALLLHAARPEVQLVESGGGLVQPGGSLRLSCAASGFSFSDFWMSWVRQAPGKGLEWVATISQAGSEKDYVDSVKGRFTISRDNAKKSLYLQMNSLRAEDTAVYYCASGVYSFDYRGQGTLVTVSSGTGGGGSGGGGSGGGGSEFDIQLTQSPSFLSASVGDRVTITCSARSSISFMYWYQQKPGKAPKLLIYDTSNLASGVPSRFSGSGSGTEFTLTISSLEAEDAATYYCQQWSSYPLTFGQGTKLEIKLEIQNPDPAVYQLRDSKSSDKSVCLFTDFDSQTNVSQSKDSDVYITDKCVLDMRSMDFKSNSAVAWSNKSDFACANAFNNSIIPEDTFFPSPESSCDVKLVEKSFETDTNLNFQNLSVIGFRILLLKVAGFNLLMTLRLWSSRAKRSGSGVKQTLNFDLLKLAGDVESNPGPTSMDWIWRILFLVGAATGAHSFEQVQLVQSGAEVKKPGASVKVSCKASGYTFTGSWMNWVRQAPGQGLEWIGRIYPGDGETNYNGKFKDRVTITADKSTSTAYMELSSLRSEDTAVYYCARIYGNNVYFDVWGQGTTVTVSSTREDLKNVFPPEVAVFEPSEAEISHTQKATLVCLATGFYPDHVELSWWVNGKEVHSGVCTDPQPLKEQPALNDSRYCLSSRLRVSATFWQNPRNHFRCQVQFYGLSENDEWTQDRAKPVTQIVSAEAWGRADCGFTSESYQQGVLSATILYEILLGKATLYAVLVSALVLMAMVKRKDSRG

SEQ ID NO: 12861 - protein, 765 aa, Artificial Sequence
  Synthetic Polypeptide
MALPVTALLLPLALLLHAARPEVQLVESGGGLVQPGGSLRLSCAASGFSFSDFWMSWVRQAPGKGLEWVATISQAGSEKDYVDSVKGRFTISRDNAKKSLYLQMNSLRAEDTAVYYCASGVYSFDYRGQGTLVTVSSGTGGGGSGGGGSGGGGSEFQLVLTQSPSASASLGSSVKLTCTLSSGHKTDTIDWYQQQPGKAPRYLMKLEGSGSYNKGSGVPDRFSGSSSGADWYLTISSLQSEDEADYYCGTDYPGNYLFGGGTQLTVLGLEIQNPDPAVYQLRDSKSSDKSVCLFTDFDSQTNVSQSKDSDVYITDKCVLDMRSMDFKSNSAVAWSNKSDFACANAFNNSIIPEDTFFPSPESSCDVKLVEKSFETDTNLNFQNLSVIGFRILLLKVAGFNLLMTLRLWSSRAKRSGSGVKQTLNFDLLKLAGDVESNPGPTSMDWIWRILFLVGAATGAHSFEQEQLVESGGGLVQPGGSLRLSCAASGFTFSDYYMSWIRQAPGKGLEWVATIYPSSGKTYYADSAKGRLTISSDNAKDSLYLQMNSLRAEDTAVYYCTRDSYADDAALFDIWGQGTTVTVSSTREDLKNVFPPEVAVFEPSEAEISHTQKATLVCLATGFYPDHVELSWWVNGKEVHSGVCTDPQPLKEQPALNDSRYCLSSRLRVSATFWQNPRNHFRCQVQFYGLSENDEWTQDRAKPVTQIVSAEAWGRADCGFTSESYQQGVLSATILYEILLGKATLYAVLVSALVLMAMVKRKDSRG

SEQ ID NO: 12862 - protein, 737 aa, Artificial Sequence
  Synthetic Polypeptide
MALPVTALLLPLALLLHAARPEVQLVESGGGLVQPGGSLRLSCAASGFSFSDFWMSWVRQAPGKGLEWVATISQAGSEKDYVDSVKGRFTISRDNAKKSLYLQMNSLRAEDTAVYYCASGVYSFDYRGQGTLVTVSSGTGGGGSGGGGSGGGGSEFEIVLTQSPDTLSLSPGEKATLSCRASQSVSSSFLAWYQQKPGQAPSLLIYVASRRAAGIPDRFSGSGSGTDFTLTISRLEPEDFGMFYCQHYGRTPFTFGPGTKVDIKRASRSRTLILPCTSCGIARAATRACVCSPTSTARPTCPRARTPTCTSPISACWTCGAWTSRATPPWPGPTSPISPAPTPSTTALSPRTHSSQAPRAAATSWWKRASRQTPTTSRTASASESCCKWPALTCPCGCGPAAPREADLASRPISTCSWLATWNPTQALLVWTGFGASFSLSALLPARIPSNRSSWWNQGAVWCSRVGADCHAWRLASHSRTTACTGCDRPPERVWSGSPSGTTDLMSITEILREGSPSPATIAKICSTCKTHSGRMIRRSTIALAQGLLWPAHSITGDRVPWQYQARVRTRTCSHLRWPCSSLARPRSATPRKPPSCAWLPASTPTMWNCLGGSTAKRCTAACVPTPSHKNSPPTTAGTAAADECPPPSGRTPGTTSDARCSSTAARTTSGPRTEPSPPRSCLPKPGAEPIAALPARATSRACAPPSCTRSCWARPPCTPCWCLPWCWLWSSGRTAG

SEQ ID NO: 12863 - protein, 767 aa, Artificial Sequence
  Synthetic Polypeptide
MALPVTALLLPLALLLHAARPEVQLVESGGGLVQPGGSLRLSCAASGFSFSDFWMSWVRQAPGKGLEWVATISQAGSEKDYVDSVKGRFTISRDNAKKSLYLQMNSLRAEDTAVYYCASGVYSFDYRGQGTLVTVSSGTGGGGSGGGGSGGGGSEFDIQMTQSPSSLSASLGDRVTITCRASQGIRNDLGWYQQKPGKAPKRLIYASSTLQSGVPSRFSGSGSGTEFTLTISSLQPEDFATYYCLQHNNFPWTFGQGTKVEIKRLEIQNPDPAVYQLRDSKSSDKSVCLFTDFDSQTNVSQSKDSDVYITDKCVLDMRSMDFKSNSAVAWSNKSDFACANAFNNSIIPEDTFFPSPESSCDVKLVEKSFETDTNLNFQNLSVIGFRILLLKVAGFNLLMTLRLWSSRAKRSGSGVKQTLNFDLLKLAGDVESNPGPTSMDWIWRILFLVGAATGAHSFEQVTLKESGPVLVKPTETLTLTCTVSGFSLINARMGVSWIRQPPGKALEWLAHIFSNAEKSYRTSLKSRLTISKDTSKSQVVLTMTNMDPVDTATYYCARIPGYGGNGDYHYYGMDVWGQGTTVTVSSTREDLKNVFPPEVAVFEPSEAEISHTQKATLVCLATGFYPDHVELSWWVNGKEVHSGVCTDPQPLKEQPALNDSRYCLSSRLRVSATFWQNPRNHFRCQVQFYGLSENDEWTQDRAKPVTQIVSAEAWGRADCGFTSESYQQGVLSATILYEILLGKATLYAVLVSALVLMAMVKRKDSRG

SEQ ID NO: 12864 - protein, 760 aa, Artificial Sequence
  Synthetic Polypeptide
MALPVTALLLPLALLLHAARPEVQLVESGGGLVQPGGSLRLSCAASGFSFSDFWMSWVRQAPGKGLEWVATISQAGSEKDYVDSVKGRFTISRDNAKKSLYLQMNSLRAEDTAVYYCASGVYSFDYRGQGTLVTVSSGTGGGGSGGGGSGGGGSEFDIVLTQSPPSLAMSLGKRATISCRASESVTILGSHLIHWYQQKPGQPPTLLIQLASNVQTGVPARFSGSGSRTDFTLTIDPVEEDDVAVYYCLQSRTIPRTFGGGTKLEIKLEIQNPDPAVYQLRDSKSSDKSVCLFTDFDSQTNVSQSKDSDVYITDKCVLDMRSMDFKSNSAVAWSNKSDFACANAFNNSIIPEDTFFPSPESSCDVKLVEKSFETDTNLNFQNLSVIGFRILLLKVAGFNLLMTLRLWSSRAKRSGSGVKQTLNFDLLKLAGDVESNPGPTSMDWIWRILFLVGAATGAHSFEQIQLVQSGPELKKPGETVKISCKASGYTFTDYSINWVKRAPGKGLKWMGWINTETREPAYAYDFRGRFAFSLETSASTAYLQINNLKYEDTATYFCALDYSYAMDYWGQGTSVTVSSTREDLKNVFPPEVAVFEPSEAEISHTQKATLVCLATGFYPDHVELSWWVNGKEVHSGVCTDPQPLKEQPALNDSRYCLSSRLRVSATFWQNPRNHFRCQVQFYGLSENDEWTQDRAKPVTQIVSAEAWGRADCGFTSESYQQGVLSATILYEILLGKATLYAVLVSALVLMAMVKRKDSRG

SEQ ID NO: 12865 - protein, 762 aa, Artificial Sequence
  Synthetic Polypeptide
MALPVTALLLPLALLLHAARPEVQLVESGGGLVQPGGSLRLSCAASGFSFSDFWMSWVRQAPGKGLEWVATISQAGSEKDYVDSVKGRFTISRDNAKKSLYLQMNSLRAEDTAVYYCASGVYSFDYRGQGTLVTVSSGTGGGGSGGGGSGGGGSEFDIQLTQSPSSLSASVGDRVSFTCQASQDINNFLNWYQQKPGKAPKLLIYDASNLETGVPSRFSGSGSGTDFTFTISSLQPEDIATYYCQQYGNLPFTFGGGTKVEIKRLEIQNPDPAVYQLRDSKSSDKSVCLFTDFDSQTNVSQSKDSDVYITDKCVLDMRSMDFKSNSAVAWSNKSDFACANAFNNSIIPEDTFFPSPESSCDVKLVEKSFETDTNLNFQNLSVIGFRILLLKVAGFNLLMTLRLWSSRAKRSGSGVKQTLNFDLLKLAGDVESNPGPTSMDWIWRILFLVGAATGAHSFEQVQLQESGPGLVKPSETLSLTCTVSGGSISSYYWSWIRQPPGKGLEWIGYIYYSGSTNYNPSLKSRVTISVDTSKNQFSLKLSSVTAADTAVYYCVSLVYCGGDCYSGFDYWGQGTLVTVSSTREDLKNVFPPEVAVFEPSEAEISHTQKATLVCLATGFYPDHVELSWWVNGKEVHSGVCTDPQPLKEQPALNDSRYCLSSRLRVSATFWQNPRNHFRCQVQFYGLSENDEWTQDRAKPVTQIVSAEAWGRADCGFTSESYQQGVLSATILYEILLGKATLYAVLVSALVLMAMVKRKDSRG

SEQ ID NO: 12866 - protein, 764 aa, Artificial Sequence
  Synthetic Polypeptide
MALPVTALLLPLALLLHAARPEVQLVESGGGLVQPGGSLRLSCAASGFSFSDFWMSWVRQAPGKGLEWVATISQAGSEKDYVDSVKGRFTISRDNAKKSLYLQMNSLRAEDTAVYYCASGVYSFDYRGQGTLVTVSSGTGGGGSGGGGSGGGGSEFDIQLTQSPSSLSASVGDRVSFTCQASQDINNFLNWYQQKPGKAPKLLIYDASNLETGVPSRFSGSGSGTDFTFTISSLQPEDIATYYCQQYGNLPFTFGGGTKVEIKRLEIQNPDPAVYQLRDSKSSDKSVCLFTDFDSQTNVSQSKDSDVYITDKCVLDMRSMDFKSNSAVAWSNKSDFACANAFNNSIIPEDTFFPSPESSCDVKLVEKSFETDTNLNFQNLSVIGFRILLLKVAGFNLLMTLRLWSSRAKRSGSGVKQTLNFDLLKLAGDVESNPGPTSMDWIWRILFLVGAATGAHSFEQVQLQESGPGLVKPSQTLSLTCTVSGGSISSGGFYWSWIRQHPGKGLEWIGYIHHSGSTHYNPSLKSRVTISIDTSKNLFSLRLSSVTAADTAVYYCASLVYCGGDCYSGFDYWGQGTLVTVSSTREDLKNVFPPEVAVFEPSEAEISHTQKATLVCLATGFYPDHVELSWWVNGKEVHSGVCTDPQPLKEQPALNDSRYCLSSRLRVSATFWQNPRNHFRCQVQFYGLSENDEWTQDRAKPVTQIVSAEAWGRADCGFTSESYQQGVLSATILYEILLGKATLYAVLVSALVLMAMVKRKDSRG

SEQ ID NO: 12867 - protein, 760 aa, Artificial Sequence
  Synthetic Polypeptide
MALPVTALLLPLALLLHAARPEVQLVESGGGLVQPGGSLRLSCAASGFSFSDFWMSWVRQAPGKGLEWVATISQAGSEKDYVDSVKGRFTISRDNAKKSLYLQMNSLRAEDTAVYYCASGVYSFDYRGQGTLVTVSSGTGGGGSGGGGSGGGGSEFDIQMTQSPSSLSASVGDRVTITCKSSQSVLYSSNQKNYLAWFQQKPGKAPKLLIYWASTRESGVPSRFSGSGSGTDFTLTISSLQPEDFATYFCHQYLSSYTFGQGTKVEIKRLEIQNPDPAVYQLRDSKSSDKSVCLFTDFDSQTNVSQSKDSDVYITDKCVLDMRSMDFKSNSAVAWSNKSDFACANAFNNSIIPEDTFFPSPESSCDVKLVEKSFETDTNLNFQNLSVIGFRILLLKVAGFNLLMTLRLWSSRAKRSGSGVKQTLNFDLLKLAGDVESNPGPTSMDWIWRILFLVGAATGAHSFEEVQLVESGGGLVQPGGSLRLSCAASGYTFTTYWMHWVRQAPGKGLEWVGYIRPSTGYTEYNQKFKDRFTISADTSKNTAYLQMNSLRAEDTAVYYCARSRWLLDYWGQGTLVTVSTREDLKNVFPPEVAVFEPSEAEISHTQKATLVCLATGFYPDHVELSWWVNGKEVHSGVCTDPQPLKEQPALNDSRYCLSSRLRVSATFWQNPRNHFRCQVQFYGLSENDEWTQDRAKPVTQIVSAEAWGRADCGFTSESYQQGVLSATILYEILLGKATLYAVLVSALVLMAMVKRKDSRG

SEQ ID NO: 12868 - protein, 757 aa, Artificial Sequence
  Synthetic Polypeptide
MALPVTALLLPLALLLHAARPEVQLVESGGGLVQPGGSLRLSCAASGFSFSDFWMSWVRQAPGKGLEWVATISQAGSEKDYVDSVKGRFTISRDNAKKSLYLQMNSLRAEDTAVYYCASGVYSFDYRGQGTLVTVSSGTGGGGSGGGGSGGGGSEFDIQMTQSPSSLSASVGDRVTITCRASQDISNYLNWYQQKPGKAPKLLIYYTSRLHSGVPSRFSGSGSGTDFTLTISSLQPEDFATYYCQQGNTLPYTFGQGTKVEIKRLEIQNPDPAVYQLRDSKSSDKSVCLFTDFDSQTNVSQSKDSDVYITDKCVLDMRSMDFKSNSAVAWSNKSDFACANAFNNSIIPEDTFFPSPESSCDVKLVEKSFETDTNLNFQNLSVIGFRILLLKVAGFNLLMTLRLWSSRAKRSGSGVKQTLNFDLLKLAGDVESNPGPTSMDWIWRILFLVGAATGAHSFEEVQLVESGGGLVQPGGSLRLSCAASGFTFSDYFMSWVRQAPGKGLEWVATISNGGTYTYYPDSVKGRFTISRDNSKNTLYLQMNSLRAEDTAVYYCARFDGYIFDYWGQGTLVTVSSTREDLKNVFPPEVAVFEPSEAEISHTQKATLVCLATGFYPDHVELSWWVNGKEVHSGVCTDPQPLKEQPALNDSRYCLSSRLRVSATFWQNPRNHFRCQVQFYGLSENDEWTQDRAKPVTQIVSAEAWGRADCGFTSESYQQGVLSATILYEILLGKATLYAVLVSALVLMAMVKRKDSRG

SEQ ID NO: 12869 - protein, 950 aa, Artificial Sequence
  Synthetic Polypeptide
MALPVTALLLPLALLLHAARPEVQLVESGGGLVQPGGSLRLSCAASGFSFSDFWMSWVRQAPGKGLEWVATISQAGSEKDYVDSVKGRFTISRDNAKKSLYLQMNSLRAEDTAVYYCASGVYSFDYRGQGTLVTVSSGTGGGGSGGGGSGGGGSEFDIQMTQTTSSLSASLGDRVTISCRASQDISKYLNWYQQKPDGTVKLLIYHTSRLHSGVPSRFSGSGSGTDYSLTISNLEQEDIATYFCQQGNTLPYTFGGGTKLEITLEDLKNVFPPEVAVFEPSEAEISHTQKATLVCLATGFYPDHVELSWWVNGKEVHSGVSTDPQPLKEQPALNDSRYCLSSRLRVSATFWQNPRNHFRCQVQFYGLSENDEWTQDRAKPVTQIVSAEAWGRADCGSQSFGLLDPKLCYLLDGILFIYGVILTALFLRVKFSRSADAPAYQQGQNQLYNELNLGRREEYDVLDKRRGRDPEMGGKPQRRKNPQEGLYNELQKDKMAEAYSEIGMKGERRRGKGHDGLYQGLSTATKDTYDALHMQALPPRRAKRSGSGATNFSLLKQAGDVEENPGPTSMDWIWRILFLVGAATGAHSFEVKLQESGPGLVAPSQSLSVTCTVSGVSLPDYGVSWIRQPPRKGLEWLGVIWGSETTYYNSALKSRLTIIKDNSKSQVFLKMNSLQTDDTAIYYCAKHYYYGGSYAMDYWGQGTSVTVSSTRIQNPDPAVYQLRDSKSSDKSVCLFTDFDSQTNVSQSKDSDVYITDKTVLDMRSMDFKSNSAVAWSNKSDFACANAFNNSIIPEDTFFPSPESSCGTQSFGLLDPKLCYLLDGILFIYGVILTALFLRVKFSRSADAPAYQQGQNQLYNELNLGRREEYDVLDKRRGRDPEMGGKPQRRKNPQEGLYNELQKDKMAEAYSEIGMKGERRRGKGHDGLYQGLSTATKDTYDALHMQALPPR

SEQ ID NO: 12870 - protein, 951 aa, Artificial Sequence
  Synthetic Polypeptide
MALPVTALLLPLALLLHAARPEVQLVESGGGLVQPGGSLRLSCAASGFSFSDFWMSWVRQAPGKGLEWVATISQAGSEKDYVDSVKGRFTISRDNAKKSLYLQMNSLRAEDTAVYYCASGVYSFDYRGQGTLVTVSSGTGGGGSGGGGSGGGGSEFEIVMTQSPATLSLSPGERATLSCRASQDISKYLNWYQQKPGQAPRLLIYHTSRLHSGIPARFSGSGSGTDYTLTISSLQPEDFAVYFCQQGNTLPYTFGQGTKLEIKLEDLKNVFPPEVAVFEPSEAEISHTQKATLVCLATGFYPDHVELSWWVNGKEVHSGVSTDPQPLKEQPALNDSRYCLSSRLRVSATFWQNPRNHFRCQVQFYGLSENDEWTQDRAKPVTQIVSAEAWGRADCGSQSFGLLDPKLCYLLDGILFIYGVILTALFLRVKFSRSADAPAYQQGQNQLYNELNLGRREEYDVLDKRRGRDPEMGGKPQRRKNPQEGLYNELQKDKMAEAYSEIGMKGERRRGKGHDGLYQGLSTATKDTYDALHMQALPPRRAKRSGSGATNFSLLKQAGDVEENPGPTSMDWIWRILFLVGAATGAHSFEQVQLQESGPGLVKPSETLSLTCTVSGVSLPDYGVSWIRQPPGKGLEWIGVIWGSETTYYNSSLKSRVTISKDNSKNQVSLKLSSVTAADTAVYYCAKHYYYGGSYAMDYWGQGTLVTVSSTRIQNPDPAVYQLRDSKSSDKSVCLFTDFDSQTNVSQSKDSDVYITDKTVLDMRSMDFKSNSAVAWSNKSDFACANAFNNSIIPEDTFFPSPESSCGTQSFGLLDPKLCYLLDGILFIYGVILTALFLRVKFSRSADAPAYQQGQNQLYNELNLGRREEYDVLDKRRGRDPEMGGKPQRRKNPQEGLYNELQKDKMAEAYSEIGMKGERRRGKGHDGLYQGLSTATKDTYDALHMQALPPR

SEQ ID NO: 12871 - protein, 952 aa, Artificial Sequence
  Synthetic Polypeptide
MALPVTALLLPLALLLHAARPEVQLVESGGGLVQPGGSLRLSCAASGFSFSDFWMSWVRQAPGKGLEWVATISQAGSEKDYVDSVKGRFTISRDNAKKSLYLQMNSLRAEDTAVYYCASGVYSFDYRGQGTLVTVSSGTGGGGSGGGGSGGGGSEFDEIVLTQSPATLSLSPGERATLSCSASSSVSYMHWYQQKPGQAPRLLIYDTSKLASGIPARFSGSGSGTDFTLTISSLEPEDVAVYYCFQGSVYPFTFGQGTKLEIKRLEDLKNVFPPEVAVFEPSEAEISHTQKATLVCLATGFYPDHVELSWWVNGKEVHSGVSTDPQPLKEQPALNDSRYCLSSRLRVSATFWQNPRNHFRCQVQFYGLSENDEWTQDRAKPVTQIVSAEAWGRADCGSQSFGLLDPKLCYLLDGILFIYGVILTALFLRVKFSRSADAPAYQQGQNQLYNELNLGRREEYDVLDKRRGRDPEMGGKPQRRKNPQEGLYNELQKDKMAEAYSEIGMKGERRRGKGHDGLYQGLSTATKDTYDALHMQALPPRRAKRSGSGATNFSLLKQAGDVEENPGPTSMDWIWRILFLVGAATGAHSFEQVQLQESGPGLVKPSQTLSLTCTVSGGSISTSGMGVGWIRQHPGKGLEWIGHIWWDDDKRYNPALKSRVTISVDTSKNQFSLKLSSVTAADTAVYYCARMELWSYYFDYWGQGTLVTVSSTRIQNPDPAVYQLRDSKSSDKSVCLFTDFDSQTNVSQSKDSDVYITDKTVLDMRSMDFKSNSAVAWSNKSDFACANAFNNSIIPEDTFFPSPESSCGTQSFGLLDPKLCYLLDGILFIYGVILTALFLRVKFSRSADAPAYQQGQNQLYNELNLGRREEYDVLDKRRGRDPEMGGKPQRRKNPQEGLYNELQKDKMAEAYSEIGMKGERRRGKGHDGLYQGLSTATKDTYDALHMQALPPR

SEQ ID NO: 12872 - protein, 950 aa, Artificial Sequence
  Synthetic Polypeptide
MALPVTALLLPLALLLHAARPEVQLVESGGGLVQPGGSLRLSCAASGFSFSDFWMSWVRQAPGKGLEWVATISQAGSEKDYVDSVKGRFTISRDNAKKSLYLQMNSLRAEDTAVYYCASGVYSFDYRGQGTLVTVSSGTGGGGSGGGGSGGGGSEFDYIHVTQSPSSLSVSIGDRVTINCQTSQGVGSDLHWYQHKPGRAPKLLIHHASSVEDGVPSRFSGTGFHTSFNLTINDLQADDIGTYYCQVLQSFGRGSRLDTKLEDLKNVFPPEVAVFEPSEAEISHTQKATLVCLATGFYPDHVELSWWVNGKEVHSGVSTDPQPLKEQPALNDSRYCLSSRLRVSATFWQNPRNHFRCQVQFYGLSENDEWTQDRAKPVTQIVSAEAWGRADCGSQSFGLLDPKLCYLLDGILFIYGVILTALFLRVKFSRSADAPAYQQGQNQLYNELNLGRREEYDVLDKRRGRDPEMGGKPQRRKNPQEGLYNELQKDKMAEAYSEIGMKGERRRGKGHDGLYQGLSTATKDTYDALHMQALPPRRAKRSGSGATNFSLLKQAGDVEENPGPTSMDWIWRILFLVGAATGAHSFERAHLVQSGTAMKKPGASVRVSCQTSGYTFTAHILFWFRQAPGRGLEWVGWIKPQYGAVNFGGGFRDRVTLTRDVYREIAYMDIRGLKPDDTAVYYCARDRSYGDSSWALDAWGQGTTVVVSATRIQNPDPAVYQLRDSKSSDKSVCLFTDFDSQTNVSQSKDSDVYITDKTVLDMRSMDFKSNSAVAWSNKSDFACANAFNNSIIPEDTFFPSPESSCGTQSFGLLDPKLCYLLDGILFIYGVILTALFLRVKFSRSADAPAYQQGQNQLYNELNLGRREEYDVLDKRRGRDPEMGGKPQRRKNPQEGLYNELQKDKMAEAYSEIGMKGERRRGKGHDGLYQGLSTATKDTYDALHMQALPPR

SEQ ID NO: 12873 - protein, 960 aa, Artificial Sequence
  Synthetic Polypeptide
MALPVTALLLPLALLLHAARPEVQLVESGGGLVQPGGSLRLSCAASGFSFSDFWMSWVRQAPGKGLEWVATISQAGSEKDYVDSVKGRFTISRDNAKKSLYLQMNSLRAEDTAVYYCASGVYSFDYRGQGTLVTVSSGTGGGGSGGGGSGGGGSEFDVQMIQTPDSLAVSLGQRATISCRASESVDNYGISFMHWYQQKPGQSPKLLIYRASNLESGIPARFSGSGSRTDFTLTINPVETDDVATYYCQQNNKDPPTFGGGTKLEIKLEDLKNVFPPEVAVFEPSEAEISHTQKATLVCLATGFYPDHVELSWWVNGKEVHSGVSTDPQPLKEQPALNDSRYCLSSRLRVSATFWQNPRNHFRCQVQFYGLSENDEWTQDRAKPVTQIVSAEAWGRADCGSQSFGLLDPKLCYLLDGILFIYGVILTALFLRVKFSRSADAPAYQQGQNQLYNELNLGRREEYDVLDKRRGRDPEMGGKPQRRKNPQEGLYNELQKDKMAEAYSEIGMKGERRRGKGHDGLYQGLSTATKDTYDALHMQALPPRRAKRSGSGATNFSLLKQAGDVEENPGPTSMDWIWRILFLVGAATGAHSFEGGGGSQVQLQQSGAELVKPGASVKISCKASGYAFSSYWMNWVKQRPGKGLEWIGQIYPGDGDTTYNGKFKGKATLTADKSSSTVYMQLNSLTSEDSAVYFCVRYYYGSSGYFDYWGQGTTLTVSSTRIQNPDPAVYQLRDSKSSDKSVCLFTDFDSQTNVSQSKDSDVYITDKTVLDMRSMDFKSNSAVAWSNKSDFACANAFNNSIIPEDTFFPSPESSCGTQSFGLLDPKLCYLLDGILFIYGVILTALFLRVKFSRSADAPAYQQGQNQLYNELNLGRREEYDVLDKRRGRDPEMGGKPQRRKNPQEGLYNELQKDKMAEAYSEIGMKGERRRGKGHDGLYQGLSTATKDTYDALHMQALPPR

SEQ ID NO: 12874 - protein, 951 aa, Artificial Sequence
  Synthetic Polypeptide
MALPVTALLLPLALLLHAARPEVQLVESGGGLVQPGGSLRLSCAASGFSFSDFWMSWVRQAPGKGLEWVATISQAGSEKDYVDSVKGRFTISRDNAKKSLYLQMNSLRAEDTAVYYCASGVYSFDYRGQGTLVTVSSGTGGGGSGGGGSGGGGSEFDVQMIQTPSSLSASLGDRVTISCRASQDIGNYLNWYQQKPDGTVKLLIYYTSRLHSGVPSRFSGSGSGTEYSLTISNLEQEDIATYFCQQGSALPPTFGGGTKLEINLEDLKNVFPPEVAVFEPSEAEISHTQKATLVCLATGFYPDHVELSWWVNGKEVHSGVSTDPQPLKEQPALNDSRYCLSSRLRVSATFWQNPRNHFRCQVQFYGLSENDEWTQDRAKPVTQIVSAEAWGRADCGSQSFGLLDPKLCYLLDGILFIYGVILTALFLRVKFSRSADAPAYQQGQNQLYNELNLGRREEYDVLDKRRGRDPEMGGKPQRRKNPQEGLYNELQKDKMAEAYSEIGMKGERRRGKGHDGLYQGLSTATKDTYDALHMQALPPRRAKRSGSGATNFSLLKQAGDVEENPGPTSMDWIWRILFLVGAATGAHSFEALQLQQSGAELVRPGASVTLSCKASGYTFTDYEMHWVKQTPVHGLEWIGAIDPETGGTAYNQKFEGKAILTADKSSSTAYMELRSLTSEDSPVYYCARRRYYGSSSFDYWGQGTTLTVSSTRIQNPDPAVYQLRDSKSSDKSVCLFTDFDSQTNVSQSKDSDVYITDKTVLDMRSMDFKSNSAVAWSNKSDFACANAFNNSIIPEDTFFPSPESSCGTQSFGLLDPKLCYLLDGILFIYGVILTALFLRVKFSRSADAPAYQQGQNQLYNELNLGRREEYDVLDKRRGRDPEMGGKPQRRKNPQEGLYNELQKDKMAEAYSEIGMKGERRRGKGHDGLYQGLSTATKDTYDALHMQALPPR

SEQ ID NO: 12875 - protein, 955 aa, Artificial Sequence
  Synthetic Polypeptide
MALPVTALLLPLALLLHAARPEVQLVESGGGLVQPGGSLRLSCAASGFSFSDFWMSWVRQAPGKGLEWVATISQAGSEKDYVDSVKGRFTISRDNAKKSLYLQMNSLRAEDTAVYYCASGVYSFDYRGQGTLVTVSSGTGGGGSGGGGSGGGGSEFDIVLTQSPASLAVSLGQRATISCRASKSVSTSGYSYLHWYQQKPGQPPKLLIYLASNLESGVPARFSGSGSGTDFTLNIHPVEEEDAATYYCQHSRELPFTFGSGTKLEIKLEDLKNVFPPEVAVFEPSEAEISHTQKATLVCLATGFYPDHVELSWWVNGKEVHSGVSTDPQPLKEQPALNDSRYCLSSRLRVSATFWQNPRNHFRCQVQFYGLSENDEWTQDRAKPVTQIVSAEAWGRADCGSQSFGLLDPKLCYLLDGILFIYGVILTALFLRVKFSRSADAPAYQQGQNQLYNELNLGRREEYDVLDKRRGRDPEMGGKPQRRKNPQEGLYNELQKDKMAEAYSEIGMKGERRRGKGHDGLYQGLSTATKDTYDALHMQALPPRRAKRSGSGATNFSLLKQAGDVEENPGPTSMDWIWRILFLVGAATGAHSFEQVQLVESGGGLVQPGGSLKLSCAASGFDFSRYWMSWVRQAPGKGLEWIGEINPTSSTINFTPSLKDKVFISRDNAKNTLYLQMSKVRSEDTALYYCARGNYYRYGDAMDYWGQGTSVTVSTRIQNPDPAVYQLRDSKSSDKSVCLFTDFDSQTNVSQSKDSDVYITDKTVLDMRSMDFKSNSAVAWSNKSDFACANAFNNSIIPEDTFFPSPESSCGTQSFGLLDPKLCYLLDGILFIYGVILTALFLRVKFSRSADAPAYQQGQNQLYNELNLGRREEYDVLDKRRGRDPEMGGKPQRRKNPQEGLYNELQKDKMAEAYSEIGMKGERRRGKGHDGLYQGLSTATKDTYDALHMQALPPR

SEQ ID NO: 12876 - protein, 953 aa, Artificial Sequence
  Synthetic Polypeptide
MALPVTALLLPLALLLHAARPEVQLVESGGGLVQPGGSLRLSCAASGFSFSDFWMSWVRQAPGKGLEWVATISQAGSEKDYVDSVKGRFTISRDNAKKSLYLQMNSLRAEDTAVYYCASGVYSFDYRGQGTLVTVSSGTGGGGSGGGGSGGGGSEFDIQMTQSPSSLSASVGDRVTITCSASQDISNYLNWYQQKPGKAPKLLIYYTSNLHSGVPSRFSGSGSGTDFTLTISSLQPEDFATYYCQQYRKLPWTFGQGTKLEIKRLEDLKNVFPPEVAVFEPSEAEISHTQKATLVCLATGFYPDHVELSWWVNGKEVHSGVSTDPQPLKEQPALNDSRYCLSSRLRVSATFWQNPRNHFRCQVQFYGLSENDEWTQDRAKPVTQIVSAEAWGRADCGSQSFGLLDPKLCYLLDGILFIYGVILTALFLRVKFSRSADAPAYQQGQNQLYNELNLGRREEYDVLDKRRGRDPEMGGKPQRRKNPQEGLYNELQKDKMAEAYSEIGMKGERRRGKGHDGLYQGLSTATKDTYDALHMQALPPRRAKRSGSGATNFSLLKQAGDVEENPGPTSMDWIWRILFLVGAATGAHSFEQVQLVQSGAEVKKPGSSVKVSCKASGGTFSNYWMHWVRQAPGQGLEWMGATYRGHSDTYYNQKFKGRVTITADKSTSTAYMELSSLRSEDTAVYYCARGAIYDGYDVLDNWGQGTLVTVSSTRIQNPDPAVYQLRDSKSSDKSVCLFTDFDSQTNVSQSKDSDVYITDKTVLDMRSMDFKSNSAVAWSNKSDFACANAFNNSIIPEDTFFPSPESSCGTQSFGLLDPKLCYLLDGILFIYGVILTALFLRVKFSRSADAPAYQQGQNQLYNELNLGRREEYDVLDKRRGRDPEMGGKPQRRKNPQEGLYNELQKDKMAEAYSEIGMKGERRRGKGHDGLYQGLSTATKDTYDALHMQALPPR

SEQ ID NO: 12877 - protein, 953 aa, Artificial Sequence
  Synthetic Polypeptide
MALPVTALLLPLALLLHAARPEVQLVESGGGLVQPGGSLRLSCAASGFSFSDFWMSWVRQAPGKGLEWVATISQAGSEKDYVDSVKGRFTISRDNAKKSLYLQMNSLRAEDTAVYYCASGVYSFDYRGQGTLVTVSSGTGGGGSGGGGSGGGGSEFDIVLTQSPATLSLSPGDRATISCRASESVTILGSHLIYWYQQKPGQPPRLLIQLASNVQTGVPARFSGSGSRTDFTLTISSVEPEDFAVYYCLQSRTIPRTFGQGTKLEIKRLEDLKNVFPPEVAVFEPSEAEISHTQKATLVCLATGFYPDHVELSWWVNGKEVHSGVSTDPQPLKEQPALNDSRYCLSSRLRVSATFWQNPRNHFRCQVQFYGLSENDEWTQDRAKPVTQIVSAEAWGRADCGSQSFGLLDPKLCYLLDGILFIYGVILTALFLRVKFSRSADAPAYQQGQNQLYNELNLGRREEYDVLDKRRGRDPEMGGKPQRRKNPQEGLYNELQKDKMAEAYSEIGMKGERRRGKGHDGLYQGLSTATKDTYDALHMQALPPRRAKRSGSGATNFSLLKQAGDVEENPGPTSMDWIWRILFLVGAATGAHSFEQVQLVQSGPEVKKPGESVKISCKASGYTFRHYSMNWVKQAPGQGLKWMGRINTESGVPIYADDFKGRFSFTVDTSASTAYLEISSLTSEDTAVYFCSNDYLYSLDFWGQGTTLTVSSTRIQNPDPAVYQLRDSKSSDKSVCLFTDFDSQTNVSQSKDSDVYITDKTVLDMRSMDFKSNSAVAWSNKSDFACANAFNNSIIPEDTFFPSPESSCGTQSFGLLDPKLCYLLDGILFIYGVILTALFLRVKFSRSADAPAYQQGQNQLYNELNLGRREEYDVLDKRRGRDPEMGGKPQRRKNPQEGLYNELQKDKMAEAYSEIGMKGERRRGKGHDGLYQGLSTATKDTYDALHMQALPPR

SEQ ID NO: 12878 - protein, 954 aa, Artificial Sequence
  Synthetic Polypeptide
MALPVTALLLPLALLLHAARPEVQLVESGGGLVQPGGSLRLSCAASGFSFSDFWMSWVRQAPGKGLEWVATISQAGSEKDYVDSVKGRFTISRDNAKKSLYLQMNSLRAEDTAVYYCASGVYSFDYRGQGTLVTVSSGTGGGGSGGGGSGGGGSEFQSVLTQPPSVSGAPGQRVTISCTGSSSNIGAGFDVHWYQQLPGTAPKLLIYGNSNRPSGVPDRFSGSKSGTSASLAITGLQAEDEADYYCQSYDSSLSGYVFGTGTKVTVLGLEDLKNVFPPEVAVFEPSEAEISHTQKATLVCLATGFYPDHVELSWWVNGKEVHSGVSTDPQPLKEQPALNDSRYCLSSRLRVSATFWQNPRNHFRCQVQFYGLSENDEWTQDRAKPVTQIVSAEAWGRADCGSQSFGLLDPKLCYLLDGILFIYGVILTALFLRVKFSRSADAPAYQQGQNQLYNELNLGRREEYDVLDKRRGRDPEMGGKPQRRKNPQEGLYNELQKDKMAEAYSEIGMKGERRRGKGHDGLYQGLSTATKDTYDALHMQALPPRRAKRSGSGATNFSLLKQAGDVEENPGPTSMDWIWRILFLVGAATGAHSFEQVQLVQSGAEVKKPGASVKVSCKASGYTFTDYYMHWVRQAPGQRLEWMGWINPNSGGTNYAQKFQDRITVTRDTSSNTGYMELTRLRSDDTAVYYCARSPYSGVLDKWGQGTLVTVSSTRIQNPDPAVYQLRDSKSSDKSVCLFTDFDSQTNVSQSKDSDVYITDKTVLDMRSMDFKSNSAVAWSNKSDFACANAFNNSIIPEDTFFPSPESSCGTQSFGLLDPKLCYLLDGILFIYGVILTALFLRVKFSRSADAPAYQQGQNQLYNELNLGRREEYDVLDKRRGRDPEMGGKPQRRKNPQEGLYNELQKDKMAEAYSEIGMKGERRRGKGHDGLYQGLSTATKDTYDALHMQALPPR

SEQ ID NO: 12879 - protein, 951 aa, Artificial Sequence
  Synthetic Polypeptide
MALPVTALLLPLALLLHAARPEVQLVESGGGLVQPGGSLRLSCAASGFSFSDFWMSWVRQAPGKGLEWVATISQAGSEKDYVDSVKGRFTISRDNAKKSLYLQMNSLRAEDTAVYYCASGVYSFDYRGQGTLVTVSSGTGGGGSGGGGSGGGGSEFQAVLTQPPSASGTPGQRVTISCSGSSSNIGSYTVSWYQQLPGTAPKFLIYSNNQRPSGVPDRFSGSKSGTSASLAISGLQSEDEADYYCAAWDDSLNGYVFGTGTKVTVLGLEDLKNVFPPEVAVFEPSEAEISHTQKATLVCLATGFYPDHVELSWWVNGKEVHSGVSTDPQPLKEQPALNDSRYCLSSRLRVSATFWQNPRNHFRCQVQFYGLSENDEWTQDRAKPVTQIVSAEAWGRADCGSQSFGLLDPKLCYLLDGILFIYGVILTALFLRVKFSRSADAPAYQQGQNQLYNELNLGRREEYDVLDKRRGRDPEMGGKPQRRKNPQEGLYNELQKDKMAEAYSEIGMKGERRRGKGHDGLYQGLSTATKDTYDALHMQALPPRRAKRSGSGATNFSLLKQAGDVEENPGPTSMDWIWRILFLVGAATGAHSFEVQLVQSGAEVKKPGESLKISCKGSGYDFTTYWIGWVRQMPGKGLEWMGIIYPGDSDTRYSPSVRGRVTISADKSINTAYLQWSSLEASDTAMYYCARMWTFSQDGWGQGTLVTVSSTRIQNPDPAVYQLRDSKSSDKSVCLFTDFDSQTNVSQSKDSDVYITDKTVLDMRSMDFKSNSAVAWSNKSDFACANAFNNSIIPEDTFFPSPESSCGTQSFGLLDPKLCYLLDGILFIYGVILTALFLRVKFSRSADAPAYQQGQNQLYNELNLGRREEYDVLDKRRGRDPEMGGKPQRRKNPQEGLYNELQKDKMAEAYSEIGMKGERRRGKGHDGLYQGLSTATKDTYDALHMQALPPR

SEQ ID NO: 12880 - protein, 954 aa, Artificial Sequence
  Synthetic Polypeptide
MALPVTALLLPLALLLHAARPEVQLVESGGGLVQPGGSLRLSCAASGFSFSDFWMSWVRQAPGKGLEWVATISQAGSEKDYVDSVKGRFTISRDNAKKSLYLQMNSLRAEDTAVYYCASGVYSFDYRGQGTLVTVSSGTGGGGSGGGGSGGGGSEFDIVMTQSPDSLAVSLGERATINCKSSQSILYSSNQKNYLAWYQQKPGQSPKLLIYWASTRESGVPDRFSGSGSGTDFTLTISSLQAEDVAVYYCHQYISSYTFGQGTKLEIKLEDLKNVFPPEVAVFEPSEAEISHTQKATLVCLATGFYPDHVELSWWVNGKEVHSGVSTDPQPLKEQPALNDSRYCLSSRLRVSATFWQNPRNHFRCQVQFYGLSENDEWTQDRAKPVTQIVSAEAWGRADCGSQSFGLLDPKLCYLLDGILFIYGVILTALFLRVKFSRSADAPAYQQGQNQLYNELNLGRREEYDVLDKRRGRDPEMGGKPQRRKNPQEGLYNELQKDKMAEAYSEIGMKGERRRGKGHDGLYQGLSTATKDTYDALHMQALPPRRAKRSGSGATNFSLLKQAGDVEENPGPTSMDWIWRILFLVGAATGAHSFEQVQLVQSGAEVKKPGASVKVSCKASGYTFASQWMHWMRQAPGQGLEWIGWINPGNVNTKYNEKFKGRATLTVDTSTNTAYMELSSLRSEDTAVYYCARSTWYRPLDYWGQGTLVTVSSTRIQNPDPAVYQLRDSKSSDKSVCLFTDFDSQTNVSQSKDSDVYITDKTVLDMRSMDFKSNSAVAWSNKSDFACANAFNNSIIPEDTFFPSPESSCGTQSFGLLDPKLCYLLDGILFIYGVILTALFLRVKFSRSADAPAYQQGQNQLYNELNLGRREEYDVLDKRRGRDPEMGGKPQRRKNPQEGLYNELQKDKMAEAYSEIGMKGERRRGKGHDGLYQGLSTATKDTYDALHMQALPPR

SEQ ID NO: 12881 - protein, 954 aa, Artificial Sequence
  Synthetic Polypeptide
MALPVTALLLPLALLLHAARPEVQLVESGGGLVQPGGSLRLSCAASGFSFSDFWMSWVRQAPGKGLEWVATISQAGSEKDYVDSVKGRFTISRDNAKKSLYLQMNSLRAEDTAVYYCASGVYSFDYRGQGTLVTVSSGTGGGGSGGGGSGGGGSEFDHIVLTQSPSSLSASLGDRVTISCRASQDISTYLNWYQQKPDGTVKLLIFYTSRLHAGVPSRFSGSGSGTHHSLTISNLEQEDIATYFCQQGNSLPFTFGSGTKLEIKRLEDLKNVFPPEVAVFEPSEAEISHTQKATLVCLATGFYPDHVELSWWVNGKEVHSGVSTDPQPLKEQPALNDSRYCLSSRLRVSATFWQNPRNHFRCQVQFYGLSENDEWTQDRAKPVTQIVSAEAWGRADCGSQSFGLLDPKLCYLLDGILFIYGVILTALFLRVKFSRSADAPAYQQGQNQLYNELNLGRREEYDVLDKRRGRDPEMGGKPQRRKNPQEGLYNELQKDKMAEAYSEIGMKGERRRGKGHDGLYQGLSTATKDTYDALHMQALPPRRAKRSGSGATNFSLLKQAGDVEENPGPTSMDWIWRILFLVGAATGAHSFEQVQLKESGPELEKPGASVKISCKASGYSFTAYSMNWVKQNNGMSLEWIGSIDPYYGDTKYAQKFKGKATLTVDKASSTAYLQLKSLTSEDSAVYYCARRMITTGDWYFDVWGAGTTVTVSSTRIQNPDPAVYQLRDSKSSDKSVCLFTDFDSQTNVSQSKDSDVYITDKTVLDMRSMDFKSNSAVAWSNKSDFACANAFNNSIIPEDTFFPSPESSCGTQSFGLLDPKLCYLLDGILFIYGVILTALFLRVKFSRSADAPAYQQGQNQLYNELNLGRREEYDVLDKRRGRDPEMGGKPQRRKNPQEGLYNELQKDKMAEAYSEIGMKGERRRGKGHDGLYQGLSTATKDTYDALHMQALPPR

SEQ ID NO: 12882 - protein, 954 aa, Artificial Sequence; identical to SEQ ID NO: 12881
  Synthetic Polypeptide

SEQ ID NO: 12883 - protein, 954 aa, Artificial Sequence
  Synthetic Polypeptide
MALPVTALLLPLALLLHAARPEVQLVESGGGLVQPGGSLRLSCAASGFSFSDFWMSWVRQAPGKGLEWVATISQAGSEKDYVDSVKGRFTISRDNAKKSLYLQMNSLRAEDTAVYYCASGVYSFDYRGQGTLVTVSSGTGGGGSGGGGSGGGGSEFDEIVLTQSPATLSLSPGERATLSCRASQSVSSYLAWYQQKPGQAPRLLIYDASNRATGIPARFSGSGSGTDFTLTISSLEPEDFAVYYCQQRSNWPITFGQGTRLEIKLEDLKNVFPPEVAVFEPSEAEISHTQKATLVCLATGFYPDHVELSWWVNGKEVHSGVSTDPQPLKEQPALNDSRYCLSSRLRVSATFWQNPRNHFRCQVQFYGLSENDEWTQDRAKPVTQIVSAEAWGRADCGSQSFGLLDPKLCYLLDGILFIYGVILTALFLRVKFSRSADAPAYQQGQNQLYNELNLGRREEYDVLDKRRGRDPEMGGKPQRRKNPQEGLYNELQKDKMAEAYSEIGMKGERRRGKGHDGLYQGLSTATKDTYDALHMQALPPRRAKRSGSGATNFSLLKQAGDVEENPGPTSMDWIWRILFLVGAATGAHSFEEVQLVESGGGLVQPGRSLRLSCAASGFTFNDYAMHWVRQAPGKGLEWVSTISWNSGSIGYADSVKGRFTISRDNAKKSLYLQMNSLRAEDTALYYCAKDIQYGNYYYGMDVWGQGTTVTVSSTRIQNPDPAVYQLRDSKSSDKSVCLFTDFDSQTNVSQSKDSDVYITDKTVLDMRSMDFKSNSAVAWSNKSDFACANAFNNSIIPEDTFFPSPESSCGTQSFGLLDPKLCYLLDGILFIYGVILTALFLRVKFSRSADAPAYQQGQNQLYNELNLGRREEYDVLDKRRGRDPEMGGKPQRRKNPQEGLYNELQKDKMAEAYSEIGMKGERRRGKGHDGLYQGLSTATKDTYDALHMQALPPR

SEQ ID NO: 12884 - protein, 956 aa, Artificial Sequence
  Synthetic Polypeptide
MALPVTALLLPLALLLHAARPEVQLVESGGGLVQPGGSLRLSCAASGFSFSDFWMSWVRQAPGKGLEWVATISQAGSEKDYVDSVKGRFTISRDNAKKSLYLQMNSLRAEDTAVYYCASGVYSFDYRGQGTLVTVSSGTGGGGSGGGGSGGGGSEFDIVMTQTPLSLPVTPGEPASISCRSSKSLLHSNGITYLYWYLQKPGQSPQLLIYQMSNLVSGVPDRFSGSGSGTDFTLKISRVEAEDVGVYYCAQNLELPYTFGGGTKVEIKRLEDLKNVFPPEVAVFEPSEAEISHTQKATLVCLATGFYPDHVELSWWVNGKEVHSGVSTDPQPLKEQPALNDSRYCLSSRLRVSATFWQNPRNHFRCQVQFYGLSENDEWTQDRAKPVTQIVSAEAWGRADCGSQSFGLLDPKLCYLLDGILFIYGVILTALFLRVKFSRSADAPAYQQGQNQLYNELNLGRREEYDVLDKRRGRDPEMGGKPQRRKNPQEGLYNELQKDKMAEAYSEIGMKGERRRGKGHDGLYQGLSTATKDTYDALHMQALPPRRAKRSGSGATNFSLLKQAGDVEENPGPTSMDWIWRILFLVGAATGAHSFEQVQLVQSGAEVKKPGSSVKVSCKASGYAFSYSWINWVRQAPGQGLEWMGRIFPGDGDTDYNGKFKGRVTITADKSTSTAYMELSSLRSEDTAVYYCARNVFDGYWLVYWGQGTLVTVSSTRIQNPDPAVYQLRDSKSSDKSVCLFTDFDSQTNVSQSKDSDVYITDKTVLDMRSMDFKSNSAVAWSNKSDFACANAFNNSIIPEDTFFPSPESSCGTQSFGLLDPKLCYLLDGILFIYGVILTALFLRVKFSRSADAPAYQQGQNQLYNELNLGRREEYDVLDKRRGRDPEMGGKPQRRKNPQEGLYNELQKDKMAEAYSEIGMKGERRRGKGHDGLYQGLSTATKDTYDALHMQALPPR

SEQ ID NO: 12885 - protein, 957 aa, Artificial Sequence
  Synthetic Polypeptide
MALPVTALLLPLALLLHAARPEVQLVESGGGLVQPGGSLRLSCAASGFSFSDFWMSWVRQAPGKGLEWVATISQAGSEKDYVDSVKGRFTISRDNAKKSLYLQMNSLRAEDTAVYYCASGVYSFDYRGQGTLVTVSSGTGGGGSGGGGSGGGGSEFDIQMTQSPSSLSASVGDRVTITCRSSQSIVHSVGNTFLEWYQQKPGKAPKLLIYKVSNRFSGVPSRFSGSGSGTDFTLTISSLQPEDFATYYCFQGSQFPYTFGQGTKVEIKRLEDLKNVFPPEVAVFEPSEAEISHTQKATLVCLATGFYPDHVELSWWVNGKEVHSGVSTDPQPLKEQPALNDSRYCLSSRLRVSATFWQNPRNHFRCQVQFYGLSENDEWTQDRAKPVTQIVSAEAWGRADCGSQSFGLLDPKLCYLLDGILFIYGVILTALFLRVKFSRSADAPAYQQGQNQLYNELNLGRREEYDVLDKRRGRDPEMGGKPQRRKNPQEGLYNELQKDKMAEAYSEIGMKGERRRGKGHDGLYQGLSTATKDTYDALHMQALPPRRAKRSGSGATNFSLLKQAGDVEENPGPTSMDWIWRILFLVGAATGAHSFEEVQLVESGGGLVQPGGSLRLSCAASGYEFSRSWMNWVRQAPGKGLEWVGRIYPGDGDTNYSGKFKGRFTISADTSKNTAYLQMNSLRAEDTAVYYCARDGSSWDWYFDVWGQGTLVTVSSTRIQNPDPAVYQLRDSKSSDKSVCLFTDFDSQTNVSQSKDSDVYITDKTVLDMRSMDFKSNSAVAWSNKSDFACANAFNNSIIPEDTFFPSPESSCGTQSFGLLDPKLCYLLDGILFIYGVILTALFLRVKFSRSADAPAYQQGQNQLYNELNLGRREEYDVLDKRRGRDPEMGGKPQRRKNPQEGLYNELQKDKMAEAYSEIGMKGERRRGKGHDGLYQGLSTATKDTYDALHMQALPPR

SEQ ID NO: 12886 - protein, 955 aa, Artificial Sequence
  Synthetic Polypeptide
MALPVTALLLPLALLLHAARPEVQLVESGGGLVQPGGSLRLSCAASGFSFSDFWMSWVRQAPGKGLEWVATISQAGSEKDYVDSVKGRFTISRDNAKKSLYLQMNSLRAEDTAVYYCASGVYSFDYRGQGTLVTVSSGTGGGGSGGGGSGGGGSEFDIQMTQSPSSLSASVGDRVTITCRASQTIWSYLNWYQQRPGKAPNLLIYAASSLQSGVPSRFSGRGSGTDFTLTISSLQAEDFATYYCQQSYSIPQIFGQGTKLEIKLEDLKNVFPPEVAVFEPSEAEISHTQKATLVCLATGFYPDHVELSWWVNGKEVHSGVSTDPQPLKEQPALNDSRYCLSSRLRVSATFWQNPRNHFRCQVQFYGLSENDEWTQDRAKPVTQIVSAEAWGRADCGSQSFGLLDPKLCYLLDGILFIYGVILTALFLRVKFSRSADAPAYQQGQNQLYNELNLGRREEYDVLDKRRGRDPEMGGKPQRRKNPQEGLYNELQKDKMAEAYSEIGMKGERRRGKGHDGLYQGLSTATKDTYDALHMQALPPRRAKRSGSGATNFSLLKQAGDVEENPGPTSMDWIWRILFLVGAATGAHSFEQVQLQQSGPGLVKPSQTLSLTCAISGDSVSSNSAAWNWIRQSPSRGLEWLGRTYYRSKWYNDYAVSVKSRITINPDTSKNQFSLQLNSVTPEDTAVYYCAREVTGDLEDAFDIWGQGTMVTVSSTRIQNPDPAVYQLRDSKSSDKSVCLFTDFDSQTNVSQSKDSDVYITDKTVLDMRSMDFKSNSAVAWSNKSDFACANAFNNSIIPEDTFFPSPESSCGTQSFGLLDPKLCYLLDGILFIYGVILTALFLRVKFSRSADAPAYQQGQNQLYNELNLGRREEYDVLDKRRGRDPEMGGKPQRRKNPQEGLYNELQKDKMAEAYSEIGMKGERRRGKGHDGLYQGLSTATKDTYDALHMQALPPR

SEQ ID NO: 12887 - protein, 948 aa, Artificial Sequence
  Synthetic Polypeptide
MALPVTALLLPLALLLHAARPEVQLVESGGGLVQPGGSLRLSCAASGFSFSDFWMSWVRQAPGKGLEWVATISQAGSEKDYVDSVKGRFTISRDNAKKSLYLQMNSLRAEDTAVYYCASGVYSFDYRGQGTLVTVSSGTGGGGSGGGGSGGGGSEFDIQMTQSPATIENTSLSASVGDRVTITCRASQGISSWLTWYQQKPEKAPKSLIYAASSLQSGVPSRFSGSGSGTDFTLTISSLQPEDFATYYCQQYDSYPITFGQGTRLEIKLEDLKNVFPPEVAVFEPSEAEISHTQKATLVCLATGFYPDHVELSWWVNGKEVHSGVSTDPQPLKEQPALNDSRYCLSSRLRVSATFWQNPRNHFRCQVQFYGLSENDEWTQDRAKPVTQIVSAEAWGRADCGSQSFGLLDPKLCYLLDGILFIYGVILTALFLRVKFSRSADAPAYQQGQNQLYNELNLGRREEYDVLDKRRGRDPEMGGKPQRRKNPQEGLYNELQKDKMAEAYSEIGMKGERRRGKGHDGLYQGLSTATKDTYDALHMQALPPRRAKRSGSGATNFSLLKQAGDVEENPGPTSMDWIWRILFLVGAATGAHSFEQVQLQQWGAGLLKPSETLSLTCAVYGGSFSAYYWSWIRQPPGKGLEWIGDINHGGGTNYNPSLKSRVTISVDTSKNQFSLKLNSVTAADTAVYYCASLTAYWGQGSLVTVSSTRIQNPDPAVYQLRDSKSSDKSVCLFTDFDSQTNVSQSKDSDVYITDKTVLDMRSMDFKSNSAVAWSNKSDFACANAFNNSIIPEDTFFPSPESSCGTQSFGLLDPKLCYLLDGILFIYGVILTALFLRVKFSRSADAPAYQQGQNQLYNELNLGRREEYDVLDKRRGRDPEMGGKPQRRKNPQEGLYNELQKDKMAEAYSEIGMKGERRRGKGHDGLYQGLSTATKDTYDALHMQALPPR

SEQ ID NO: 12888 - protein, 953 aa, Artificial Sequence
  Synthetic Polypeptide
MALPVTALLLPLALLLHAARPEVQLVESGGGLVQPGGSLRLSCAASGFSFSDFWMSWVRQAPGKGLEWVATISQAGSEKDYVDSVKGRFTISRDNAKKSLYLQMNSLRAEDTAVYYCASGVYSFDYRGQGTLVTVSSGTGGGGSGGGGSGGGGSEFDEIVLTQSPDSLAVSLGERATINCKASQSVDFDGDSYLNWYQQKPGQPPKVLIYAASTLQSGVPSRFSGSGSGTDFTLTINSLEAEDAATYYCQQSNEDPWTFGGGTKVEIKLEDLKNVFPPEVAVFEPSEAEISHTQKATLVCLATGFYPDHVELSWWVNGKEVHSGVSTDPQPLKEQPALNDSRYCLSSRLRVSATFWQNPRNHFRCQVQFYGLSENDEWTQDRAKPVTQIVSAEAWGRADCGSQSFGLLDPKLCYLLDGILFIYGVILTALFLRVKFSRSADAPAYQQGQNQLYNELNLGRREEYDVLDKRRGRDPEMGGKPQRRKNPQEGLYNELQKDKMAEAYSEIGMKGERRRGKGHDGLYQGLSTATKDTYDALHMQALPPRRAKRSGSGATNFSLLKQAGDVEENPGPTSMDWIWRILFLVGAATGAHSFEQVQLVQSGAEVKKPGASVKVSCKVSGYTFTDYYITWVRQAPGQALEWMGWIYPGSGNTKYSQKFQGRFVFSVDTSASTAYLQLSSLKAEDTAVYYCANYGNYWFAYWGQGTLVTVSSTRIQNPDPAVYQLRDSKSSDKSVCLFTDFDSQTNVSQSKDSDVYITDKTVLDMRSMDFKSNSAVAWSNKSDFACANAFNNSIIPEDTFFPSPESSCGTQSFGLLDPKLCYLLDGILFIYGVILTALFLRVKFSRSADAPAYQQGQNQLYNELNLGRREEYDVLDKRRGRDPEMGGKPQRRKNPQEGLYNELQKDKMAEAYSEIGMKGERRRGKGHDGLYQGLSTATKDTYDALHMQALPPR

SEQ ID NO: 12889 - protein, 950 aa, Artificial Sequence
  Synthetic Polypeptide
MALPVTALLLPLALLLHAARPEVQLVESGGGLVQPGGSLRLSCAASGFSFSDFWMSWVRQAPGKGLEWVATISQAGSEKDYVDSVKGRFTISRDNAKKSLYLQMNSLRAEDTAVYYCASGVYSFDYRGQGTLVTVSSGTGGGGSGGGGSGGGGSEFDIQMTQSPSSLSASVGDRVTITCRASQGISSWLAWYQQKPEKAPKSLIYAASSLQSGVPSRFSGSGSGTDFTLTISSLQPEDFATYYCQQYNSYPPTFGGGTKVEIKLEDLKNVFPPEVAVFEPSEAEISHTQKATLVCLATGFYPDHVELSWWVNGKEVHSGVSTDPQPLKEQPALNDSRYCLSSRLRVSATFWQNPRNHFRCQVQFYGLSENDEWTQDRAKPVTQIVSAEAWGRADCGSQSFGLLDPKLCYLLDGILFIYGVILTALFLRVKFSRSADAPAYQQGQNQLYNELNLGRREEYDVLDKRRGRDPEMGGKPQRRKNPQEGLYNELQKDKMAEAYSEIGMKGERRRGKGHDGLYQGLSTATKDTYDALHMQALPPRRAKRSGSGATNFSLLKQAGDVEENPGPTSMDWIWRILFLVGAATGAHSFEEVQLVQSGGGLVHPGGSLRLSCAGSGFAFSSSTMHWIRQAPGKGLEWISLIGSGGGIYYGDSVKGRFTISRDNAKNSLYLQMNSLRAEDMAVYYCVRGYFDWVDYFDYWGQGTLVTVSSTRIQNPDPAVYQLRDSKSSDKSVCLFTDFDSQTNVSQSKDSDVYITDKTVLDMRSMDFKSNSAVAWSNKSDFACANAFNNSIIPEDTFFPSPESSCGTQSFGLLDPKLCYLLDGILFIYGVILTALFLRVKFSRSADAPAYQQGQNQLYNELNLGRREEYDVLDKRRGRDPEMGGKPQRRKNPQEGLYNELQKDKMAEAYSEIGMKGERRRGKGHDGLYQGLSTATKDTYDALHMQALPPR

SEQ ID NO: 12890 - protein, 960 aa, Artificial Sequence
  Synthetic Polypeptide
MALPVTALLLPLALLLHAARPEVQLVESGGGLVQPGGSLRLSCAASGFSFSDFWMSWVRQAPGKGLEWVATISQAGSEKDYVDSVKGRFTISRDNAKKSLYLQMNSLRAEDTAVYYCASGVYSFDYRGQGTLVTVSSGTGGGGSGGGGSGGGGSEFDDIVMTQSPDSLTVSLGERTTINCKSSQSVLDSSKNKNSLAWYQQKPGQPPKLLLSWASTRESGIPDRFSGSGSGTDFTLTIDSLQPEDSATYYCQQSAHFPITFGQGTRLEIKLEDLKNVFPPEVAVFEPSEAEISHTQKATLVCLATGFYPDHVELSWWVNGKEVHSGVSTDPQPLKEQPALNDSRYCLSSRLRVSATFWQNPRNHFRCQVQFYGLSENDEWTQDRAKPVTQIVSAEAWGRADCGSQSFGLLDPKLCYLLDGILFIYGVILTALFLRVKFSRSADAPAYQQGQNQLYNELNLGRREEYDVLDKRRGRDPEMGGKPQRRKNPQEGLYNELQKDKMAEAYSEIGMKGERRRGKGHDGLYQGLSTATKDTYDALHMQALPPRRAKRSGSGATNFSLLKQAGDVEENPGPTSMDWIWRILFLVGAATGAHSFEQVQLVQSGAEVKKPGASVKVSCKASGYTFTNYGMNWVKQAPGQGLKWMGWINTYTGEPTYADDFKGRVTMTSDTSTSTAYLELHNLRSDDTAVYYCARWSWSDGYYVYFDYWGQGTTVTVSSTRIQNPDPAVYQLRDSKSSDKSVCLFTDFDSQTNVSQSKDSDVYITDKTVLDMRSMDFKSNSAVAWSNKSDFACANAFNNSIIPEDTFFPSPESSCGTQSFGLLDPKLCYLLDGILFIYGVILTALFLRVKFSRSADAPAYQQGQNQLYNELNLGRREEYDVLDKRRGRDPEMGGKPQRRKNPQEGLYNELQKDKMAEAYSEIGMKGERRRGKGHDGLYQGLSTATKDTYDALHMQALPPR

SEQ ID NO: 12891 - protein, 956 aa, Artificial Sequence
  Synthetic Polypeptide
MALPVTALLLPLALLLHAARPEVQLVESGGGLVQPGGSLRLSCAASGFSFSDFWMSWVRQAPGKGLEWVATISQAGSEKDYVDSVKGRFTISRDNAKKSLYLQMNSLRAEDTAVYYCASGVYSFDYRGQGTLVTVSSGTGGGGSGGGGSGGGGSEFDEIVLTQSPGSLAVSPGERVTMSCKSSQSVFFSSSQKNYLAWYQQIPGQSPRLLIYWASTRESGVPDRFTGSGSGTDFTLTISSVQPEDLAIYYCHQYLSSRTFGQGTKLEIKRLEDLKNVFPPEVAVFEPSEAEISHTQKATLVCLATGFYPDHVELSWWVNGKEVHSGVSTDPQPLKEQPALNDSRYCLSSRLRVSATFWQNPRNHFRCQVQFYGLSENDEWTQDRAKPVTQIVSAEAWGRADCGSQSFGLLDPKLCYLLDGILFIYGVILTALFLRVKFSRSADAPAYQQGQNQLYNELNLGRREEYDVLDKRRGRDPEMGGKPQRRKNPQEGLYNELQKDKMAEAYSEIGMKGERRRGKGHDGLYQGLSTATKDTYDALHMQALPPRRAKRSGSGATNFSLLKQAGDVEENPGPTSMDWIWRILFLVGAATGAHSFEQVQLQQPGAEVVKPGASVKMSCKASGYTFTSYYIHWIKQTPGQGLEWVGVIYPGNDDISYNQKFQGKATLTADKSSTTAYMQLSSLTSEDSAVYYCAREVRLRYFDVWGQGTTVTVSSTRIQNPDPAVYQLRDSKSSDKSVCLFTDFDSQTNVSQSKDSDVYITDKTVLDMRSMDFKSNSAVAWSNKSDFACANAFNNSIIPEDTFFPSPESSCGTQSFGLLDPKLCYLLDGILFIYGVILTALFLRVKFSRSADAPAYQQGQNQLYNELNLGRREEYDVLDKRRGRDPEMGGKPQRRKNPQEGLYNELQKDKMAEAYSEIGMKGERRRGKGHDGLYQGLSTATKDTYDALHMQALPPR

SEQ ID NO: 12892 - protein, 960 aa, Artificial Sequence
  Synthetic Polypeptide
MALPVTALLLPLALLLHAARPEVQLVESGGGLVQPGGSLRLSCAASGFSFSDFWMSWVRQAPGKGLEWVATISQAGSEKDYVDSVKGRFTISRDNAKKSLYLQMNSLRAEDTAVYYCASGVYSFDYRGQGTLVTVSSGTGGGGSGGGGSGGGGSEFDVLLTQSPLSLPVTLGQPASISCRSSQTIVHSNGNTYLEWFQQRPGQSPRLLIYQVSNRFSGVPDRFSGSGSGTDFTLKISRVEAEDVGVYYCFQGSHVPRTFGGGTKVEIKRALEDLKNVFPPEVAVFEPSEAEISHTQKATLVCLATGFYPDHVELSWWVNGKEVHSGVSTDPQPLKEQPALNDSRYCLSSRLRVSATFWQNPRNHFRCQVQFYGLSENDEWTQDRAKPVTQIVSAEAWGRADCGSQSFGLLDPKLCYLLDGILFIYGVILTALFLRVKFSRSADAPAYQQGQNQLYNELNLGRREEYDVLDKRRGRDPEMGGKPQRRKNPQEGLYNELQKDKMAEAYSEIGMKGERRRGKGHDGLYQGLSTATKDTYDALHMQALPPRRAKRSGSGATNFSLLKQAGDVEENPGPTSMDWIWRILFLVGAATGAHSFEQIQLVQSGSELKKPGASVKVSCKASGYTFTNYGMNWVRQAPGQGLKWMGWINTNTGEPKYAEEFKGRFALSLDTSVSTAYLQINSLKAEDTAVYFCARGYGNYARGAWLAYWGQGTLVTVSSTRIQNPDPAVYQLRDSKSSDKSVCLFTDFDSQTNVSQSKDSDVYITDKTVLDMRSMDFKSNSAVAWSNKSDFACANAFNNSIIPEDTFFPSPESSCGTQSFGLLDPKLCYLLDGILFIYGVILTALFLRVKFSRSADAPAYQQGQNQLYNELNLGRREEYDVLDKRRGRDPEMGGKPQRRKNPQEGLYNELQKDKMAEAYSEIGMKGERRRGKGHDGLYQGLSTATKDTYDALHMQALPPR

SEQ ID NO: 12893 - protein, 945 aa, Artificial Sequence
  Synthetic Polypeptide
MALPVTALLLPLALLLHAARPEVQLVESGGGLVQPGGSLRLSCAASGFSFSDFWMSWVRQAPGKGLEWVATISQAGSEKDYVDSVKGRFTISRDNAKKSLYLQMNSLRAEDTAVYYCASGVYSFDYRGQGTLVTVSSGTGGGGSGGGGSGGGGSEFDEIVLTQSPATLSLSPGERATLSCSASSSINYIYWLQQKPGQAPRILIYLTSNLASGVPARFSGSGSGTDFTLTISSLEPEDFAVYYCLQWSSNPLTFGGGTKVEIKLEDLKNVFPPEVAVFEPSEAEISHTQKATLVCLATGFYPDHVELSWWVNGKEVHSGVSTDPQPLKEQPALNDSRYCLSSRLRVSATFWQNPRNHFRCQVQFYGLSENDEWTQDRAKPVTQIVSAEAWGRADCGSQSFGLLDPKLCYLLDGILFIYGVILTALFLRVKFSRSADAPAYQQGQNQLYNELNLGRREEYDVLDKRRGRDPEMGGKPQRRKNPQEGLYNELQKDKMAEAYSEIGMKGERRRGKGHDGLYQGLSTATKDTYDALHMQALPPRRAKRSGSGATNFSLLKQAGDVEENPGPTSMDWIWRILFLVGAATGAHSFEEVQLVESGGGLVKPGGSLRLSCAASGFTFSSYDMSWVRQAPGKGLEWVSTISSGGSYTYYLDSIKGRFTISRDNAKNSLYLQMNSLRAEDTAVYYCARQGLDYWGRGTLVTVSSTRIQNPDPAVYQLRDSKSSDKSVCLFTDFDSQTNVSQSKDSDVYITDKTVLDMRSMDFKSNSAVAWSNKSDFACANAFNNSIIPEDTFFPSPESSCGTQSFGLLDPKLCYLLDGILFIYGVILTALFLRVKFSRSADAPAYQQGQNQLYNELNLGRREEYDVLDKRRGRDPEMGGKPQRRKNPQEGLYNELQKDKMAEAYSEIGMKGERRRGKGHDGLYQGLSTATKDTYDALHMQALPPR

SEQ ID NO: 12894 - protein, 954 aa, Artificial Sequence
  Synthetic Polypeptide
MALPVTALLLPLALLLHAARPEVQLVESGGGLVQPGGSLRLSCAASGFSFSDFWMSWVRQAPGKGLEWVATISQAGSEKDYVDSVKGRFTISRDNAKKSLYLQMNSLRAEDTAVYYCASGVYSFDYRGQGTLVTVSSGTGGGGSGGGGSGGGGSEFDIVMTQSPDSLAVSLGERATINCRASKSVSTSGYSFMHWYQQKPGQPPKLLIYLASNLESGVPDRFSGSGSGTDFTLTISSLQAEDVAVYYCQHSREVPWTFGQGTKVEIKRLEDLKNVFPPEVAVFEPSEAEISHTQKATLVCLATGFYPDHVELSWWVNGKEVHSGVSTDPQPLKEQPALNDSRYCLSSRLRVSATFWQNPRNHFRCQVQFYGLSENDEWTQDRAKPVTQIVSAEAWGRADCGSQSFGLLDPKLCYLLDGILFIYGVILTALFLRVKFSRSADAPAYQQGQNQLYNELNLGRREEYDVLDKRRGRDPEMGGKPQRRKNPQEGLYNELQKDKMAEAYSEIGMKGERRRGKGHDGLYQGLSTATKDTYDALHMQALPPRRAKRSGSGATNFSLLKQAGDVEENPGPTSMDWIWRILFLVGAATGAHSFEQVQLVQSGAEVKKPGASVKVSCKASGYTFTNYGMNWVRQAPGQGLEWMGWINTYTGEPTYADAFKGRFAFSLDTSTSTAYLQINSLRSDDTAVYYCARDYGDYGMDYWGQGTTVTVSSTRIQNPDPAVYQLRDSKSSDKSVCLFTDFDSQTNVSQSKDSDVYITDKTVLDMRSMDFKSNSAVAWSNKSDFACANAFNNSIIPEDTFFPSPESSCGTQSFGLLDPKLCYLLDGILFIYGVILTALFLRVKFSRSADAPAYQQGQNQLYNELNLGRREEYDVLDKRRGRDPEMGGKPQRRKNPQEGLYNELQKDKMAEAYSEIGMKGERRRGKGHDGLYQGLSTATKDTYDALHMQALPPR

SEQ ID NO: 12895 - protein, 950 aa, Artificial Sequence
  Synthetic Polypeptide
MALPVTALLLPLALLLHAARPEVQLVESGGGLVQPGGSLRLSCAASGFSFSDFWMSWVRQAPGKGLEWVATISQAGSEKDYVDSVKGRFTISRDNAKKSLYLQMNSLRAEDTAVYYCASGVYSFDYRGQGTLVTVSSGTGGGGSGGGGSGGGGSEFDIVMTQTPLTLSVTIGQPASISCKSSQSLLDSDGKTYLNWLLQRPGQSPERLIYLVSKLDSGVPDRFTGSGSGTDFTLKISRVEAEDLGVYCCWQGTHFPYTFGGGTKVEIKGLEDLKNVFPPEVAVFEPSEAEISHTQKATLVCLATGFYPDHVELSWWVNGKEVHSGVSTDPQPLKEQPALNDSRYCLSSRLRVSATFWQNPRNHFRCQVQFYGLSENDEWTQDRAKPVTQIVSAEAWGRADCGSQSFGLLDPKLCYLLDGILFIYGVILTALFLRVKFSRSADAPAYQQGQNQLYNELNLGRREEYDVLDKRRGRDPEMGGKPQRRKNPQEGLYNELQKDKMAEAYSEIGMKGERRRGKGHDGLYQGLSTATKDTYDALHMQALPPRRAKRSGSGATNFSLLKQAGDVEENPGPTSMDWIWRILFLVGAATGAHSFEQVQLQQPGAELVRPGASVKLSCKASGYTFTSYWMNWVKQRPGQGLEWIGMIDPSDSETHYNHIFKDKATLTVDKSSSTAYLQLSSLTSEDSAVYYCARNLYLWGQGTSVTVSSTRIQNPDPAVYQLRDSKSSDKSVCLFTDFDSQTNVSQSKDSDVYITDKTVLDMRSMDFKSNSAVAWSNKSDFACANAFNNSIIPEDTFFPSPESSCGTQSFGLLDPKLCYLLDGILFIYGVILTALFLRVKFSRSADAPAYQQGQNQLYNELNLGRREEYDVLDKRRGRDPEMGGKPQRRKNPQEGLYNELQKDKMAEAYSEIGMKGERRRGKGHDGLYQGLSTATKDTYDALHMQALPPR

SEQ ID NO: 12896 - protein, 958 aa, Artificial Sequence
  Synthetic Polypeptide
MALPVTALLLPLALLLHAARPEVQLVESGGGLVQPGGSLRLSCAASGFSFSDFWMSWVRQAPGKGLEWVATISQAGSEKDYVDSVKGRFTISRDNAKKSLYLQMNSLRAEDTAVYYCASGVYSFDYRGQGTLVTVSSGTGGGGSGGGGSGGGGSEFDIVMTQSPDSLAVSLGERATINCESSQSLLNSGNQKNYLTWYQQKPGQPPKPLIYWASTRESGVPDRFSGSGSGTDFTLTISSLQAEDVAVYYCQNDYSYPYTFGQGTKLEIKRLEDLKNVFPPEVAVFEPSEAEISHTQKATLVCLATGFYPDHVELSWWVNGKEVHSGVSTDPQPLKEQPALNDSRYCLSSRLRVSATFWQNPRNHFRCQVQFYGLSENDEWTQDRAKPVTQIVSAEAWGRADCGSQSFGLLDPKLCYLLDGILFIYGVILTALFLRVKFSRSADAPAYQQGQNQLYNELNLGRREEYDVLDKRRGRDPEMGGKPQRRKNPQEGLYNELQKDKMAEAYSEIGMKGERRRGKGHDGLYQGLSTATKDTYDALHMQALPPRRAKRSGSGATNFSLLKQAGDVEENPGPTSMDWIWRILFLVGAATGAHSFEEVQLVQSGAEVKKPGESLKISCKGSGYSFTDYYMKWARQMPGKGLEWMGDIIPSNGATFYNQKFKGQVTISADKSISTTYLQWSSLKASDTAMYYCARSHLLRASWFAYWGQGTMVTVSSTRIQNPDPAVYQLRDSKSSDKSVCLFTDFDSQTNVSQSKDSDVYITDKTVLDMRSMDFKSNSAVAWSNKSDFACANAFNNSIIPEDTFFPSPESSCGTQSFGLLDPKLCYLLDGILFIYGVILTALFLRVKFSRSADAPAYQQGQNQLYNELNLGRREEYDVLDKRRGRDPEMGGKPQRRKNPQEGLYNELQKDKMAEAYSEIGMKGERRRGKGHDGLYQGLSTATKDTYDALHMQALPPR

SEQ ID NO: 12897 - protein, 953 aa, Artificial Sequence
  Synthetic Polypeptide
MALPVTALLLPLALLLHAARPEVQLVESGGGLVQPGGSLRLSCAASGFSFSDFWMSWVRQAPGKGLEWVATISQAGSEKDYVDSVKGRFTISRDNAKKSLYLQMNSLRAEDTAVYYCASGVYSFDYRGQGTLVTVSSGTGGGGSGGGGSGGGGSEFDIQMTQSTSSLSASLGDRVTISCSASQGINNYLNWYQQKPDGTVELLIYYTSTLQSGVPSRFSGSGSGTDYSLTISNLEPEDIGTYYCQQYSKLPRTFGGGTKLEIKLEDLKNVFPPEVAVFEPSEAEISHTQKATLVCLATGFYPDHVELSWWVNGKEVHSGVSTDPQPLKEQPALNDSRYCLSSRLRVSATFWQNPRNHFRCQVQFYGLSENDEWTQDRAKPVTQIVSAEAWGRADCGSQSFGLLDPKLCYLLDGILFIYGVILTALFLRVKFSRSADAPAYQQGQNQLYNELNLGRREEYDVLDKRRGRDPEMGGKPQRRKNPQEGLYNELQKDKMAEAYSEIGMKGERRRGKGHDGLYQGLSTATKDTYDALHMQALPPRRAKRSGSGATNFSLLKQAGDVEENPGPTSMDWIWRILFLVGAATGAHSFEQVQLQQSGSELMMPGASVKISCKATGYTFSNYWIEWVKQRPGHGLEWIGEILPGTGRTIYNEKFKGKATFTADISSNTVQMQLSSLTSEDSAVYYCARRDYYGNFYYAMDYWGQGTSVTVSSTRIQNPDPAVYQLRDSKSSDKSVCLFTDFDSQTNVSQSKDSDVYITDKTVLDMRSMDFKSNSAVAWSNKSDFACANAFNNSIIPEDTFFPSPESSCGTQSFGLLDPKLCYLLDGILFIYGVILTALFLRVKFSRSADAPAYQQGQNQLYNELNLGRREEYDVLDKRRGRDPEMGGKPQRRKNPQEGLYNELQKDKMAEAYSEIGMKGERRRGKGHDGLYQGLSTATKDTYDALHMQALPPR

SEQ ID NO: 12898 - protein, 948 aa, Artificial Sequence
  Synthetic Polypeptide
MALPVTALLLPLALLLHAARPEVQLVESGGGLVQPGGSLRLSCAASGFSFSDFWMSWVRQAPGKGLEWVATISQAGSEKDYVDSVKGRFTISRDNAKKSLYLQMNSLRAEDTAVYYCASGVYSFDYRGQGTLVTVSSGTGGGGSGGGGSGGGGSEFDIQMTQSPASLSVSVGETVTITCRASENIYSNLAWYQQKQGKSPQLLVYAATNLADGVPSRFSGSGSGTQYSLKINSLQSEDFGSYYCQHFWGTWTFGGGTTLEIKLEDLKNVFPPEVAVFEPSEAEISHTQKATLVCLATGFYPDHVELSWWVNGKEVHSGVSTDPQPLKEQPALNDSRYCLSSRLRVSATFWQNPRNHFRCQVQFYGLSENDEWTQDRAKPVTQIVSAEAWGRADCGSQSFGLLDPKLCYLLDGILFIYGVILTALFLRVKFSRSADAPAYQQGQNQLYNELNLGRREEYDVLDKRRGRDPEMGGKPQRRKNPQEGLYNELQKDKMAEAYSEIGMKGERRRGKGHDGLYQGLSTATKDTYDALHMQALPPRRAKRSGSGATNFSLLKQAGDVEENPGPTSMDWIWRILFLVGAATGAHSFEEVQLQQSGPELVKPGASVKMSCKASGYTFTDYYMKWMKQSHGKSLEWIGDINPNNGGTTYNQKFKGKATLTVDKSSSTAYMQLNSLTSEDSAVYYCARDYGYGYFDYWGQGTTLTVSSTRIQNPDPAVYQLRDSKSSDKSVCLFTDFDSQTNVSQSKDSDVYITDKTVLDMRSMDFKSNSAVAWSNKSDFACANAFNNSIIPEDTFFPSPESSCGTQSFGLLDPKLCYLLDGILFIYGVILTALFLRVKFSRSADAPAYQQGQNQLYNELNLGRREEYDVLDKRRGRDPEMGGKPQRRKNPQEGLYNELQKDKMAEAYSEIGMKGERRRGKGHDGLYQGLSTATKDTYDALHMQALPPR

SEQ ID NO: 12899 - protein, 951 aa, Artificial Sequence
  Synthetic Polypeptide
MALPVTALLLPLALLLHAARPEVQLVESGGGLVQPGGSLRLSCAASGFSFSDFWMSWVRQAPGKGLEWVATISQAGSEKDYVDSVKGRFTISRDNAKKSLYLQMNSLRAEDTAVYYCASGVYSFDYRGQGTLVTVSSGTGGGGSGGGGSGGGGSEFEIVLTQSPGTLSLSPGERATLSCRASQSVGGYLAWYQQKPGQAPRLLIYDASNRATGIPARFSGSGSGTDFTLTISSLEPEDFAVYYCQQRNNWPPMYTFGQGTKLEIKRLEDLKNVFPPEVAVFEPSEAEISHTQKATLVCLATGFYPDHVELSWWVNGKEVHSGVSTDPQPLKEQPALNDSRYCLSSRLRVSATFWQNPRNHFRCQVQFYGLSENDEWTQDRAKPVTQIVSAEAWGRADCGSQSFGLLDPKLCYLLDGILFIYGVILTALFLRVKFSRSADAPAYQQGQNQLYNELNLGRREEYDVLDKRRGRDPEMGGKPQRRKNPQEGLYNELQKDKMAEAYSEIGMKGERRRGKGHDGLYQGLSTATKDTYDALHMQALPPRRAKRSGSGATNFSLLKQAGDVEENPGPTSMDWIWRILFLVGAATGAHSFEQVQLVQSGAEVKKPGSSVKVSCKASGGTFSSYAISWVRQAPGQGLEWMGGIIPILGTANYAQKFQGRVTITADESTSTAYMELSSLRSEDTAVYYCARWGGGAFDIWGQGTMVTVSSTRIQNPDPAVYQLRDSKSSDKSVCLFTDFDSQTNVSQSKDSDVYITDKTVLDMRSMDFKSNSAVAWSNKSDFACANAFNNSIIPEDTFFPSPESSCGTQSFGLLDPKLCYLLDGILFIYGVILTALFLRVKFSRSADAPAYQQGQNQLYNELNLGRREEYDVLDKRRGRDPEMGGKPQRRKNPQEGLYNELQKDKMAEAYSEIGMKGERRRGKGHDGLYQGLSTATKDTYDALHMQALPPR

SEQ ID NO: 12900 - protein, 946 aa, Artificial Sequence
  Synthetic Polypeptide
MALPVTALLLPLALLLHAARPEVQLVESGGGLVQPGGSLRLSCAASGFSFSDFWMSWVRQAPGKGLEWVATISQAGSEKDYVDSVKGRFTISRDNAKKSLYLQMNSLRAEDTAVYYCASGVYSFDYRGQGTLVTVSSGTGGGGSGGGGSGGGGSEFQIVLTQSPALMSASPGEKVTMTCSASSSVRYMYWYQQKPRSSPKPWIHLTSNLASGVPARFSGSGSGTSYSLTISSMEAEDAATYYCQQWSSHPFTFGSGTKLEIKLEDLKNVFPPEVAVFEPSEAEISHTQKATLVCLATGFYPDHVELSWWVNGKEVHSGVSTDPQPLKEQPALNDSRYCLSSRLRVSATFWQNPRNHFRCQVQFYGLSENDEWTQDRAKPVTQIVSAEAWGRADCGSQSFGLLDPKLCYLLDGILFIYGVILTALFLRVKFSRSADAPAYQQGQNQLYNELNLGRREEYDVLDKRRGRDPEMGGKPQRRKNPQEGLYNELQKDKMAEAYSEIGMKGERRRGKGHDGLYQGLSTATKDTYDALHMQALPPRRAKRSGSGATNFSLLKQAGDVEENPGPTSMDWIWRILFLVGAATGAHSFEDVQLQESGPGLVKPSQSLSLTCTVTGFSITSDYSWNWIRQFPGNKLEWMGYISYSGHTSYNPSLESRISITRDTSKNQFFLQLNSVTTEDTATYYCTRGNWDVVYWGQGTLVTVSATRIQNPDPAVYQLRDSKSSDKSVCLFTDFDSQTNVSQSKDSDVYITDKTVLDMRSMDFKSNSAVAWSNKSDFACANAFNNSIIPEDTFFPSPESSCGTQSFGLLDPKLCYLLDGILFIYGVILTALFLRVKFSRSADAPAYQQGQNQLYNELNLGRREEYDVLDKRRGRDPEMGGKPQRRKNPQEGLYNELQKDKMAEAYSEIGMKGERRRGKGHDGLYQGLSTATKDTYDALHMQALPPR

SEQ ID NO: 12901 - protein, 956 aa, Artificial Sequence
  Synthetic Polypeptide
MALPVTALLLPLALLLHAARPEVQLVESGGGLVQPGGSLRLSCAASGFSFSDFWMSWVRQAPGKGLEWVATISQAGSEKDYVDSVKGRFTISRDNAKKSLYLQMNSLRAEDTAVYYCASGVYSFDYRGQGTLVTVSSGTGGGGSGGGGSGGGGSEFDVVMTQSPLSLPVTLGQPASISCRSSQSIVHSDGNTYLEWYQQRPGQSPRRLIYKVSNRFSGVPDRFSGSGSGTDFTLKISRVEAEDVGVYYCFQGSHAPWTFGGGTKVEIKLEDLKNVFPPEVAVFEPSEAEISHTQKATLVCLATGFYPDHVELSWWVNGKEVHSGVSTDPQPLKEQPALNDSRYCLSSRLRVSATFWQNPRNHFRCQVQFYGLSENDEWTQDRAKPVTQIVSAEAWGRADCGSQSFGLLDPKLCYLLDGILFIYGVILTALFLRVKFSRSADAPAYQQGQNQLYNELNLGRREEYDVLDKRRGRDPEMGGKPQRRKNPQEGLYNELQKDKMAEAYSEIGMKGERRRGKGHDGLYQGLSTATKDTYDALHMQALPPRRAKRSGSGATNFSLLKQAGDVEENPGPTSMDWIWRILFLVGAATGAHSFEEVQLVESGGGLVQPGGSLRLSCAASGFTFSSYGMHWVRQAPGKGLEWVAYITTRSSTIYYADSVKGRFTISRDNAKNSLYLQMNSLRAEDTAVYYCTREPLTGYYAMDYWGQGTSVTVSSTRIQNPDPAVYQLRDSKSSDKSVCLFTDFDSQTNVSQSKDSDVYITDKTVLDMRSMDFKSNSAVAWSNKSDFACANAFNNSIIPEDTFFPSPESSCGTQSFGLLDPKLCYLLDGILFIYGVILTALFLRVKFSRSADAPAYQQGQNQLYNELNLGRREEYDVLDKRRGRDPEMGGKPQRRKNPQEGLYNELQKDKMAEAYSEIGMKGERRRGKGHDGLYQGLSTATKDTYDALHMQALPPR

SEQ ID NO: 12902 - protein, 948 aa, Artificial Sequence
  Synthetic Polypeptide
MALPVTALLLPLALLLHAARPEVQLVESGGGLVQPGGSLRLSCAASGFSFSDFWMSWVRQAPGKGLEWVATISQAGSEKDYVDSVKGRFTISRDNAKKSLYLQMNSLRAEDTAVYYCASGVYSFDYRGQGTLVTVSSGTGGGGSGGGGSGGGGSEFDIQMTQSPSSLSASVGDRVTITCRASQSISLWLNWYQQKPGKAPKLLIYAASTLQSGVPSRFSGSGSGTDFTLTISSLQPEDFATYYCQQYYTSPYTFGQGTKVEIKRLEDLKNVFPPEVAVFEPSEAEISHTQKATLVCLATGFYPDHVELSWWVNGKEVHSGVSTDPQPLKEQPALNDSRYCLSSRLRVSATFWQNPRNHFRCQVQFYGLSENDEWTQDRAKPVTQIVSAEAWGRADCGSQSFGLLDPKLCYLLDGILFIYGVILTALFLRVKFSRSADAPAYQQGQNQLYNELNLGRREEYDVLDKRRGRDPEMGGKPQRRKNPQEGLYNELQKDKMAEAYSEIGMKGERRRGKGHDGLYQGLSTATKDTYDALHMQALPPRRAKRSGSGATNFSLLKQAGDVEENPGPTSMDWIWRILFLVGAATGAHSFEQVQLLESGGGLVQPGGSLRLSCAASGFTFSSYAMSWVRQAPGKGLEWVSVIRSSGSSTYYADSVKGRFTISRDNSKNTLYLQMNSLRAEDTAVYYCARGGGYFDYWGQGTLVTVSSTRIQNPDPAVYQLRDSKSSDKSVCLFTDFDSQTNVSQSKDSDVYITDKTVLDMRSMDFKSNSAVAWSNKSDFACANAFNNSIIPEDTFFPSPESSCGTQSFGLLDPKLCYLLDGILFIYGVILTALFLRVKFSRSADAPAYQQGQNQLYNELNLGRREEYDVLDKRRGRDPEMGGKPQRRKNPQEGLYNELQKDKMAEAYSEIGMKGERRRGKGHDGLYQGLSTATKDTYDALHMQALPPR

SEQ ID NO: 12903 - protein, 951 aa, Artificial Sequence
  Synthetic Polypeptide
MALPVTALLLPLALLLHAARPEVQLVESGGGLVQPGGSLRLSCAASGFSFSDFWMSWVRQAPGKGLEWVATISQAGSEKDYVDSVKGRFTISRDNAKKSLYLQMNSLRAEDTAVYYCASGVYSFDYRGQGTLVTVSSGTGGGGSGGGGSGGGGSEFDIQMTQSPSSLSASVGDRVTITCRASQSISSYLNWYQQKPGKAPKLLIYAVSTLQSGVPSRFSGSGSGTDFTLTISSLQPEDFATYYCQQSGTFPPTTFGQGTKVEIKRLEDLKNVFPPEVAVFEPSEAEISHTQKATLVCLATGFYPDHVELSWWVNGKEVHSGVSTDPQPLKEQPALNDSRYCLSSRLRVSATFWQNPRNHFRCQVQFYGLSENDEWTQDRAKPVTQIVSAEAWGRADCGSQSFGLLDPKLCYLLDGILFIYGVILTALFLRVKFSRSADAPAYQQGQNQLYNELNLGRREEYDVLDKRRGRDPEMGGKPQRRKNPQEGLYNELQKDKMAEAYSEIGMKGERRRGKGHDGLYQGLSTATKDTYDALHMQALPPRRAKRSGSGATNFSLLKQAGDVEENPGPTSMDWIWRILFLVGAATGAHSFEQVQLLESGGGLVQPGGSLRLSCAASGFTFSSHGMHWVRQAPGKGLEWVSVISGSGSNTGYADSVKGRFTISRDNSKNTLYLQMNSLRAEDTAVYYCARQWGSYAFDSWGQGTLVTVSSTRIQNPDPAVYQLRDSKSSDKSVCLFTDFDSQTNVSQSKDSDVYITDKTVLDMRSMDFKSNSAVAWSNKSDFACANAFNNSIIPEDTFFPSPESSCGTQSFGLLDPKLCYLLDGILFIYGVILTALFLRVKFSRSADAPAYQQGQNQLYNELNLGRREEYDVLDKRRGRDPEMGGKPQRRKNPQEGLYNELQKDKMAEAYSEIGMKGERRRGKGHDGLYQGLSTATKDTYDALHMQALPPR

SEQ ID NO: 12904 - protein, 961 aa, Artificial Sequence
  Synthetic Polypeptide
MALPVTALLLPLALLLHAARPEVQLVESGGGLVQPGGSLRLSCAASGFSFSDFWMSWVRQAPGKGLEWVATISQAGSEKDYVDSVKGRFTISRDNAKKSLYLQMNSLRAEDTAVYYCASGVYSFDYRGQGTLVTVSSGTGGGGSGGGGSGGGGSEFDIVMSQSPSSLAVSVGEKVTMSCKSSQSLLHSSNQKNYLAWYQQKPGQSPKVLIYWASTRESGVPDRFTGSGSGTDFTLTITSVKSEDLAVYYCQQYYSYPWTFGGGTRLEIKRLEDLKNVFPPEVAVFEPSEAEISHTQKATLVCLATGFYPDHVELSWWVNGKEVHSGVSTDPQPLKEQPALNDSRYCLSSRLRVSATFWQNPRNHFRCQVQFYGLSENDEWTQDRAKPVTQIVSAEAWGRADCGSQSFGLLDPKLCYLLDGILFIYGVILTALFLRVKFSRSADAPAYQQGQNQLYNELNLGRREEYDVLDKRRGRDPEMGGKPQRRKNPQEGLYNELQKDKMAEAYSEIGMKGERRRGKGHDGLYQGLSTATKDTYDALHMQALPPRRAKRSGSGATNFSLLKQAGDVEENPGPTSMDWIWRILFLVGAATGAHSFEEVQLQQSVAELVKPGASVKMSCKVSGYTLTDHTIHWMKQRPEQGLEWIGYIYPRDGITGYNEKFKGKATLTADTSSSTAYMQLNSLTSEDSAVYFCARWGYSYRNYAYYYDYWGQGTTLTVSSTRIQNPDPAVYQLRDSKSSDKSVCLFTDFDSQTNVSQSKDSDVYITDKTVLDMRSMDFKSNSAVAWSNKSDFACANAFNNSIIPEDTFFPSPESSCGTQSFGLLDPKLCYLLDGILFIYGVILTALFLRVKFSRSADAPAYQQGQNQLYNELNLGRREEYDVLDKRRGRDPEMGGKPQRRKNPQEGLYNELQKDKMAEAYSEIGMKGERRRGKGHDGLYQGLSTATKDTYDALHMQALPPR

SEQ ID NO: 12905 - protein, 958 aa, Artificial Sequence
  Synthetic Polypeptide
MALPVTALLLPLALLLHAARPEVQLVESGGGLVQPGGSLRLSCAASGFSFSDFWMSWVRQAPGKGLEWVATISQAGSEKDYVDSVKGRFTISRDNAKKSLYLQMNSLRAEDTAVYYCASGVYSFDYRGQGTLVTVSSGTGGGGSGGGGSGGGGSEFEIVLTQSPGTLSLSPGERATLSCRASQSVSSSYLAWYQQKPGQAPRLLIYGTSSRATGIPDRFSGSGSGTDFTLTISRLEPEDFAVYYCQQYGSSPFTFGGGTKVEIKRLEDLKNVFPPEVAVFEPSEAEISHTQKATLVCLATGFYPDHVELSWWVNGKEVHSGVSTDPQPLKEQPALNDSRYCLSSRLRVSATFWQNPRNHFRCQVQFYGLSENDEWTQDRAKPVTQIVSAEAWGRADCGSQSFGLLDPKLCYLLDGILFIYGVILTALFLRVKFSRSADAPAYQQGQNQLYNELNLGRREEYDVLDKRRGRDPEMGGKPQRRKNPQEGLYNELQKDKMAEAYSEIGMKGERRRGKGHDGLYQGLSTATKDTYDALHMQALPPRRAKRSGSGATNFSLLKQAGDVEENPGPTSMDWIWRILFLVGAATGAHSFEQVQLQESGPGLAKPSETLSLTCTVSGDSITSYYWSWIRQPPGKGLEWIGYIYYSGSTNYNPSLKSRVTISVDTSKNQFSLKLSSVTAADTAVYYCARDQRRIAAAGTHFYGMDVWGQGTTVTVSSTRIQNPDPAVYQLRDSKSSDKSVCLFTDFDSQTNVSQSKDSDVYITDKTVLDMRSMDFKSNSAVAWSNKSDFACANAFNNSIIPEDTFFPSPESSCGTQSFGLLDPKLCYLLDGILFIYGVILTALFLRVKFSRSADAPAYQQGQNQLYNELNLGRREEYDVLDKRRGRDPEMGGKPQRRKNPQEGLYNELQKDKMAEAYSEIGMKGERRRGKGHDGLYQGLSTATKDTYDALHMQALPPR

SEQ ID NO: 12906 - protein, 950 aa, Artificial Sequence
  Synthetic Polypeptide
MALPVTALLLPLALLLHAARPEVQLVESGGGLVQPGGSLRLSCAASGFSFSDFWMSWVRQAPGKGLEWVATISQAGSEKDYVDSVKGRFTISRDNAKKSLYLQMNSLRAEDTAVYYCASGVYSFDYRGQGTLVTVSSGTGGGGSGGGGSGGGGSEFDILLTQSPVILSVSPGERVSFSCRASQSIGTNIHWYQQRTNGSPRLLIKYASESISGIPSRFSGSGSGTDFTLSINSVESEDIADYYCQQNNNWPTTFGAGTKLELKLEDLKNVFPPEVAVFEPSEAEISHTQKATLVCLATGFYPDHVELSWWVNGKEVHSGVSTDPQPLKEQPALNDSRYCLSSRLRVSATFWQNPRNHFRCQVQFYGLSENDEWTQDRAKPVTQIVSAEAWGRADCGSQSFGLLDPKLCYLLDGILFIYGVILTALFLRVKFSRSADAPAYQQGQNQLYNELNLGRREEYDVLDKRRGRDPEMGGKPQRRKNPQEGLYNELQKDKMAEAYSEIGMKGERRRGKGHDGLYQGLSTATKDTYDALHMQALPPRRAKRSGSGATNFSLLKQAGDVEENPGPTSMDWIWRILFLVGAATGAHSFEQVQLKQSGPGLVQPSQSLSITCTVSGFSLTNYGVHWVRQSPGKGLEWLGVIWSGGNTDYNTPFTSRLSINKDNSKSQVFFKMNSLQSNDTAIYYCARALTYYDYEFAYWGQGTLVTVSATRIQNPDPAVYQLRDSKSSDKSVCLFTDFDSQTNVSQSKDSDVYITDKTVLDMRSMDFKSNSAVAWSNKSDFACANAFNNSIIPEDTFFPSPESSCGTQSFGLLDPKLCYLLDGILFIYGVILTALFLRVKFSRSADAPAYQQGQNQLYNELNLGRREEYDVLDKRRGRDPEMGGKPQRRKNPQEGLYNELQKDKMAEAYSEIGMKGERRRGKGHDGLYQGLSTATKDTYDALHMQALPPR

SEQ ID NO: 12907 - protein, 943 aa, Artificial Sequence
  Synthetic Polypeptide
MALPVTALLLPLALLLHAARPEVQLVESGGGLVQPGGSLRLSCAASGFSFSDFWMSWVRQAPGKGLEWVATISQAGSEKDYVDSVKGRFTISRDNAKKSLYLQMNSLRAEDTAVYYCASGVYSFDYRGQGTLVTVSSGTGGGGSGGGGSGGGGSEFMTQSPKFLLVSAGDRVTLTCKASQSVNNDVYWYQQEPGQSPKLLIYWASTRESGVPDRFTGSGSGTDFTLTISSVQAEDLAVYYCKQSYNLYTFGGGTKLEIKRLEDLKNVFPPEVAVFEPSEAEISHTQKATLVCLATGFYPDHVELSWWVNGKEVHSGVSTDPQPLKEQPALNDSRYCLSSRLRVSATFWQNPRNHFRCQVQFYGLSENDEWTQDRAKPVTQIVSAEAWGRADCGSQSFGLLDPKLCYLLDGILFIYGVILTALFLRVKFSRSADAPAYQQGQNQLYNELNLGRREEYDVLDKRRGRDPEMGGKPQRRKNPQEGLYNELQKDKMAEAYSEIGMKGERRRGKGHDGLYQGLSTATKDTYDALHMQALPPRRAKRSGSGATNFSLLKQAGDVEENPGPTSMDWIWRILFLVGAATGAHSFEESGRGLVQPGGSRKLSCAASGFTFSTSGMHWVRQAPEKGLEWVAYISSGSTTIYHADTVKGRFTISRDNPKNTLFLQMTSLRSEDTAMYYCCARSGQFGNYFDYWGQGTTLTVSSTRIQNPDPAVYQLRDSKSSDKSVCLFTDFDSQTNVSQSKDSDVYITDKTVLDMRSMDFKSNSAVAWSNKSDFACANAFNNSIIPEDTFFPSPESSCGTQSFGLLDPKLCYLLDGILFIYGVILTALFLRVKFSRSADAPAYQQGQNQLYNELNLGRREEYDVLDKRRGRDPEMGGKPQRRKNPQEGLYNELQKDKMAEAYSEIGMKGERRRGKGHDGLYQGLSTATKDTYDALHMQALPPR

SEQ ID NO: 12908 - protein, 948 aa, Artificial Sequence
  Synthetic Polypeptide
MALPVTALLLPLALLLHAARPEVQLVESGGGLVQPGGSLRLSCAASGFSFSDFWMSWVRQAPGKGLEWVATISQAGSEKDYVDSVKGRFTISRDNAKKSLYLQMNSLRAEDTAVYYCASGVYSFDYRGQGTLVTVSSGTGGGGSGGGGSGGGGSEFQSPSSLAVSAGEKVTMSCKSSQSLLNSRTRKNYLAWYQQKPGQSPKLLIYWASTRESGVPDRFTGSGSGTDFTLTISSVQAEDLAVYYCKQSNLYTFGGGTKLEIKLEDLKNVFPPEVAVFEPSEAEISHTQKATLVCLATGFYPDHVELSWWVNGKEVHSGVSTDPQPLKEQPALNDSRYCLSSRLRVSATFWQNPRNHFRCQVQFYGLSENDEWTQDRAKPVTQIVSAEAWGRADCGSQSFGLLDPKLCYLLDGILFIYGVILTALFLRVKFSRSADAPAYQQGQNQLYNELNLGRREEYDVLDKRRGRDPEMGGKPQRRKNPQEGLYNELQKDKMAEAYSEIGMKGERRRGKGHDGLYQGLSTATKDTYDALHMQALPPRRAKRSGSGATNFSLLKQAGDVEENPGPTSMDWIWRILFLVGAATGAHSFEQVQLEESGPELVKPGASVKLSCKASGYTFTEYIIHWVKQRSGQGLEWIGWFYPGSGSIKYNEKFKDKATLTADKSSSTVYMELSGLTSEDSAVYFCARHDGYSYFDYWGQGTTLTVSSTRIQNPDPAVYQLRDSKSSDKSVCLFTDFDSQTNVSQSKDSDVYITDKTVLDMRSMDFKSNSAVAWSNKSDFACANAFNNSIIPEDTFFPSPESSCGTQSFGLLDPKLCYLLDGILFIYGVILTALFLRVKFSRSADAPAYQQGQNQLYNELNLGRREEYDVLDKRRGRDPEMGGKPQRRKNPQEGLYNELQKDKMAEAYSEIGMKGERRRGKGHDGLYQGLSTATKDTYDALHMQALPPR

SEQ ID NO: 12909 - protein, 951 aa, Artificial Sequence
  Synthetic Polypeptide
MALPVTALLLPLALLLHAARPEVQLVESGGGLVQPGGSLRLSCAASGFSFSDFWMSWVRQAPGKGLEWVATISQAGSEKDYVDSVKGRFTISRDNAKKSLYLQMNSLRAEDTAVYYCASGVYSFDYRGQGTLVTVSSGTGGGGSGGGGSGGGGSEFDIQMTQSPSSLSASLGERVSLTCRATQELSGYLSWLQQKPDGTIKRLIYAASTLDSGVPKRFSGNRSGSDYSLTISSLESEDFADYYCLQYAIYPYTFGGGTKLEIKLEDLKNVFPPEVAVFEPSEAEISHTQKATLVCLATGFYPDHVELSWWVNGKEVHSGVSTDPQPLKEQPALNDSRYCLSSRLRVSATFWQNPRNHFRCQVQFYGLSENDEWTQDRAKPVTQIVSAEAWGRADCGSQSFGLLDPKLCYLLDGILFIYGVILTALFLRVKFSRSADAPAYQQGQNQLYNELNLGRREEYDVLDKRRGRDPEMGGKPQRRKNPQEGLYNELQKDKMAEAYSEIGMKGERRRGKGHDGLYQGLSTATKDTYDALHMQALPPRRAKRSGSGATNFSLLKQAGDVEENPGPTSMDWIWRILFLVGAATGAHSFEEVQLQQSGPELVKPGASVKMSCKASGYTFTSYFIHWVKQKPGQGLEWIGFINPYNDGSKYNEKFKGKATLTSDKSSSTAYMELSSLTSEDSAVYYCTRDDGYYGYAMDYWGQGTSVTVSSTRIQNPDPAVYQLRDSKSSDKSVCLFTDFDSQTNVSQSKDSDVYITDKTVLDMRSMDFKSNSAVAWSNKSDFACANAFNNSIIPEDTFFPSPESSCGTQSFGLLDPKLCYLLDGILFIYGVILTALFLRVKFSRSADAPAYQQGQNQLYNELNLGRREEYDVLDKRRGRDPEMGGKPQRRKNPQEGLYNELQKDKMAEAYSEIGMKGERRRGKGHDGLYQGLSTATKDTYDALHMQALPPR

SEQ ID NO: 12910 - protein, 956 aa, Artificial Sequence
  Synthetic Polypeptide
MALPVTALLLPLALLLHAARPEVQLVESGGGLVQPGGSLRLSCAASGFSFSDFWMSWVRQAPGKGLEWVATISQAGSEKDYVDSVKGRFTISRDNAKKSLYLQMNSLRAEDTAVYYCASGVYSFDYRGQGTLVTVSSGTGGGGSGGGGSGGGGSEFDTIVLTQSPASLAVSLGQRATISCRASESVDSYGNSFMHWYQQKPGQPPKLLIYLASNLESGVPARFSGSGSRTDFTLTIDPVEADDAATYYCQQNNYDPWTFGGGTKLEIKLEDLKNVFPPEVAVFEPSEAEISHTQKATLVCLATGFYPDHVELSWWVNGKEVHSGVSTDPQPLKEQPALNDSRYCLSSRLRVSATFWQNPRNHFRCQVQFYGLSENDEWTQDRAKPVTQIVSAEAWGRADCGSQSFGLLDPKLCYLLDGILFIYGVILTALFLRVKFSRSADAPAYQQGQNQLYNELNLGRREEYDVLDKRRGRDPEMGGKPQRRKNPQEGLYNELQKDKMAEAYSEIGMKGERRRGKGHDGLYQGLSTATKDTYDALHMQALPPRRAKRSGSGATNFSLLKQAGDVEENPGPTSMDWIWRILFLVGAATGAHSFEEVQLQQSGPELVKPGASVKMSCKASGYTFTSYVMHWVKQKPGQGLEWIGYINPYNDGTKYNEKFKGKATLTSDTSSSTAYMELNSLTSEDSAVYFCARPIYFDNDYFDYWGQGTTLKVSSTRIQNPDPAVYQLRDSKSSDKSVCLFTDFDSQTNVSQSKDSDVYITDKTVLDMRSMDFKSNSAVAWSNKSDFACANAFNNSIIPEDTFFPSPESSCGTQSFGLLDPKLCYLLDGILFIYGVILTALFLRVKFSRSADAPAYQQGQNQLYNELNLGRREEYDVLDKRRGRDPEMGGKPQRRKNPQEGLYNELQKDKMAEAYSEIGMKGERRRGKGHDGLYQGLSTATKDTYDALHMQALPPR

SEQ ID NO: 12911 - protein, 951 aa, Artificial Sequence
  Synthetic Polypeptide
MALPVTALLLPLALLLHAARPEVQLVESGGGLVQPGGSLRLSCAASGFSFSDFWMSWVRQAPGKGLEWVATISQAGSEKDYVDSVKGRFTISRDNAKKSLYLQMNSLRAEDTAVYYCASGVYSFDYRGQGTLVTVSSGTGGGGSGGGGSGGGGSEFDIQMTQSPSSLSASVGDRVTITCKASQDVGIAVAWYQQKPGKVPKLLIYWASTRHTGVPDRFSGSGSGTDFTLTISSLQPEDVATYYCQQYSSYPYTFGQGTKVEIKRLEDLKNVFPPEVAVFEPSEAEISHTQKATLVCLATGFYPDHVELSWWVNGKEVHSGVSTDPQPLKEQPALNDSRYCLSSRLRVSATFWQNPRNHFRCQVQFYGLSENDEWTQDRAKPVTQIVSAEAWGRADCGSQSFGLLDPKLCYLLDGILFIYGVILTALFLRVKFSRSADAPAYQQGQNQLYNELNLGRREEYDVLDKRRGRDPEMGGKPQRRKNPQEGLYNELQKDKMAEAYSEIGMKGERRRGKGHDGLYQGLSTATKDTYDALHMQALPPRRAKRSGSGATNFSLLKQAGDVEENPGPTSMDWIWRILFLVGAATGAHSFEEVQLVESGGGLVQPGGSLRLSCAASGFDFSRYWMSWVRQAPGKGLEWIGEINPDSSTINYAPSLKDKFIISRDNAKNSLYLQMNSLRAEDTAVYYCARPDGNYWYFDVWGQGTLVTVSSTRIQNPDPAVYQLRDSKSSDKSVCLFTDFDSQTNVSQSKDSDVYITDKTVLDMRSMDFKSNSAVAWSNKSDFACANAFNNSIIPEDTFFPSPESSCGTQSFGLLDPKLCYLLDGILFIYGVILTALFLRVKFSRSADAPAYQQGQNQLYNELNLGRREEYDVLDKRRGRDPEMGGKPQRRKNPQEGLYNELQKDKMAEAYSEIGMKGERRRGKGHDGLYQGLSTATKDTYDALHMQALPPR

SEQ ID NO: 12912 - protein, 951 aa, Artificial Sequence
  Synthetic Polypeptide
MALPVTALLLPLALLLHAARPEVQLVESGGGLVQPGGSLRLSCAASGFSFSDFWMSWVRQAPGKGLEWVATISQAGSEKDYVDSVKGRFTISRDNAKKSLYLQMNSLRAEDTAVYYCASGVYSFDYRGQGTLVTVSSGTGGGGSGGGGSGGGGSEFDIVMTQSQKSMSTSVGDRVSITCKASQDVITGVAWYQQKPGQSPKLLIYSASYRYTGVPDRFTGSGSGTDFTFTISNVQAEDLAVYYCQQHYSTPLTFGAGTKLELKLEDLKNVFPPEVAVFEPSEAEISHTQKATLVCLATGFYPDHVELSWWVNGKEVHSGVSTDPQPLKEQPALNDSRYCLSSRLRVSATFWQNPRNHFRCQVQFYGLSENDEWTQDRAKPVTQIVSAEAWGRADCGSQSFGLLDPKLCYLLDGILFIYGVILTALFLRVKFSRSADAPAYQQGQNQLYNELNLGRREEYDVLDKRRGRDPEMGGKPQRRKNPQEGLYNELQKDKMAEAYSEIGMKGERRRGKGHDGLYQGLSTATKDTYDALHMQALPPRRAKRSGSGATNFSLLKQAGDVEENPGPTSMDWIWRILFLVGAATGAHSFEQVQLQQPGAELVRPGASVKLSCKASGYSFTTYWMNWVKQRPGQGLEWIGMIHPSDSETRLNQKFKDKATLTVDKSSSTAYMQLSSPTSEDSAVYYCARSTMIATRAMDYWGQGTSVTVSSTRIQNPDPAVYQLRDSKSSDKSVCLFTDFDSQTNVSQSKDSDVYITDKTVLDMRSMDFKSNSAVAWSNKSDFACANAFNNSIIPEDTFFPSPESSCGTQSFGLLDPKLCYLLDGILFIYGVILTALFLRVKFSRSADAPAYQQGQNQLYNELNLGRREEYDVLDKRRGRDPEMGGKPQRRKNPQEGLYNELQKDKMAEAYSEIGMKGERRRGKGHDGLYQGLSTATKDTYDALHMQALPPR

SEQ ID NO: 12913 - protein, 957 aa, Artificial Sequence
  Synthetic Polypeptide
MALPVTALLLPLALLLHAARPEVQLVESGGGLVQPGGSLRLSCAASGFSFSDFWMSWVRQAPGKGLEWVATISQAGSEKDYVDSVKGRFTISRDNAKKSLYLQMNSLRAEDTAVYYCASGVYSFDYRGQGTLVTVSSGTGGGGSGGGGSGGGGSEFQSVLTQPPSVSGAPGQRVTISCTGSGSNIGAPYDVSWYQQLPGTAPKLLIYHNNKRPSGVPDRFSGSKSGTSASLAITGLQAEDEADYYCATVEAGLSGSVFGGGTKLTVLGALEDLKNVFPPEVAVFEPSEAEISHTQKATLVCLATGFYPDHVELSWWVNGKEVHSGVSTDPQPLKEQPALNDSRYCLSSRLRVSATFWQNPRNHFRCQVQFYGLSENDEWTQDRAKPVTQIVSAEAWGRADCGSQSFGLLDPKLCYLLDGILFIYGVILTALFLRVKFSRSADAPAYQQGQNQLYNELNLGRREEYDVLDKRRGRDPEMGGKPQRRKNPQEGLYNELQKDKMAEAYSEIGMKGERRRGKGHDGLYQGLSTATKDTYDALHMQALPPRRAKRSGSGATNFSLLKQAGDVEENPGPTSMDWIWRILFLVGAATGAHSFEQVQLVQSGAEVKKPGASVKVSCKVSGYTLTELSIHWVRQAPGKGLEWMGGFDPEENEIVYAQRFQGRVTMTEDTSTDTAYMELSSLRSEDTAVYYCAIVGSFSPLTLGLWGQGTMVTVSSTRIQNPDPAVYQLRDSKSSDKSVCLFTDFDSQTNVSQSKDSDVYITDKTVLDMRSMDFKSNSAVAWSNKSDFACANAFNNSIIPEDTFFPSPESSCGTQSFGLLDPKLCYLLDGILFIYGVILTALFLRVKFSRSADAPAYQQGQNQLYNELNLGRREEYDVLDKRRGRDPEMGGKPQRRKNPQEGLYNELQKDKMAEAYSEIGMKGERRRGKGHDGLYQGLSTATKDTYDALHMQALPPR

SEQ ID NO: 12914 - protein, 957 aa, Artificial Sequence
  Synthetic Polypeptide
MALPVTALLLPLALLLHAARPEVQLVESGGGLVQPGGSLRLSCAASGFSFSDFWMSWVRQAPGKGLEWVATISQAGSEKDYVDSVKGRFTISRDNAKKSLYLQMNSLRAEDTAVYYCASGVYSFDYRGQGTLVTVSSGTGGGGSGGGGSGGGGSEFQSVLTQPPSVSGAPGQRVTISCTGSGSNIGAPYDVSWYQQLPGTAPKLLIYHNNKRPSGVPDRFSGSKSGTSASLAITGLQAEDEADYYCQSYDSSSISTIFGGGTKLTVLGALEDLKNVFPPEVAVFEPSEAEISHTQKATLVCLATGFYPDHVELSWWVNGKEVHSGVSTDPQPLKEQPALNDSRYCLSSRLRVSATFWQNPRNHFRCQVQFYGLSENDEWTQDRAKPVTQIVSAEAWGRADCGSQSFGLLDPKLCYLLDGILFIYGVILTALFLRVKFSRSADAPAYQQGQNQLYNELNLGRREEYDVLDKRRGRDPEMGGKPQRRKNPQEGLYNELQKDKMAEAYSEIGMKGERRRGKGHDGLYQGLSTATKDTYDALHMQALPPRRAKRSGSGATNFSLLKQAGDVEENPGPTSMDWIWRILFLVGAATGAHSFEQVQLVQSGAEVKKPGASVKVSCKVSGYTLTELSIHWVRQAPGKGLEWMGGFDPEENEIVYAQRFQGRVTMTEDTSTDTAYMELSSLRSEDTAVYYCAIVGSFSGIAYRPWGQGTMVTVSSTRIQNPDPAVYQLRDSKSSDKSVCLFTDFDSQTNVSQSKDSDVYITDKTVLDMRSMDFKSNSAVAWSNKSDFACANAFNNSIIPEDTFFPSPESSCGTQSFGLLDPKLCYLLDGILFIYGVILTALFLRVKFSRSADAPAYQQGQNQLYNELNLGRREEYDVLDKRRGRDPEMGGKPQRRKNPQEGLYNELQKDKMAEAYSEIGMKGERRRGKGHDGLYQGLSTATKDTYDALHMQALPPR

SEQ ID NO: 12915 - protein, 945 aa, Artificial Sequence
  Synthetic Polypeptide
MALPVTALLLPLALLLHAARPEVQLVESGGGLVQPGGSLRLSCAASGFSFSDFWMSWVRQAPGKGLEWVATISQAGSEKDYVDSVKGRFTISRDNAKKSLYLQMNSLRAEDTAVYYCASGVYSFDYRGQGTLVTVSSGTGGGGSGGGGSGGGGSEFDIQMTQSPSSLSASVGDRVTITCRASQGIRNNLAWYQQKPGKAPKRLIYAASNLQSGVPSRFTGSGSGTEFTLIVSSLQPEDFATYYCLQHHSYPLTSGGGTKVELEDLKNVFPPEVAVFEPSEAEISHTQKATLVCLATGFYPDHVELSWWVNGKEVHSGVSTDPQPLKEQPALNDSRYCLSSRLRVSATFWQNPRNHFRCQVQFYGLSENDEWTQDRAKPVTQIVSAEAWGRADCGSQSFGLLDPKLCYLLDGILFIYGVILTALFLRVKFSRSADAPAYQQGQNQLYNELNLGRREEYDVLDKRRGRDPEMGGKPQRRKNPQEGLYNELQKDKMAEAYSEIGMKGERRRGKGHDGLYQGLSTATKDTYDALHMQALPPRRAKRSGSGATNFSLLKQAGDVEENPGPTSMDWIWRILFLVGAATGAHSFEEVQVLESGGGLVQPGGSLRLSCAASGFTFSSYAMSWVRQAPGKGLEWVSAISGSGGSTNYADSVKGRFTISRDNSKNTLYLQMNSLRAEDTAVYYCAGSSGWSEYWGQGTLVTVSSTRIQNPDPAVYQLRDSKSSDKSVCLFTDFDSQTNVSQSKDSDVYITDKTVLDMRSMDFKSNSAVAWSNKSDFACANAFNNSIIPEDTFFPSPESSCGTQSFGLLDPKLCYLLDGILFIYGVILTALFLRVKFSRSADAPAYQQGQNQLYNELNLGRREEYDVLDKRRGRDPEMGGKPQRRKNPQEGLYNELQKDKMAEAYSEIGMKGERRRGKGHDGLYQGLSTATKDTYDALHMQALPPR

SEQ ID NO: 12916 - protein, 951 aa, Artificial Sequence
  Synthetic Polypeptide
MALPVTALLLPLALLLHAARPEVQLVESGGGLVQPGGSLRLSCAASGFSFSDFWMSWVRQAPGKGLEWVATISQAGSEKDYVDSVKGRFTISRDNAKKSLYLQMNSLRAEDTAVYYCASGVYSFDYRGQGTLVTVSSGTGGGGSGGGGSGGGGSEFDEIQLVQSGAEVKKPGESLRISCKGSGFNIEDYYIHWVRQMPGKGLEWMGRIDPENDETKYGPIFQGHVTISADTSINTVYLQWSSLKASDTAMYYCAFRGGVYWGQGTTVTVSSLEDLKNVFPPEVAVFEPSEAEISHTQKATLVCLATGFYPDHVELSWWVNGKEVHSGVSTDPQPLKEQPALNDSRYCLSSRLRVSATFWQNPRNHFRCQVQFYGLSENDEWTQDRAKPVTQIVSAEAWGRADCGSQSFGLLDPKLCYLLDGILFIYGVILTALFLRVKFSRSADAPAYQQGQNQLYNELNLGRREEYDVLDKRRGRDPEMGGKPQRRKNPQEGLYNELQKDKMAEAYSEIGMKGERRRGKGHDGLYQGLSTATKDTYDALHMQALPPRRAKRSGSGATNFSLLKQAGDVEENPGPTSMDWIWRILFLVGAATGAHSFEDVVMTQSPDSLAVSLGERATINCKSSQSLLDSDGKTYLNWLQQKPGQPPKRLISLVSKLDSGVPDRFSGSGSGTDFTLTISSLQAEDVAVYYCWQGTHFPGTFGGGTKVEIKTRIQNPDPAVYQLRDSKSSDKSVCLFTDFDSQTNVSQSKDSDVYITDKTVLDMRSMDFKSNSAVAWSNKSDFACANAFNNSIIPEDTFFPSPESSCGTQSFGLLDPKLCYLLDGILFIYGVILTALFLRVKFSRSADAPAYQQGQNQLYNELNLGRREEYDVLDKRRGRDPEMGGKPQRRKNPQEGLYNELQKDKMAEAYSEIGMKGERRRGKGHDGLYQGLSTATKDTYDALHMQALPPR

SEQ ID NO: 12917 - protein, 958 aa, Artificial Sequence
  Synthetic Polypeptide
MALPVTALLLPLALLLHAARPEVQLVESGGGLVQPGGSLRLSCAASGFSFSDFWMSWVRQAPGKGLEWVATISQAGSEKDYVDSVKGRFTISRDNAKKSLYLQMNSLRAEDTAVYYCASGVYSFDYRGQGTLVTVSSGTGGGGSGGGGSGGGGSEFDELVMTQSPSSLTVTAGEKVTMSCKSSQSLLNSGNQKNYLTWYQQKPGQPPKLLIYWASTRESGVPDRFTGSGSGTDFTLTISSVQAEDLAVYYCQNDYSYPLTFGAGTKLEIKLEDLKNVFPPEVAVFEPSEAEISHTQKATLVCLATGFYPDHVELSWWVNGKEVHSGVSTDPQPLKEQPALNDSRYCLSSRLRVSATFWQNPRNHFRCQVQFYGLSENDEWTQDRAKPVTQIVSAEAWGRADCGSQSFGLLDPKLCYLLDGILFIYGVILTALFLRVKFSRSADAPAYQQGQNQLYNELNLGRREEYDVLDKRRGRDPEMGGKPQRRKNPQEGLYNELQKDKMAEAYSEIGMKGERRRGKGHDGLYQGLSTATKDTYDALHMQALPPRRAKRSGSGATNFSLLKQAGDVEENPGPTSMDWIWRILFLVGAATGAHSFEEVQLLEQSGAELVRPGTSVKISCKASGYAFTNYWLGWVKQRPGHGLEWIGDIFPGSGNIHYNEKFKGKATLTADKSSSTAYMQLSSLTFEDSAVYFCARLRNWDEPMDYWGQGTTVTVSSTRIQNPDPAVYQLRDSKSSDKSVCLFTDFDSQTNVSQSKDSDVYITDKTVLDMRSMDFKSNSAVAWSNKSDFACANAFNNSIIPEDTFFPSPESSCGTQSFGLLDPKLCYLLDGILFIYGVILTALFLRVKFSRSADAPAYQQGQNQLYNELNLGRREEYDVLDKRRGRDPEMGGKPQRRKNPQEGLYNELQKDKMAEAYSEIGMKGERRRGKGHDGLYQGLSTATKDTYDALHMQALPPR

SEQ ID NO: 12918 - protein, 959 aa, Artificial Sequence
  Synthetic Polypeptide
MALPVTALLLPLALLLHAARPEVQLVESGGGLVQPGGSLRLSCAASGFSFSDFWMSWVRQAPGKGLEWVATISQAGSEKDYVDSVKGRFTISRDNAKKSLYLQMNSLRAEDTAVYYCASGVYSFDYRGQGTLVTVSSGTGGGGSGGGGSGGGGSEFDELQMTQSPSSLSASVGDRVTITCRASQSISSYLNWYQQKPGQPPKLLIYWASTRESGVPDRFSGSESGTNYTLTISSLQPEDFATYFCQQSDSLPITFGQGTRLDIQLEDLKNVFPPEVAVFEPSEAEISHTQKATLVCLATGFYPDHVELSWWVNGKEVHSGVSTDPQPLKEQPALNDSRYCLSSRLRVSATFWQNPRNHFRCQVQFYGLSENDEWTQDRAKPVTQIVSAEAWGRADCGSQSFGLLDPKLCYLLDGILFIYGVILTALFLRVKFSRSADAPAYQQGQNQLYNELNLGRREEYDVLDKRRGRDPEMGGKPQRRKNPQEGLYNELQKDKMAEAYSEIGMKGERRRGKGHDGLYQGLSTATKDTYDALHMQALPPRRAKRSGSGATNFSLLKQAGDVEENPGPTSMDWIWRILFLVGAATGAHSFEEVQLLESGGGVVQPGRSLRLSCAASGFTFSSYGMHWVRQAPGKGLEWVAVISYDGSNKYYADSVKGRFTISRDNSKNTLYLQMNSLRAEDTAVYYCAKDMGWGSGWRPYYYYGMDVWGQGTTVTVSSTRIQNPDPAVYQLRDSKSSDKSVCLFTDFDSQTNVSQSKDSDVYITDKTVLDMRSMDFKSNSAVAWSNKSDFACANAFNNSIIPEDTFFPSPESSCGTQSFGLLDPKLCYLLDGILFIYGVILTALFLRVKFSRSADAPAYQQGQNQLYNELNLGRREEYDVLDKRRGRDPEMGGKPQRRKNPQEGLYNELQKDKMAEAYSEIGMKGERRRGKGHDGLYQGLSTATKDTYDALHMQALPPR

SEQ ID NO: 12919 - protein, 956 aa, Artificial Sequence
  Synthetic Polypeptide
MALPVTALLLPLALLLHAARPEVQLVESGGGLVQPGGSLRLSCAASGFSFSDFWMSWVRQAPGKGLEWVATISQAGSEKDYVDSVKGRFTISRDNAKKSLYLQMNSLRAEDTAVYYCASGVYSFDYRGQGTLVTVSSGTGGGGSGGGGSGGGGSEFDDIQMTQSPSSLSASVGDRVTITCRASQSISSYLNWYQQKPGKAPKLLIYAASSLQSGVPSRFSGSGSGTDFTLTISSLQPEDLATYYCQQSYSTPFTFGPGTKVDIKLEDLKNVFPPEVAVFEPSEAEISHTQKATLVCLATGFYPDHVELSWWVNGKEVHSGVSTDPQPLKEQPALNDSRYCLSSRLRVSATFWQNPRNHFRCQVQFYGLSENDEWTQDRAKPVTQIVSAEAWGRADCGSQSFGLLDPKLCYLLDGILFIYGVILTALFLRVKFSRSADAPAYQQGQNQLYNELNLGRREEYDVLDKRRGRDPEMGGKPQRRKNPQEGLYNELQKDKMAEAYSEIGMKGERRRGKGHDGLYQGLSTATKDTYDALHMQALPPRRAKRSGSGATNFSLLKQAGDVEENPGPTSMDWIWRILFLVGAATGAHSFEVHEVQLVQSGAEVKKPGSSVKVSCKASGGTFSSYAISWVRQAPGQGLEWMGGIIPIFGTANYAQKFQGRVTITADKSTSTAYMELSSLRSEDTAVYYCATFALFGFREQAFDIWGQGTTVTVSSTRIQNPDPAVYQLRDSKSSDKSVCLFTDFDSQTNVSQSKDSDVYITDKTVLDMRSMDFKSNSAVAWSNKSDFACANAFNNSIIPEDTFFPSPESSCGTQSFGLLDPKLCYLLDGILFIYGVILTALFLRVKFSRSADAPAYQQGQNQLYNELNLGRREEYDVLDKRRGRDPEMGGKPQRRKNPQEGLYNELQKDKMAEAYSEIGMKGERRRGKGHDGLYQGLSTATKDTYDALHMQALPPR

SEQ ID NO: 12920 - protein, 954 aa, Artificial Sequence
  Synthetic Polypeptide
MALPVTALLLPLALLLHAARPEVQLVESGGGLVQPGGSLRLSCAASGFSFSDFWMSWVRQAPGKGLEWVATISQAGSEKDYVDSVKGRFTISRDNAKKSLYLQMNSLRAEDTAVYYCASGVYSFDYRGQGTLVTVSSGTGGGGSGGGGSGGGGSEFDIVLTQSPLSLAVSLGQPAIISCKASQSVSFAGTSLMHWYHQKPGQQPRLLIYRASNLEAGVPDRFSGSGSKTDFTLTISPVEAEDAATYYCQQSREYPYTFGGGTKLEIKRLEDLKNVFPPEVAVFEPSEAEISHTQKATLVCLATGFYPDHVELSWWVNGKEVHSGVSTDPQPLKEQPALNDSRYCLSSRLRVSATFWQNPRNHFRCQVQFYGLSENDEWTQDRAKPVTQIVSAEAWGRADCGSQSFGLLDPKLCYLLDGILFIYGVILTALFLRVKFSRSADAPAYQQGQNQLYNELNLGRREEYDVLDKRRGRDPEMGGKPQRRKNPQEGLYNELQKDKMAEAYSEIGMKGERRRGKGHDGLYQGLSTATKDTYDALHMQALPPRRAKRSGSGATNFSLLKQAGDVEENPGPTSMDWIWRILFLVGAATGAHSFEQVQLVQSGAEVVKPGASVKISCKASGYTFTGYFMNWVKQSPGQSLEWIGRIHPYDGDTFYNQKFQGKATLTVDKSSNTAHMELLSLTSEDFAVYYCTRYDGSRAMDYWGQGTTVTVSSTRIQNPDPAVYQLRDSKSSDKSVCLFTDFDSQTNVSQSKDSDVYITDKTVLDMRSMDFKSNSAVAWSNKSDFACANAFNNSIIPEDTFFPSPESSCGTQSFGLLDPKLCYLLDGILFIYGVILTALFLRVKFSRSADAPAYQQGQNQLYNELNLGRREEYDVLDKRRGRDPEMGGKPQRRKNPQEGLYNELQKDKMAEAYSEIGMKGERRRGKGHDGLYQGLSTATKDTYDALHMQALPPR

SEQ ID NO: 12921 - protein, 951 aa, Artificial Sequence
  Synthetic Polypeptide
MALPVTALLLPLALLLHAARPEVQLVESGGGLVQPGGSLRLSCAASGFSFSDFWMSWVRQAPGKGLEWVATISQAGSEKDYVDSVKGRFTISRDNAKKSLYLQMNSLRAEDTAVYYCASGVYSFDYRGQGTLVTVSSGTGGGGSGGGGSGGGGSEFDDVVMTQTPLSLPVTPGEPASISCRSSQSLVHRNGNTYLHWYLQKPGQSPKLLIHKVSNRFSGVPDRFSGSGSGTDFTLKISRVEAEDLGVYFCSQSTHVPPLTFGAGTKLELKLEDLKNVFPPEVAVFEPSEAEISHTQKATLVCLATGFYPDHVELSWWVNGKEVHSGVSTDPQPLKEQPALNDSRYCLSSRLRVSATFWQNPRNHFRCQVQFYGLSENDEWTQDRAKPVTQIVSAEAWGRADCGSQSFGLLDPKLCYLLDGILFIYGVILTALFLRVKFSRSADAPAYQQGQNQLYNELNLGRREEYDVLDKRRGRDPEMGGKPQRRKNPQEGLYNELQKDKMAEAYSEIGMKGERRRGKGHDGLYQGLSTATKDTYDALHMQALPPRRAKRSGSGATNFSLLKQAGDVEENPGPTSMDWIWRILFLVGAATGAHSFEEVQLVQSGAEVEKPGASVKISCKASGSSFTGYNMNWVRQNIGKSLEWIGAIDPYYGGTSYNQKFKGRATLTVDKSTSTAYMHLKSLRSEDTAVYYCVSGMEYWGQGTSVTVSSTRIQNPDPAVYQLRDSKSSDKSVCLFTDFDSQTNVSQSKDSDVYITDKTVLDMRSMDFKSNSAVAWSNKSDFACANAFNNSIIPEDTFFPSPESSCGTQSFGLLDPKLCYLLDGILFIYGVILTALFLRVKFSRSADAPAYQQGQNQLYNELNLGRREEYDVLDKRRGRDPEMGGKPQRRKNPQEGLYNELQKDKMAEAYSEIGMKGERRRGKGHDGLYQGLSTATKDTYDALHMQALPPR

SEQ ID NO: 12922 - protein, 949 aa, Artificial Sequence
  Synthetic Polypeptide
MALPVTALLLPLALLLHAARPEVQLVESGGGLVQPGGSLRLSCAASGFSFSDFWMSWVRQAPGKGLEWVATISQAGSEKDYVDSVKGRFTISRDNAKKSLYLQMNSLRAEDTAVYYCASGVYSFDYRGQGTLVTVSSGTGGGGSGGGGSGGGGSEFDEIVMTQTPATLSVSAGERVTITCKASQSVSNDVTWYQQKPGQAPRLLIYSASNRYSGVPARFSGSGYGTEFTFTISSVQSEDFAVYFCQQDYSSFGQGTKLEIKRLEDLKNVFPPEVAVFEPSEAEISHTQKATLVCLATGFYPDHVELSWWVNGKEVHSGVSTDPQPLKEQPALNDSRYCLSSRLRVSATFWQNPRNHFRCQVQFYGLSENDEWTQDRAKPVTQIVSAEAWGRADCGSQSFGLLDPKLCYLLDGILFIYGVILTALFLRVKFSRSADAPAYQQGQNQLYNELNLGRREEYDVLDKRRGRDPEMGGKPQRRKNPQEGLYNELQKDKMAEAYSEIGMKGERRRGKGHDGLYQGLSTATKDTYDALHMQALPPRRAKRSGSGATNFSLLKQAGDVEENPGPTSMDWIWRILFLVGAATGAHSFEQVQLVESGPGVVQPGRSLRISCAVSGFSVTNYGVHWVRQPPGKGLEWLGVIWAGGITNYNSAFMSRLTISKDNSKNTVYLQMNSLRAEDTAMYYCASRGGHYGYALDYWGQGTLVTVSSTRIQNPDPAVYQLRDSKSSDKSVCLFTDFDSQTNVSQSKDSDVYITDKTVLDMRSMDFKSNSAVAWSNKSDFACANAFNNSIIPEDTFFPSPESSCGTQSFGLLDPKLCYLLDGILFIYGVILTALFLRVKFSRSADAPAYQQGQNQLYNELNLGRREEYDVLDKRRGRDPEMGGKPQRRKNPQEGLYNELQKDKMAEAYSEIGMKGERRRGKGHDGLYQGLSTATKDTYDALHMQALPPR

SEQ ID NO: 12923 - protein, 951 aa, Artificial Sequence
  Synthetic Polypeptide
MALPVTALLLPLALLLHAARPEVQLVESGGGLVQPGGSLRLSCAASGFSFSDFWMSWVRQAPGKGLEWVATISQAGSEKDYVDSVKGRFTISRDNAKKSLYLQMNSLRAEDTAVYYCASGVYSFDYRGQGTLVTVSSGTGGGGSGGGGSGGGGSEFDIQMTQTASSLPASLGDRVTISCSASQDISNYLNWYQQKPDGTVKLLIFYSSNLHSGVPSRFSGGGSGTDYSLTISNLEPEDIATYFCHQYSKLPWTFGGGTKLEIKRLEDLKNVFPPEVAVFEPSEAEISHTQKATLVCLATGFYPDHVELSWWVNGKEVHSGVSTDPQPLKEQPALNDSRYCLSSRLRVSATFWQNPRNHFRCQVQFYGLSENDEWTQDRAKPVTQIVSAEAWGRADCGSQSFGLLDPKLCYLLDGILFIYGVILTALFLRVKFSRSADAPAYQQGQNQLYNELNLGRREEYDVLDKRRGRDPEMGGKPQRRKNPQEGLYNELQKDKMAEAYSEIGMKGERRRGKGHDGLYQGLSTATKDTYDALHMQALPPRRAKRSGSGATNFSLLKQAGDVEENPGPTSMDWIWRILFLVGAATGAHSFEEVTLVESGGDFVKPGGSLKVSCAASGFAFSHYAMSWVRQTPAKRLEWVAYISSGGSGTYYSDSVKGRFTISRDNAKNTLYLQMRSLRSEDSAMYFCTRVKLGTYYFDSWGQGTTLTVSSTRIQNPDPAVYQLRDSKSSDKSVCLFTDFDSQTNVSQSKDSDVYITDKTVLDMRSMDFKSNSAVAWSNKSDFACANAFNNSIIPEDTFFPSPESSCGTQSFGLLDPKLCYLLDGILFIYGVILTALFLRVKFSRSADAPAYQQGQNQLYNELNLGRREEYDVLDKRRGRDPEMGGKPQRRKNPQEGLYNELQKDKMAEAYSEIGMKGERRRGKGHDGLYQGLSTATKDTYDALHMQALPPR

SEQ ID NO: 12924 - protein, 953 aa, Artificial Sequence
  Synthetic Polypeptide
MALPVTALLLPLALLLHAARPEVQLVESGGGLVQPGGSLRLSCAASGFSFSDFWMSWVRQAPGKGLEWVATISQAGSEKDYVDSVKGRFTISRDNAKKSLYLQMNSLRAEDTAVYYCASGVYSFDYRGQGTLVTVSSGTGGGGSGGGGSGGGGSEFQFVLTQSPSASAALGASAKLTCTLSSAHKTYTIDWYQQQKGKAPRYLIQVKSDGTYTKATGVPDRFSGSSSGADRYLIIPSVQADDEADYYCGTDYTGGYVFGGGTQLTVTLEDLKNVFPPEVAVFEPSEAEISHTQKATLVCLATGFYPDHVELSWWVNGKEVHSGVSTDPQPLKEQPALNDSRYCLSSRLRVSATFWQNPRNHFRCQVQFYGLSENDEWTQDRAKPVTQIVSAEAWGRADCGSQSFGLLDPKLCYLLDGILFIYGVILTALFLRVKFSRSADAPAYQQGQNQLYNELNLGRREEYDVLDKRRGRDPEMGGKPQRRKNPQEGLYNELQKDKMAEAYSEIGMKGERRRGKGHDGLYQGLSTATKDTYDALHMQALPPRRAKRSGSGATNFSLLKQAGDVEENPGPTSMDWIWRILFLVGAATGAHSFEEQLKESGGGLFKPTDTLTLTCTVSGFSLSYYGVNWVRQAPGNGLEWIGTIGGSGDTYYASWAKSRSTIIRNTNENTVTLKMTSLTAADTATYFCVRYANIGYEYFNVWGPGTLVTVSSTRIQNPDPAVYQLRDSKSSDKSVCLFTDFDSQTNVSQSKDSDVYITDKTVLDMRSMDFKSNSAVAWSNKSDFACANAFNNSIIPEDTFFPSPESSCGTQSFGLLDPKLCYLLDGILFIYGVILTALFLRVKFSRSADAPAYQQGQNQLYNELNLGRREEYDVLDKRRGRDPEMGGKPQRRKNPQEGLYNELQKDKMAEAYSEIGMKGERRRGKGHDGLYQGLSTATKDTYDALHMQALPPR

SEQ ID NO: 12925 - protein, 958 aa, Artificial Sequence
  Synthetic Polypeptide
MALPVTALLLPLALLLHAARPEVQLVESGGGLVQPGGSLRLSCAASGFSFSDFWMSWVRQAPGKGLEWVATISQAGSEKDYVDSVKGRFTISRDNAKKSLYLQMNSLRAEDTAVYYCASGVYSFDYRGQGTLVTVSSGTGGGGSGGGGSGGGGSEFQFVLTQSPSVSAALGASAKLTCTLSSAHKTYTIDWYQQQQGEAPRYLMQVKSDGSYTKGTGVPDRFSGSSSGADRYLIIPSVQADDEAGYVCGADDNGGYVFGGGTQLTVTLEDLKNVFPPEVAVFEPSEAEISHTQKATLVCLATGFYPDHVELSWWVNGKEVHSGVSTDPQPLKEQPALNDSRYCLSSRLRVSATFWQNPRNHFRCQVQFYGLSENDEWTQDRAKPVTQIVSAEAWGRADCGSQSFGLLDPKLCYLLDGILFIYGVILTALFLRVKFSRSADAPAYQQGQNQLYNELNLGRREEYDVLDKRRGRDPEMGGKPQRRKNPQEGLYNELQKDKMAEAYSEIGMKGERRRGKGHDGLYQGLSTATKDTYDALHMQALPPRRAKRSGSGATNFSLLKQAGDVEENPGPTSMDWIWRILFLVGAATGAHSFEQSVKESEGGLFKPTDTLTLTCTVSGFSLSRHALTWVRQAPGNGLEWIGAIDNAGTTYYASWAKSRSTITRNTDLHTVTLKMTSLTASDTATYFCARVFYDINSGYYLDGMDLWGPGTLVTVSSTRIQNPDPAVYQLRDSKSSDKSVCLFTDFDSQTNVSQSKDSDVYITDKTVLDMRSMDFKSNSAVAWSNKSDFACANAFNNSIIPEDTFFPSPESSCGTQSFGLLDPKLCYLLDGILFIYGVILTALFLRVKFSRSADAPAYQQGQNQLYNELNLGRREEYDVLDKRRGRDPEMGGKPQRRKNPQEGLYNELQKDKMAEAYSEIGMKGERRRGKGHDGLYQGLSTATKDTYDALHMQALPPR

SEQ ID NO: 12926 - protein, 952 aa, Artificial Sequence
  Synthetic Polypeptide
MALPVTALLLPLALLLHAARPEVQLVESGGGLVQPGGSLRLSCAASGFSFSDFWMSWVRQAPGKGLEWVATISQAGSEKDYVDSVKGRFTISRDNAKKSLYLQMNSLRAEDTAVYYCASGVYSFDYRGQGTLVTVSSGTGGGGSGGGGSGGGGSEFDIQMTQSPSSLSASVGDRVTITCRASQGISSWLAWYQQKPEKAPKSLIYAASSLQSGVPSRFSGSGSGTDFTLTISSLQPEDFATYYCQQYNSYPPTFGGGTKVEIKLEDLKNVFPPEVAVFEPSEAEISHTQKATLVCLATGFYPDHVELSWWVNGKEVHSGVSTDPQPLKEQPALNDSRYCLSSRLRVSATFWQNPRNHFRCQVQFYGLSENDEWTQDRAKPVTQIVSAEAWGRADCGSQSFGLLDPKLCYLLDGILFIYGVILTALFLRVKFSRSADAPAYQQGQNQLYNELNLGRREEYDVLDKRRGRDPEMGGKPQRRKNPQEGLYNELQKDKMAEAYSEIGMKGERRRGKGHDGLYQGLSTATKDTYDALHMQALPPRRAKRSGSGATNFSLLKQAGDVEENPGPTSMDWIWRILFLVGAATGAHSFEEVQLVESGGGLVQPGESLRLSCVASGFTFSRYKMNWVRQAPGKGLEWVSYISRSGRDIYYADSVKGRFTISRDNAKNSLYLQMNSLRDEDTAVYYCAGTVTTYYYFGMDVWGHGTTVTVSSTRIQNPDPAVYQLRDSKSSDKSVCLFTDFDSQTNVSQSKDSDVYITDKTVLDMRSMDFKSNSAVAWSNKSDFACANAFNNSIIPEDTFFPSPESSCGTQSFGLLDPKLCYLLDGILFIYGVILTALFLRVKFSRSADAPAYQQGQNQLYNELNLGRREEYDVLDKRRGRDPEMGGKPQRRKNPQEGLYNELQKDKMAEAYSEIGMKGERRRGKGHDGLYQGLSTATKDTYDALHMQALPPR

SEQ ID NO: 12927 - protein, 953 aa, Artificial Sequence
  Synthetic Polypeptide
MALPVTALLLPLALLLHAARPEVQLVESGGGLVQPGGSLRLSCAASGFSFSDFWMSWVRQAPGKGLEWVATISQAGSEKDYVDSVKGRFTISRDNAKKSLYLQMNSLRAEDTAVYYCASGVYSFDYRGQGTLVTVSSGTGGGGSGGGGSGGGGSEFDIQMTQSPSSLSASVGDRVTITCRASQGISSWLAWYQQKPEKAPKSLIYAASSLQSGVPSRFSGSGSGTDFTLTISSLQPEDFATYYCQQYNSYPPTFGGGTKVEIKLEDLKNVFPPEVAVFEPSEAEISHTQKATLVCLATGFYPDHVELSWWVNGKEVHSGVSTDPQPLKEQPALNDSRYCLSSRLRVSATFWQNPRNHFRCQVQFYGLSENDEWTQDRAKPVTQIVSAEAWGRADCGSQSFGLLDPKLCYLLDGILFIYGVILTALFLRVKFSRSADAPAYQQGQNQLYNELNLGRREEYDVLDKRRGRDPEMGGKPQRRKNPQEGLYNELQKDKMAEAYSEIGMKGERRRGKGHDGLYQGLSTATKDTYDALHMQALPPRRAKRSGSGATNFSLLKQAGDVEENPGPTSMDWIWRILFLVGAATGAHSFEEVQLVESGGGSVQPGESLRLSCVASGFTFSRYKMNWVRQAPGKGLEWVSYISRSGRDIYYADSVKGRFTISRDNAKNSLYLQMNSLRDEDTAVYYCAGTVTTYYYDFGMDVWGQGTTVTVSSTRIQNPDPAVYQLRDSKSSDKSVCLFTDFDSQTNVSQSKDSDVYITDKTVLDMRSMDFKSNSAVAWSNKSDFACANAFNNSIIPEDTFFPSPESSCGTQSFGLLDPKLCYLLDGILFIYGVILTALFLRVKFSRSADAPAYQQGQNQLYNELNLGRREEYDVLDKRRGRDPEMGGKPQRRKNPQEGLYNELQKDKMAEAYSEIGMKGERRRGKGHDGLYQGLSTATKDTYDALHMQALPPR

SEQ ID NO: 12928 - protein, 951 aa, Artificial Sequence
  Synthetic Polypeptide
MALPVTALLLPLALLLHAARPEVQLVESGGGLVQPGGSLRLSCAASGFSFSDFWMSWVRQAPGKGLEWVATISQAGSEKDYVDSVKGRFTISRDNAKKSLYLQMNSLRAEDTAVYYCASGVYSFDYRGQGTLVTVSSGTGGGGSGGGGSGGGGSEFQSVLTQPPSASGTPGQRVTISCSGSRSNVGGNYVFWYQQVPGATPKLLIYRSNQRPSGVPDRFAGSKSGSSASLAISGLRSEDEADYYCATWDDSLSGFVFGTGTKVTVLGLEDLKNVFPPEVAVFEPSEAEISHTQKATLVCLATGFYPDHVELSWWVNGKEVHSGVSTDPQPLKEQPALNDSRYCLSSRLRVSATFWQNPRNHFRCQVQFYGLSENDEWTQDRAKPVTQIVSAEAWGRADCGSQSFGLLDPKLCYLLDGILFIYGVILTALFLRVKFSRSADAPAYQQGQNQLYNELNLGRREEYDVLDKRRGRDPEMGGKPQRRKNPQEGLYNELQKDKMAEAYSEIGMKGERRRGKGHDGLYQGLSTATKDTYDALHMQALPPRRAKRSGSGATNFSLLKQAGDVEENPGPTSMDWIWRILFLVGAATGAHSFEVQLVESGGGLVKPGGSLRLSCAASGFTFSDYYMSWIRQAPGKGLEWVSYISSSGSTIYYADSVKGRFTISRDNAKNSLYLQMNSLRAEDTAVYYCARGYGKAYDQWGQGTLVTVSSTRIQNPDPAVYQLRDSKSSDKSVCLFTDFDSQTNVSQSKDSDVYITDKTVLDMRSMDFKSNSAVAWSNKSDFACANAFNNSIIPEDTFFPSPESSCGTQSFGLLDPKLCYLLDGILFIYGVILTALFLRVKFSRSADAPAYQQGQNQLYNELNLGRREEYDVLDKRRGRDPEMGGKPQRRKNPQEGLYNELQKDKMAEAYSEIGMKGERRRGKGHDGLYQGLSTATKDTYDALHMQALPPR

SEQ ID NO: 12929 - protein, 950 aa, Artificial Sequence
  Synthetic Polypeptide
MALPVTALLLPLALLLHAARPEVQLVESGGGLVQPGGSLRLSCAASGFSFSDFWMSWVRQAPGKGLEWVATISQAGSEKDYVDSVKGRFTISRDNAKKSLYLQMNSLRAEDTAVYYCASGVYSFDYRGQGTLVTVSSGTGGGGSGGGGSGGGGSEFQSVVTQPPSMSAAPGQQVTISCSGGNSNIERNYVSWYLQLPGTAPKLVIFDNDRRPSGIPDRFSGSKSGTSATLGITGLQTGDEADYYCGTWDSSLRGWVFGGGTKLTVLGLEDLKNVFPPEVAVFEPSEAEISHTQKATLVCLATGFYPDHVELSWWVNGKEVHSGVSTDPQPLKEQPALNDSRYCLSSRLRVSATFWQNPRNHFRCQVQFYGLSENDEWTQDRAKPVTQIVSAEAWGRADCGSQSFGLLDPKLCYLLDGILFIYGVILTALFLRVKFSRSADAPAYQQGQNQLYNELNLGRREEYDVLDKRRGRDPEMGGKPQRRKNPQEGLYNELQKDKMAEAYSEIGMKGERRRGKGHDGLYQGLSTATKDTYDALHMQALPPRRAKRSGSGATNFSLLKQAGDVEENPGPTSMDWIWRILFLVGAATGAHSFEVQLVESGGGLIQPGGSLRLSCAASGFTFSNYAMNWVRQAPGKGLEWVSTINGRGSSTIYADSVKGRFTISRDNSKNTLYLQMNSLRAEDTATYYCARYISRGLGDSWGQGTLVTVTRIQNPDPAVYQLRDSKSSDKSVCLFTDFDSQTNVSQSKDSDVYITDKTVLDMRSMDFKSNSAVAWSNKSDFACANAFNNSIIPEDTFFPSPESSCGTQSFGLLDPKLCYLLDGILFIYGVILTALFLRVKFSRSADAPAYQQGQNQLYNELNLGRREEYDVLDKRRGRDPEMGGKPQRRKNPQEGLYNELQKDKMAEAYSEIGMKGERRRGKGHDGLYQGLSTATKDTYDALHMQALPPR

SEQ ID NO: 12930 - protein, 951 aa, Artificial Sequence
  Synthetic Polypeptide
MALPVTALLLPLALLLHAARPEVQLVESGGGLVQPGGSLRLSCAASGFSFSDFWMSWVRQAPGKGLEWVATISQAGSEKDYVDSVKGRFTISRDNAKKSLYLQMNSLRAEDTAVYYCASGVYSFDYRGQGTLVTVSSGTGGGGSGGGGSGGGGSEFDVVMTQTPLSLPVSLGDQASISCRSSQSLVHSNGNTYLHWYLQKPGQSPKLLIYKVSNRFSGVPDRFSGSGSGTDFTLKISRVEAEDLGVYFCSQNTPVPPKFGSGTKLEIKLEDLKNVFPPEVAVFEPSEAEISHTQKATLVCLATGFYPDHVELSWWVNGKEVHSGVSTDPQPLKEQPALNDSRYCLSSRLRVSATFWQNPRNHFRCQVQFYGLSENDEWTQDRAKPVTQIVSAEAWGRADCGSQSFGLLDPKLCYLLDGILFIYGVILTALFLRVKFSRSADAPAYQQGQNQLYNELNLGRREEYDVLDKRRGRDPEMGGKPQRRKNPQEGLYNELQKDKMAEAYSEIGMKGERRRGKGHDGLYQGLSTATKDTYDALHMQALPPRRAKRSGSGATNFSLLKQAGDVEENPGPTSMDWIWRILFLVGAATGAHSFEQVQLQQSGAELVRPGASVKLSCKASGYTFNDYEMHWVKQTPVHGLKWIGALEPKTGDTAYSQKFKGKATLTADKSSSTAYMELRSLTSEDSAVYYCTSCYYYTYSGQGTLVTVSATRIQNPDPAVYQLRDSKSSDKSVCLFTDFDSQTNVSQSKDSDVYITDKTVLDMRSMDFKSNSAVAWSNKSDFACANAFNNSIIPEDTFFPSPESSCGTQSFGLLDPKLCYLLDGILFIYGVILTALFLRVKFSRSADAPAYQQGQNQLYNELNLGRREEYDVLDKRRGRDPEMGGKPQRRKNPQEGLYNELQKDKMAEAYSEIGMKGERRRGKGHDGLYQGLSTATKDTYDALHMQALPPR

SEQ ID NO: 12931 - protein, 950 aa, Artificial Sequence
  Synthetic Polypeptide
MALPVTALLLPLALLLHAARPEVQLVESGGGLVQPGGSLRLSCAASGFSFSDFWMSWVRQAPGKGLEWVATISQAGSEKDYVDSVKGRFTISRDNAKKSLYLQMNSLRAEDTAVYYCASGVYSFDYRGQGTLVTVSSGTGGGGSGGGGSGGGGSEFDIQLTQSPSSLSASVGDRVTITCRASQGIRNDLGWYQQKPGKAPKRLIYAASSLQNGVPSRFSGSGSGTEFTLTISSLQPEDFATYYCLQHNTYPAFGQGTKVEIKRLEDLKNVFPPEVAVFEPSEAEISHTQKATLVCLATGFYPDHVELSWWVNGKEVHSGVSTDPQPLKEQPALNDSRYCLSSRLRVSATFWQNPRNHFRCQVQFYGLSENDEWTQDRAKPVTQIVSAEAWGRADCGSQSFGLLDPKLCYLLDGILFIYGVILTALFLRVKFSRSADAPAYQQGQNQLYNELNLGRREEYDVLDKRRGRDPEMGGKPQRRKNPQEGLYNELQKDKMAEAYSEIGMKGERRRGKGHDGLYQGLSTATKDTYDALHMQALPPRRAKRSGSGATNFSLLKQAGDVEENPGPTSMDWIWRILFLVGAATGAHSFEQVQLQESGPGLVKPSQTLSLTCTVSGGSISSFNYYWSWIRHHPGKGLEWIGYIYYSGSTYSNPSLKSRVTISVDTSKNQFSLTLSSVTAADTAVYYCARGYNWNYFDYWGQGTLVTVSSTRIQNPDPAVYQLRDSKSSDKSVCLFTDFDSQTNVSQSKDSDVYITDKTVLDMRSMDFKSNSAVAWSNKSDFACANAFNNSIIPEDTFFPSPESSCGTQSFGLLDPKLCYLLDGILFIYGVILTALFLRVKFSRSADAPAYQQGQNQLYNELNLGRREEYDVLDKRRGRDPEMGGKPQRRKNPQEGLYNELQKDKMAEAYSEIGMKGERRRGKGHDGLYQGLSTATKDTYDALHMQALPPR

SEQ ID NO: 12932 - protein, 952 aa, Artificial Sequence
  Synthetic Polypeptide
MALPVTALLLPLALLLHAARPEVQLVESGGGLVQPGGSLRLSCAASGFSFSDFWMSWVRQAPGKGLEWVATISQAGSEKDYVDSVKGRFTISRDNAKKSLYLQMNSLRAEDTAVYYCASGVYSFDYRGQGTLVTVSSGTGGGGSGGGGSGGGGSEFDDIVLTQSPASLAVSLGQSVTISCRASESVEYYGTSLMQWYQQKPGQPPKLLIYATSNVESGVPARFSGSGSGTDFSLNIHPVEEDDIAMYFCQQSRKLPSTFGGGTKLEIKLEDLKNVFPPEVAVFEPSEAEISHTQKATLVCLATGFYPDHVELSWWVNGKEVHSGVSTDPQPLKEQPALNDSRYCLSSRLRVSATFWQNPRNHFRCQVQFYGLSENDEWTQDRAKPVTQIVSAEAWGRADCGSQSFGLLDPKLCYLLDGILFIYGVILTALFLRVKFSRSADAPAYQQGQNQLYNELNLGRREEYDVLDKRRGRDPEMGGKPQRRKNPQEGLYNELQKDKMAEAYSEIGMKGERRRGKGHDGLYQGLSTATKDTYDALHMQALPPRRAKRSGSGATNFSLLKQAGDVEENPGPTSMDWIWRILFLVGAATGAHSFEDVRLQESGPGQVKPSQTVSLTCSVTGYSITNGNHWWNWIRQVSGSKLEWIGYISSSGSTDSNPSLKSRISITRDTSKNQLFLQLNSVTTEDIATYYCARGYYFDYWGQGTTLTVSSTRIQNPDPAVYQLRDSKSSDKSVCLFTDFDSQTNVSQSKDSDVYITDKTVLDMRSMDFKSNSAVAWSNKSDFACANAFNNSIIPEDTFFPSPESSCGTQSFGLLDPKLCYLLDGILFIYGVILTALFLRVKFSRSADAPAYQQGQNQLYNELNLGRREEYDVLDKRRGRDPEMGGKPQRRKNPQEGLYNELQKDKMAEAYSEIGMKGERRRGKGHDGLYQGLSTATKDTYDALHMQALPPR

SEQ ID NO: 12933 - protein, 951 aa, Artificial Sequence
  Synthetic Polypeptide
MALPVTALLLPLALLLHAARPEVQLVESGGGLVQPGGSLRLSCAASGFSFSDFWMSWVRQAPGKGLEWVATISQAGSEKDYVDSVKGRFTISRDNAKKSLYLQMNSLRAEDTAVYYCASGVYSFDYRGQGTLVTVSSGTGGGGSGGGGSGGGGSEFDIQMTQSPSSLSASVGDRVTITCRASQDVNTAVAWYQQKPGKAPKLLIYSASFLESGVPSRFSGSRSGTDFTLTISSLQPEDFATYYCQQHYTTPPTFGQTKVEIKRLEDLKNVFPPEVAVFEPSEAEISHTQKATLVCLATGFYPDHVELSWWVNGKEVHSGVSTDPQPLKEQPALNDSRYCLSSRLRVSATFWQNPRNHFRCQVQFYGLSENDEWTQDRAKPVTQIVSAEAWGRADCGSQSFGLLDPKLCYLLDGILFIYGVILTALFLRVKFSRSADAPAYQQGQNQLYNELNLGRREEYDVLDKRRGRDPEMGGKPQRRKNPQEGLYNELQKDKMAEAYSEIGMKGERRRGKGHDGLYQGLSTATKDTYDALHMQALPPRRAKRSGSGATNFSLLKQAGDVEENPGPTSMDWIWRILFLVGAATGAHSFEEVQLVESGGGLVQPGGSLRLSCAASGFNIKDTYIHWVRQAPGKGLEWVARIYPTNGYTRYADSVKGRFTISADTSKNTAYLQMNSLRAEDTAVYYCSRWGGDGFYAMDVWGQGTLVTVSSTRIQNPDPAVYQLRDSKSSDKSVCLFTDFDSQTNVSQSKDSDVYITDKTVLDMRSMDFKSNSAVAWSNKSDFACANAFNNSIIPEDTFFPSPESSCGTQSFGLLDPKLCYLLDGILFIYGVILTALFLRVKFSRSADAPAYQQGQNQLYNELNLGRREEYDVLDKRRGRDPEMGGKPQRRKNPQEGLYNELQKDKMAEAYSEIGMKGERRRGKGHDGLYQGLSTATKDTYDALHMQALPPR

SEQ ID NO: 12934 - protein, 950 aa, Artificial Sequence
  Synthetic Polypeptide
MALPVTALLLPLALLLHAARPEVQLVESGGGLVQPGGSLRLSCAASGFSFSDFWMSWVRQAPGKGLEWVATISQAGSEKDYVDSVKGRFTISRDNAKKSLYLQMNSLRAEDTAVYYCASGVYSFDYRGQGTLVTVSSGTGGGGSGGGGSGGGGSEFDQSVLTQPPSVSVAPGKTARIPCEGNYIGSSNVHWYQQKPGQAPVLVIHFDSDRPSGIPDRFSGSNSGNMATLTISRVEAGDEADYYCQVWENHGWVFGGGTKLTVLSLEDLKNVFPPEVAVFEPSEAEISHTQKATLVCLATGFYPDHVELSWWVNGKEVHSGVSTDPQPLKEQPALNDSRYCLSSRLRVSATFWQNPRNHFRCQVQFYGLSENDEWTQDRAKPVTQIVSAEAWGRADCGSQSFGLLDPKLCYLLDGILFIYGVILTALFLRVKFSRSADAPAYQQGQNQLYNELNLGRREEYDVLDKRRGRDPEMGGKPQRRKNPQEGLYNELQKDKMAEAYSEIGMKGERRRGKGHDGLYQGLSTATKDTYDALHMQALPPRRAKRSGSGATNFSLLKQAGDVEENPGPTSMDWIWRILFLVGAATGAHSFEEVQLVETGGGLVQPGESLRLSCAASGFTFSDYEMNWVRQAPGKGLEWVSYISSSGSTIYYADSVKGRFTIYRDNAKNSLYLQMNSLRAEDTALYYCARAWGVGPPDYWGQGTLVTVSSTRIQNPDPAVYQLRDSKSSDKSVCLFTDFDSQTNVSQSKDSDVYITDKTVLDMRSMDFKSNSAVAWSNKSDFACANAFNNSIIPEDTFFPSPESSCGTQSFGLLDPKLCYLLDGILFIYGVILTALFLRVKFSRSADAPAYQQGQNQLYNELNLGRREEYDVLDKRRGRDPEMGGKPQRRKNPQEGLYNELQKDKMAEAYSEIGMKGERRRGKGHDGLYQGLSTATKDTYDALHMQALPPR

SEQ ID NO: 12935 - protein, 958 aa, Artificial Sequence
  Synthetic Polypeptide
MALPVTALLLPLALLLHAARPEVQLVESGGGLVQPGGSLRLSCAASGFSFSDFWMSWVRQAPGKGLEWVATISQAGSEKDYVDSVKGRFTISRDNAKKSLYLQMNSLRAEDTAVYYCASGVYSFDYRGQGTLVTVSSGTGGGGSGGGGSGGGGSEFDIQMTQSPSSLSASVGDTVTITCQANGYLNWYQQRRGKAPKLLIYDGSKLERGVPSRFSGRRWGQEYNLTINNLQPEDIATYFCQVYEFVVPGTRLDLKRTVAAPLEDLKNVFPPEVAVFEPSEAEISHTQKATLVCLATGFYPDHVELSWWVNGKEVHSGVSTDPQPLKEQPALNDSRYCLSSRLRVSATFWQNPRNHFRCQVQFYGLSENDEWTQDRAKPVTQIVSAEAWGRADCGSQSFGLLDPKLCYLLDGILFIYGVILTALFLRVKFSRSADAPAYQQGQNQLYNELNLGRREEYDVLDKRRGRDPEMGGKPQRRKNPQEGLYNELQKDKMAEAYSEIGMKGERRRGKGHDGLYQGLSTATKDTYDALHMQALPPRRAKRSGSGATNFSLLKQAGDVEENPGPTSMDWIWRILFLVGAATGAHSFEQVQLLQSGAAVTKPGASVRVSCEASGYNIRDYFIHWWRQAPGQGLQWVGWINPKTGQPNNPRQFQGRVSLTRHASWDFDTFSFYMDLKALRSDDTAVYFCARQRSDYWDFDVWGSGTQVTVSSASTKGPTRIQNPDPAVYQLRDSKSSDKSVCLFTDFDSQTNVSQSKDSDVYITDKTVLDMRSMDFKSNSAVAWSNKSDFACANAFNNSIIPEDTFFPSPESSCGTQSFGLLDPKLCYLLDGILFIYGVILTALFLRVKFSRSADAPAYQQGQNQLYNELNLGRREEYDVLDKRRGRDPEMGGKPQRRKNPQEGLYNELQKDKMAEAYSEIGMKGERRRGKGHDGLYQGLSTATKDTYDALHMQALPPR

SEQ ID NO: 12936 - protein, 964 aa, Artificial Sequence
  Synthetic Polypeptide
MALPVTALLLPLALLLHAARPEVQLVESGGGLVQPGGSLRLSCAASGFSFSDFWMSWVRQAPGKGLEWVATISQAGSEKDYVDSVKGRFTISRDNAKKSLYLQMNSLRAEDTAVYYCASGVYSFDYRGQGTLVTVSSGTGGGGSGGGGSGGGGSEFQSALTQPPSASGSPGQSITISCTGTSNNFVSWYQQHAGKAPKLVIYDVNKRPSGVPDRFSGSKSGNTASLTVSGLQTDDEAVYYCGSLVGNWDVIFGGGTKLTVLLEDLKNVFPPEVAVFEPSEAEISHTQKATLVCLATGFYPDHVELSWWVNGKEVHSGVSTDPQPLKEQPALNDSRYCLSSRLRVSATFWQNPRNHFRCQVQFYGLSENDEWTQDRAKPVTQIVSAEAWGRADCGSQSFGLLDPKLCYLLDGILFIYGVILTALFLRVKFSRSADAPAYQQGQNQLYNELNLGRREEYDVLDKRRGRDPEMGGKPQRRKNPQEGLYNELQKDKMAEAYSEIGMKGERRRGKGHDGLYQGLSTATKDTYDALHMQALPPRRAKRSGSGATNFSLLKQAGDVEENPGPTSMDWIWRILFLVGAATGAHSFEQPQLQESGPTLVEASETLSLTCAVSGDSTAACNSFWGWVRQPPGKGLEWVGSLSHCASYWNRGWTYHNPSLKSRLTLALDTPKNLVFLKLNSVTAADTATYYCARFGGEVLRYTDWPKPAWVDLWGRGTLVTVSSTRIQNPDPAVYQLRDSKSSDKSVCLFTDFDSQTNVSQSKDSDVYITDKTVLDMRSMDFKSNSAVAWSNKSDFACANAFNNSIIPEDTFFPSPESSCGTQSFGLLDPKLCYLLDGILFIYGVILTALFLRVKFSRSADAPAYQQGQNQLYNELNLGRREEYDVLDKRRGRDPEMGGKPQRRKNPQEGLYNELQKDKMAEAYSEIGMKGERRRGKGHDGLYQGLSTATKDTYDALHMQALPPR

SEQ ID NO: 12937 - protein, 949 aa, Artificial Sequence
  Synthetic Polypeptide
MALPVTALLLPLALLLHAARPEVQLVESGGGLVQPGGSLRLSCAASGFSFSDFWMSWVRQAPGKGLEWVATISQAGSEKDYVDSVKGRFTISRDNAKKSLYLQMNSLRAEDTAVYYCASGVYSFDYRGQGTLVTVSSGTGGGGSGGGGSGGGGSEFEIVLTQSPGTLSLSPGETAIISCRTSQYGSLAWYQQRPGQAPRLVIYSGSTRAAGIPDRFSGSRWGPDYNLTISNLESGDFGVYYCQQYEFFGQGTKVQVDIKRLEDLKNVFPPEVAVFEPSEAEISHTQKATLVCLATGFYPDHVELSWWVNGKEVHSGVSTDPQPLKEQPALNDSRYCLSSRLRVSATFWQNPRNHFRCQVQFYGLSENDEWTQDRAKPVTQIVSAEAWGRADCGSQSFGLLDPKLCYLLDGILFIYGVILTALFLRVKFSRSADAPAYQQGQNQLYNELNLGRREEYDVLDKRRGRDPEMGGKPQRRKNPQEGLYNELQKDKMAEAYSEIGMKGERRRGKGHDGLYQGLSTATKDTYDALHMQALPPRRAKRSGSGATNFSLLKQAGDVEENPGPTSMDWIWRILFLVGAATGAHSFEQVQLVQSGGQMKKPGESMRISCRASGYEFIDCTLNWIRLAPGKRPEWMGWLKPRGGAVNYARPLQGRVTMTRDVYSDTAFLELRSLTVDDTAVYFCTRGKNCDYNWDFEHWGRGTPVIVSSTRIQNPDPAVYQLRDSKSSDKSVCLFTDFDSQTNVSQSKDSDVYITDKTVLDMRSMDFKSNSAVAWSNKSDFACANAFNNSIIPEDTFFPSPESSCGTQSFGLLDPKLCYLLDGILFIYGVILTALFLRVKFSRSADAPAYQQGQNQLYNELNLGRREEYDVLDKRRGRDPEMGGKPQRRKNPQEGLYNELQKDKMAEAYSEIGMKGERRRGKGHDGLYQGLSTATKDTYDALHMQALPPR

SEQ ID NO: 12938 - protein, 959 aa, Artificial Sequence
  Synthetic Polypeptide
MALPVTALLLPLALLLHAARPEVQLVESGGGLVQPGGSLRLSCAASGFSFSDFWMSWVRQAPGKGLEWVATISQAGSEKDYVDSVKGRFTISRDNAKKSLYLQMNSLRAEDTAVYYCASGVYSFDYRGQGTLVTVSSGTGGGGSGGGGSGGGGSEFELVLTQSPGTLSLSAGERATLSCRASQSVSSGSLAWYQQKPGQAPRLLIYGASTRATGIPDRFSGSGSGTDFTLTIGRLEPEDLAVYYCQQYGTSPYTFGQGTKLEILEDLKNVFPPEVAVFEPSEAEISHTQKATLVCLATGFYPDHVELSWWVNGKEVHSGVSTDPQPLKEQPALNDSRYCLSSRLRVSATFWQNPRNHFRCQVQFYGLSENDEWTQDRAKPVTQIVSAEAWGRADCGSQSFGLLDPKLCYLLDGILFIYGVILTALFLRVKFSRSADAPAYQQGQNQLYNELNLGRREEYDVLDKRRGRDPEMGGKPQRRKNPQEGLYNELQKDKMAEAYSEIGMKGERRRGKGHDGLYQGLSTATKDTYDALHMQALPPRRAKRSGSGATNFSLLKQAGDVEENPGPTSMDWIWRILFLVGAATGAHSFELEQSGAEVKKPGSSVQVSCKASGGTFSMYGFNWVRQAPGHGLEWMGGIIPIFGTSNYAQKFRGRVTFTADQATSTAYMELTNLRSDDTAVYYCARDFGPDWEDGDSYDGSGRGFFDFWGQGTLVTVSSTRIQNPDPAVYQLRDSKSSDKSVCLFTDFDSQTNVSQSKDSDVYITDKTVLDMRSMDFKSNSAVAWSNKSDFACANAFNNSIIPEDTFFPSPESSCGTQSFGLLDPKLCYLLDGILFIYGVILTALFLRVKFSRSADAPAYQQGQNQLYNELNLGRREEYDVLDKRRGRDPEMGGKPQRRKNPQEGLYNELQKDKMAEAYSEIGMKGERRRGKGHDGLYQGLSTATKDTYDALHMQALPPR

SEQ ID NO: 12939 - protein, 939 aa, Artificial Sequence
  Synthetic Polypeptide
MALPVTALLLPLALLLHAARPEVQLVESGGGLVQPGGSLRLSCAASGFSFSDFWMSWVRQAPGKGLEWVATISQAGSEKDYVDSVKGRFTISRDNAKKSLYLQMNSLRAEDTAVYYCASGVYSFDYRGQGTLVTVSSGTGGGGSGGGGSGGGGSEFDIQMTQSPSSLSASVGDRVTITCQASQDINNYLNWYQQKPGKAPKLLIYDASNLQTGVPSRFSGSGSGTDFTFTIEDIATYYCQQYTFGPGTKVDIKLEDLKNVFPPEVAVFEPSEAEISHTQKATLVCLATGFYPDHVELSWWVNGKEVHSGVSTDPQPLKEQPALNDSRYCLSSRLRVSATFWQNPRNHFRCQVQFYGLSENDEWTQDRAKPVTQIVSAEAWGRADCGSQSFGLLDPKLCYLLDGILFIYGVILTALFLRVKFSRSADAPAYQQGQNQLYNELNLGRREEYDVLDKRRGRDPEMGGKPQRRKNPQEGLYNELQKDKMAEAYSEIGMKGERRRGKGHDGLYQGLSTATKDTYDALHMQALPPRRAKRSGSGATNFSLLKQAGDVEENPGPTSMDWIWRILFLVGAATGAHSFEEVQLLESGGGLVQPGGSLRLSCAASGFTFSWYSMTWVRQAPGKGLEWVSSIVPWGDFTQYADSVKGRFTISRDNSKNTLYLQMNSLRAEDTAVYYCAKGPGWGSFDLWGRGTLVTVSSTRIQNPDPAVYQLRDSKSSDKSVCLFTDFDSQTNVSQSKDSDVYITDKTVLDMRSMDFKSNSAVAWSNKSDFACANAFNNSIIPEDTFFPSPESSCGTQSFGLLDPKLCYLLDGILFIYGVILTALFLRVKFSRSADAPAYQQGQNQLYNELNLGRREEYDVLDKRRGRDPEMGGKPQRRKNPQEGLYNELQKDKMAEAYSEIGMKGERRRGKGHDGLYQGLSTATKDTYDALHMQALPPR

SEQ ID NO: 12940 - protein, 949 aa, Artificial Sequence
  Synthetic Polypeptide
MALPVTALLLPLALLLHAARPEVQLVESGGGLVQPGGSLRLSCAASGFSFSDFWMSWVRQAPGKGLEWVATISQAGSEKDYVDSVKGRFTISRDNAKKSLYLQMNSLRAEDTAVYYCASGVYSFDYRGQGTLVTVSSGTGGGGSGGGGSGGGGSEFDIQMTQSPSSLSASVGDRVTITCTASLSVSSTYLHWYQQKPGSSPKLWIYSTSNLASGVPSRFSGSGSGTSYTLTISSLQPEDFATYYCHQYHRSPLTFGGGTKVEIKRLEDLKNVFPPEVAVFEPSEAEISHTQKATLVCLATGFYPDHVELSWWVNGKEVHSGVSTDPQPLKEQPALNDSRYCLSSRLRVSATFWQNPRNHFRCQVQFYGLSENDEWTQDRAKPVTQIVSAEAWGRADCGSQSFGLLDPKLCYLLDGILFIYGVILTALFLRVKFSRSADAPAYQQGQNQLYNELNLGRREEYDVLDKRRGRDPEMGGKPQRRKNPQEGLYNELQKDKMAEAYSEIGMKGERRRGKGHDGLYQGLSTATKDTYDALHMQALPPRRAKRSGSGATNFSLLKQAGDVEENPGPTSMDWIWRILFLVGAATGAHSFEEVQLVESGGGLVQPGGSLRLSCAASGFSLTKYGVHWVRQAPGKGLEWVGVKWAGGSTDYNSALMSRFTISKDNAKNSLYLQMNSLRAEDTAVYYCARDHRDAMDYWGQGTLVTVSSTRIQNPDPAVYQLRDSKSSDKSVCLFTDFDSQTNVSQSKDSDVYITDKTVLDMRSMDFKSNSAVAWSNKSDFACANAFNNSIIPEDTFFPSPESSCGTQSFGLLDPKLCYLLDGILFIYGVILTALFLRVKFSRSADAPAYQQGQNQLYNELNLGRREEYDVLDKRRGRDPEMGGKPQRRKNPQEGLYNELQKDKMAEAYSEIGMKGERRRGKGHDGLYQGLSTATKDTYDALHMQALPPR

SEQ ID NO: 12941 - protein, 953 aa, Artificial Sequence
  Synthetic Polypeptide
MALPVTALLLPLALLLHAARPEVQLVESGGGLVQPGGSLRLSCAASGFSFSDFWMSWVRQAPGKGLEWVATISQAGSEKDYVDSVKGRFTISRDNAKKSLYLQMNSLRAEDTAVYYCASGVYSFDYRGQGTLVTVSSGTGGGGSGGGGSGGGGSEFDIQMTQSPSSLSASVGDRVTITCKASQDVGTAVAWYQQKPGKAPKLLIYSASYRSTGVPSRFSGSGSGTDFTLTISSLQPEDFATYYCQHHYSAPWTFGGGTKVEIKLEDLKNVFPPEVAVFEPSEAEISHTQKATLVCLATGFYPDHVELSWWVNGKEVHSGVSTDPQPLKEQPALNDSRYCLSSRLRVSATFWQNPRNHFRCQVQFYGLSENDEWTQDRAKPVTQIVSAEAWGRADCGSQSFGLLDPKLCYLLDGILFIYGVILTALFLRVKFSRSADAPAYQQGQNQLYNELNLGRREEYDVLDKRRGRDPEMGGKPQRRKNPQEGLYNELQKDKMAEAYSEIGMKGERRRGKGHDGLYQGLSTATKDTYDALHMQALPPRRAKRSGSGATNFSLLKQAGDVEENPGPTSMDWIWRILFLVGAATGAHSFEEVQLVESGGGLVQPGGSLRLSCAASGFTFSRNGMSWVRQAPGKGLEWVATVSSGGSYIYYADSVKGRFTISRDNAKNSLYLQMNSLRAEDTAVYYCARQGTTALATRFFDVWGQGTLVTVSSTRIQNPDPAVYQLRDSKSSDKSVCLFTDFDSQTNVSQSKDSDVYITDKTVLDMRSMDFKSNSAVAWSNKSDFACANAFNNSIIPEDTFFPSPESSCGTQSFGLLDPKLCYLLDGILFIYGVILTALFLRVKFSRSADAPAYQQGQNQLYNELNLGRREEYDVLDKRRGRDPEMGGKPQRRKNPQEGLYNELQKDKMAEAYSEIGMKGERRRGKGHDGLYQGLSTATKDTYDALHMQALPPR

SEQ ID NO: 12942 - protein, 949 aa, Artificial Sequence
  Synthetic Polypeptide
MALPVTALLLPLALLLHAARPEVQLVESGGGLVQPGGSLRLSCAASGFSFSDFWMSWVRQAPGKGLEWVATISQAGSEKDYVDSVKGRFTISRDNAKKSLYLQMNSLRAEDTAVYYCASGVYSFDYRGQGTLVTVSSGTGGGGSGGGGSGGGGSEFDIQMTQSPPSLSASVGGKVTITCKASQDIDRYMAWYQDKPGKGPKLLIHDTSTLQPGIPSRFSGSGSGRDYSFSISNLEPEDIATYYCLQYDNLWTFGGGTKLEIKRLEDLKNVFPPEVAVFEPSEAEISHTQKATLVCLATGFYPDHVELSWWVNGKEVHSGVSTDPQPLKEQPALNDSRYCLSSRLRVSATFWQNPRNHFRCQVQFYGLSENDEWTQDRAKPVTQIVSAEAWGRADCGSQSFGLLDPKLCYLLDGILFIYGVILTALFLRVKFSRSADAPAYQQGQNQLYNELNLGRREEYDVLDKRRGRDPEMGGKPQRRKNPQEGLYNELQKDKMAEAYSEIGMKGERRRGKGHDGLYQGLSTATKDTYDALHMQALPPRRAKRSGSGATNFSLLKQAGDVEENPGPTSMDWIWRILFLVGAATGAHSFEQVQLVQSGAELVKPGASVKMSCKASGYIFTNYNIHWVKKSPGQGLEWIGAIYPGNGDAPYSQKFQDRATLTADTSSSTTYMELSSLTSEDSAVYYCVRANWDVAFAYWGQGTLVSVSSTRIQNPDPAVYQLRDSKSSDKSVCLFTDFDSQTNVSQSKDSDVYITDKTVLDMRSMDFKSNSAVAWSNKSDFACANAFNNSIIPEDTFFPSPESSCGTQSFGLLDPKLCYLLDGILFIYGVILTALFLRVKFSRSADAPAYQQGQNQLYNELNLGRREEYDVLDKRRGRDPEMGGKPQRRKNPQEGLYNELQKDKMAEAYSEIGMKGERRRGKGHDGLYQGLSTATKDTYDALHMQALPPR

SEQ ID NO: 12943 - protein, 950 aa, Artificial Sequence
  Synthetic Polypeptide
MALPVTALLLPLALLLHAARPEVQLVESGGGLVQPGGSLRLSCAASGFSFSDFWMSWVRQAPGKGLEWVATISQAGSEKDYVDSVKGRFTISRDNAKKSLYLQMNSLRAEDTAVYYCASGVYSFDYRGQGTLVTVSSGTGGGGSGGGGSGGGGSEFDIQMTQSPASLSASVGETVTITCRVSGNIHNYLAWYQQKQGKSPQLLVYNAKTLADGVPSRFSGSGSGTQYSLKINSLQPEDFGSYYCQHFWSNPYTFGGGTKLEIKLEDLKNVFPPEVAVFEPSEAEISHTQKATLVCLATGFYPDHVELSWWVNGKEVHSGVSTDPQPLKEQPALNDSRYCLSSRLRVSATFWQNPRNHFRCQVQFYGLSENDEWTQDRAKPVTQIVSAEAWGRADCGSQSFGLLDPKLCYLLDGILFIYGVILTALFLRVKFSRSADAPAYQQGQNQLYNELNLGRREEYDVLDKRRGRDPEMGGKPQRRKNPQEGLYNELQKDKMAEAYSEIGMKGERRRGKGHDGLYQGLSTATKDTYDALHMQALPPRRAKRSGSGATNFSLLKQAGDVEENPGPTSMDWIWRILFLVGAATGAHSFEQVQLQQSGASVKVSCKASELVRPGTGYAFTNYLIEWVKQRPGQGLEWIGVINPGSGGTNYNEKFKGKATLTADKSSSTAYMQLSSLTSDDSAVYFCARYRSYDWYFDVWGAGTTVTVSSTRIQNPDPAVYQLRDSKSSDKSVCLFTDFDSQTNVSQSKDSDVYITDKTVLDMRSMDFKSNSAVAWSNKSDFACANAFNNSIIPEDTFFPSPESSCGTQSFGLLDPKLCYLLDGILFIYGVILTALFLRVKFSRSADAPAYQQGQNQLYNELNLGRREEYDVLDKRRGRDPEMGGKPQRRKNPQEGLYNELQKDKMAEAYSEIGMKGERRRGKGHDGLYQGLSTATKDTYDALHMQALPPR

SEQ ID NO: 12944 - protein, 949 aa, Artificial Sequence
  Synthetic Polypeptide
MALPVTALLLPLALLLHAARPEVQLVESGGGLVQPGGSLRLSCAASGFSFSDFWMSWVRQAPGKGLEWVATISQAGSEKDYVDSVKGRFTISRDNAKKSLYLQMNSLRAEDTAVYYCASGVYSFDYRGQGTLVTVSSGTGGGGSGGGGSGGGGSEFDIQMTQSFSSLSASVGDRVTITCRASQDISNYLNWYQQKPGKAPKLLIYYTSRLHSGVPSRFSGSGSGTDYTLTISSLQPEDFATYFCQQGNTLPWTFGGGTKLEIKRLEDLKNVFPPEVAVFEPSEAEISHTQKATLVCLATGFYPDHVELSWWVNGKEVHSGVSTDPQPLKEQPALNDSRYCLSSRLRVSATFWQNPRNHFRCQVQFYGLSENDEWTQDRAKPVTQIVSAEAWGRADCGSQSFGLLDPKLCYLLDGILFIYGVILTALFLRVKFSRSADAPAYQQGQNQLYNELNLGRREEYDVLDKRRGRDPEMGGKPQRRKNPQEGLYNELQKDKMAEAYSEIGMKGERRRGKGHDGLYQGLSTATKDTYDALHMQALPPRRAKRSGSGATNFSLLKQAGDVEENPGPTSMDWIWRILFLVGAATGAHSFEEVQLVQSGGGLVQSGGSLRLSCRASGYTFTRYWMLWVRQRPGKGLEWVAEINPRNDRTNYNEKFKTRFTISVDRSKNTLYLQMDSLRAEDTAVYFCALGGGYAMDYWGQGTLVTVSSTRIQNPDPAVYQLRDSKSSDKSVCLFTDFDSQTNVSQSKDSDVYITDKTVLDMRSMDFKSNSAVAWSNKSDFACANAFNNSIIPEDTFFPSPESSCGTQSFGLLDPKLCYLLDGILFIYGVILTALFLRVKFSRSADAPAYQQGQNQLYNELNLGRREEYDVLDKRRGRDPEMGGKPQRRKNPQEGLYNELQKDKMAEAYSEIGMKGERRRGKGHDGLYQGLSTATKDTYDALHMQALPPR

SEQ ID NO: 12945 - protein, 950 aa, Artificial Sequence
  Synthetic Polypeptide
MALPVTALLLPLALLLHAARPEVQLVESGGGLVQPGGSLRLSCAASGFSFSDFWMSWVRQAPGKGLEWVATISQAGSEKDYVDSVKGRFTISRDNAKKSLYLQMNSLRAEDTAVYYCASGVYSFDYRGQGTLVTVSSGTGGGGSGGGGSGGGGSEFDIQMTQSPASLSASVGETVTIICRASVNIYSYLAWYQQKQGKSPQLLVYNAKILAEGVPSRFSGSGSGTQFSLKINSLQPEDFGSYYCQHHYGTFTFGSGTKLEIKRLEDLKNVFPPEVAVFEPSEAEISHTQKATLVCLATGFYPDHVELSWWVNGKEVHSGVSTDPQPLKEQPALNDSRYCLSSRLRVSATFWQNPRNHFRCQVQFYGLSENDEWTQDRAKPVTQIVSAEAWGRADCGSQSFGLLDPKLCYLLDGILFIYGVILTALFLRVKFSRSADAPAYQQGQNQLYNELNLGRREEYDVLDKRRGRDPEMGGKPQRRKNPQEGLYNELQKDKMAEAYSEIGMKGERRRGKGHDGLYQGLSTATKDTYDALHMQALPPRRAKRSGSGATNFSLLKQAGDVEENPGPTSMDWIWRILFLVGAATGAHSFEQVQLKESGPGLVAPSQSLSITCTISGFSLTSYGVHWVRQPPGKGLEWLVVIWSDGSTTYNSALKSRLSISKDNSKSQVFLKMNSLQTDDTAIYYCASHYGSTLAFASWGHGTLVTVSAATRIQNPDPAVYQLRDSKSSDKSVCLFTDFDSQTNVSQSKDSDVYITDKTVLDMRSMDFKSNSAVAWSNKSDFACANAFNNSIIPEDTFFPSPESSCGTQSFGLLDPKLCYLLDGILFIYGVILTALFLRVKFSRSADAPAYQQGQNQLYNELNLGRREEYDVLDKRRGRDPEMGGKPQRRKNPQEGLYNELQKDKMAEAYSEIGMKGERRRGKGHDGLYQGLSTATKDTYDALHMQALPPR

SEQ ID NO: 12946 - protein, 958 aa, Artificial Sequence
  Synthetic Polypeptide
MALPVTALLLPLALLLHAARPEVQLVESGGGLVQPGGSLRLSCAASGFSFSDFWMSWVRQAPGKGLEWVATISQAGSEKDYVDSVKGRFTISRDNAKKSLYLQMNSLRAEDTAVYYCASGVYSFDYRGQGTLVTVSSGTGGGGSGGGGSGGGGSEFDIVMTQSHKFMSTSVGDRVSVTCKASQNVGNNVAWYQQKPGQSPKVLIYSASYRYSGVPDRFTGSGSGTDFTLTISNVQSEDLAEYFCQQYNTYPFTFGSGTKLEIKLEDLKNVFPPEVAVFEPSEAEISHTQKATLVCLATGFYPDHVELSWWVNGKEVHSGVSTDPQPLKEQPALNDSRYCLSSRLRVSATFWQNPRNHFRCQVQFYGLSENDEWTQDRAKPVTQIVSAEAWGRADCGSQSFGLLDPKLCYLLDGILFIYGVILTALFLRVKFSRSADAPAYQQGQNQLYNELNLGRREEYDVLDKRRGRDPEMGGKPQRRKNPQEGLYNELQKDKMAEAYSEIGMKGERRRGKGHDGLYQGLSTATKDTYDALHMQALPPRRAKRSGSGATNFSLLKQAGDVEENPGPTSMDWIWRILFLVGAATGAHSFEEVQLEESGGGLVQPGGSMKLSCVASGFTFSNYWMNWVRQSPEKGLEWVAEIRFKSHNYATHFAESVKGRFTISRDDSKSSVYLQMNNLRAEDTGIYYCTRRIGNSDYDWWYFDVWGAGTSVTVSSASTRIQNPDPAVYQLRDSKSSDKSVCLFTDFDSQTNVSQSKDSDVYITDKTVLDMRSMDFKSNSAVAWSNKSDFACANAFNNSIIPEDTFFPSPESSCGTQSFGLLDPKLCYLLDGILFIYGVILTALFLRVKFSRSADAPAYQQGQNQLYNELNLGRREEYDVLDKRRGRDPEMGGKPQRRKNPQEGLYNELQKDKMAEAYSEIGMKGERRRGKGHDGLYQGLSTATKDTYDALHMQALPPR

SEQ ID NO: 12947 - protein, 951 aa, Artificial Sequence
  Synthetic Polypeptide
MALPVTALLLPLALLLHAARPEVQLVESGGGLVQPGGSLRLSCAASGFSFSDFWMSWVRQAPGKGLEWVATISQAGSEKDYVDSVKGRFTISRDNAKKSLYLQMNSLRAEDTAVYYCASGVYSFDYRGQGTLVTVSSGTGGGGSGGGGSGGGGSEFDQIVLTQSPAIMSASPGEKVTISCSASSSVSYMYWYQQKPGSSPKPWIYRTSNLASGVPARFSGSGSGTSYSLTISNMEAEDAAAYYCQQYHSYPTTFGGGTKLEVKLEDLKNVFPPEVAVFEPSEAEISHTQKATLVCLATGFYPDHVELSWWVNGKEVHSGVSTDPQPLKEQPALNDSRYCLSSRLRVSATFWQNPRNHFRCQVQFYGLSENDEWTQDRAKPVTQIVSAEAWGRADCGSQSFGLLDPKLCYLLDGILFIYGVILTALFLRVKFSRSADAPAYQQGQNQLYNELNLGRREEYDVLDKRRGRDPEMGGKPQRRKNPQEGLYNELQKDKMAEAYSEIGMKGERRRGKGHDGLYQGLSTATKDTYDALHMQALPPRRAKRSGSGATNFSLLKQAGDVEENPGPTSMDWIWRILFLVGAATGAHSFEEVQLVESGGGLVQPKGSLKLSCAASGFSFNTYAMNWVRQAPGKGLEWIAHIRSKSNNFATYYADSVKDRFSISRDASENILFLQMNNLKTEDTAMYYCVRQGGDFPMDYWGQGTSVTVSSTRIQNPDPAVYQLRDSKSSDKSVCLFTDFDSQTNVSQSKDSDVYITDKTVLDMRSMDFKSNSAVAWSNKSDFACANAFNNSIIPEDTFFPSPESSCGTQSFGLLDPKLCYLLDGILFIYGVILTALFLRVKFSRSADAPAYQQGQNQLYNELNLGRREEYDVLDKRRGRDPEMGGKPQRRKNPQEGLYNELQKDKMAEAYSEIGMKGERRRGKGHDGLYQGLSTATKDTYDALHMQALPPR

SEQ ID NO: 12948 - protein, 950 aa, Artificial Sequence
  Synthetic Polypeptide
MALPVTALLLPLALLLHAARPEVQLVESGGGLVQPGGSLRLSCAASGFSFSDFWMSWVRQAPGKGLEWVATISQAGSEKDYVDSVKGRFTISRDNAKKSLYLQMNSLRAEDTAVYYCASGVYSFDYRGQGTLVTVSSGTGGGGSGGGGSGGGGSEFDDIQMTQSSSSFSVSLGDRVTITCMASEDIYIRLAWYQQKPGNAPRLLISAATSLETGVPSRFSGSGSGKDYTLSITSLQTEDVGTYYCQQYWSSPWTFGGGTKLEINLEDLKNVFPPEVAVFEPSEAEISHTQKATLVCLATGFYPDHVELSWWVNGKEVHSGVSTDPQPLKEQPALNDSRYCLSSRLRVSATFWQNPRNHFRCQVQFYGLSENDEWTQDRAKPVTQIVSAEAWGRADCGSQSFGLLDPKLCYLLDGILFIYGVILTALFLRVKFSRSADAPAYQQGQNQLYNELNLGRREEYDVLDKRRGRDPEMGGKPQRRKNPQEGLYNELQKDKMAEAYSEIGMKGERRRGKGHDGLYQGLSTATKDTYDALHMQALPPRRAKRSGSGATNFSLLKQAGDVEENPGPTSMDWIWRILFLVGAATGAHSFEDVQLQESGPGLVKPSQSLSLTCTVTGYSITSDYTWNWIRQFPGNKLEWMGYITYSGSTSYNPSLKSRNSITRDTSKNQFFLQLNSVTTEDTATYYCARLGRRYTMDYWGQGTSVTVSSTRIQNPDPAVYQLRDSKSSDKSVCLFTDFDSQTNVSQSKDSDVYITDKTVLDMRSMDFKSNSAVAWSNKSDFACANAFNNSIIPEDTFFPSPESSCGTQSFGLLDPKLCYLLDGILFIYGVILTALFLRVKFSRSADAPAYQQGQNQLYNELNLGRREEYDVLDKRRGRDPEMGGKPQRRKNPQEGLYNELQKDKMAEAYSEIGMKGERRRGKGHDGLYQGLSTATKDTYDALHMQALPPR

SEQ ID NO: 12949 - protein, 953 aa, Artificial Sequence
  Synthetic Polypeptide
MALPVTALLLPLALLLHAARPEVQLVESGGGLVQPGGSLRLSCAASGFSFSDFWMSWVRQAPGKGLEWVATISQAGSEKDYVDSVKGRFTISRDNAKKSLYLQMNSLRAEDTAVYYCASGVYSFDYRGQGTLVTVSSGTGGGGSGGGGSGGGGSEFDDIQMTQSPSSLSASVGDRVTITCRASQSISSYLNWYQQKPGKAPKLLIYDASNLETGVPSRFSGSGSGTDFTFTISSLQPEDIATYYCQQYDNLPLTFGGGTKVDIKRLEDLKNVFPPEVAVFEPSEAEISHTQKATLVCLATGFYPDHVELSWWVNGKEVHSGVSTDPQPLKEQPALNDSRYCLSSRLRVSATFWQNPRNHFRCQVQFYGLSENDEWTQDRAKPVTQIVSAEAWGRADCGSQSFGLLDPKLCYLLDGILFIYGVILTALFLRVKFSRSADAPAYQQGQNQLYNELNLGRREEYDVLDKRRGRDPEMGGKPQRRKNPQEGLYNELQKDKMAEAYSEIGMKGERRRGKGHDGLYQGLSTATKDTYDALHMQALPPRRAKRSGSGATNFSLLKQAGDVEENPGPTSMDWIWRILFLVGAATGAHSFEQVQLVESGGGVVQPGRSLRLSCAASGFTFSSYAMHWVRQAPGKGLEWVAVISYDGSNKYYADSVKGRFTISRDNSKNTLYLQMNSLRAEDTAVYYCARAHNSSSWSFDYWGQGTLVTVSSTRIQNPDPAVYQLRDSKSSDKSVCLFTDFDSQTNVSQSKDSDVYITDKTVLDMRSMDFKSNSAVAWSNKSDFACANAFNNSIIPEDTFFPSPESSCGTQSFGLLDPKLCYLLDGILFIYGVILTALFLRVKFSRSADAPAYQQGQNQLYNELNLGRREEYDVLDKRRGRDPEMGGKPQRRKNPQEGLYNELQKDKMAEAYSEIGMKGERRRGKGHDGLYQGLSTATKDTYDALHMQALPPR

SEQ ID NO: 12950 - protein, 962 aa, Artificial Sequence
  Synthetic Polypeptide
MALPVTALLLPLALLLHAARPEVQLVESGGGLVQPGGSLRLSCAASGFSFSDFWMSWVRQAPGKGLEWVATISQAGSEKDYVDSVKGRFTISRDNAKKSLYLQMNSLRAEDTAVYYCASGVYSFDYRGQGTLVTVSSGTGGGGSGGGGSGGGGSEFDDVVMTQSPLSLPVSLGDQASISCRSSQRLVHSNGNTYLHWYLQKPGQSPKLLIYRVSNRFPGVPDRFSGSGSGTDFTLKISRVEAEDLGIYFCSQSTHVPYTFGGGTKLEIKRLEDLKNVFPPEVAVFEPSEAEISHTQKATLVCLATGFYPDHVELSWWVNGKEVHSGVSTDPQPLKEQPALNDSRYCLSSRLRVSATFWQNPRNHFRCQVQFYGLSENDEWTQDRAKPVTQIVSAEAWGRADCGSQSFGLLDPKLCYLLDGILFIYGVILTALFLRVKFSRSADAPAYQQGQNQLYNELNLGRREEYDVLDKRRGRDPEMGGKPQRRKNPQEGLYNELQKDKMAEAYSEIGMKGERRRGKGHDGLYQGLSTATKDTYDALHMQALPPRRAKRSGSGATNFSLLKQAGDVEENPGPTSMDWIWRILFLVGAATGAHSFEEVRLQQSGPDLIKPGASVKMSCKASGYTFTGYVMHWVKQRPGQGLEWIGFINPYNDDIQSNERFRGKATLTSDKSSTTAYMELSSLTSEDSAVYYCARGAGYNFDGAYRFFDFWGQGTTLTVSSTRIQNPDPAVYQLRDSKSSDKSVCLFTDFDSQTNVSQSKDSDVYITDKTVLDMRSMDFKSNSAVAWSNKSDFACANAFNNSIIPEDTFFPSPESSCGTQSFGLLDPKLCYLLDGILFIYGVILTALFLRVKFSRSADAPAYQQGQNQLYNELNLGRREEYDVLDKRRGRDPEMGGKPQRRKNPQEGLYNELQKDKMAEAYSEIGMKGERRRGKGHDGLYQGLSTATKDTYDALHMQALPPR

SEQ ID NO: 12951 - protein, 953 aa, Artificial Sequence
  Synthetic Polypeptide
MALPVTALLLPLALLLHAARPEVQLVESGGGLVQPGGSLRLSCAASGFSFSDFWMSWVRQAPGKGLEWVATISQAGSEKDYVDSVKGRFTISRDNAKKSLYLQMNSLRAEDTAVYYCASGVYSFDYRGQGTLVTVSSGTGGGGSGGGGSGGGGSEFDSYELTQPPSVSVSPGQTATISCSGDQLGGKYGHWYQKKPGQSPVLVLYQDRKRPAGIPERFSGSSSGNTITLTISGTQAVDEADYYCQAWDTNLGGVFGGGTKVTVLGQLEDLKNVFPPEVAVFEPSEAEISHTQKATLVCLATGFYPDHVELSWWVNGKEVHSGVSTDPQPLKEQPALNDSRYCLSSRLRVSATFWQNPRNHFRCQVQFYGLSENDEWTQDRAKPVTQIVSAEAWGRADCGSQSFGLLDPKLCYLLDGILFIYGVILTALFLRVKFSRSADAPAYQQGQNQLYNELNLGRREEYDVLDKRRGRDPEMGGKPQRRKNPQEGLYNELQKDKMAEAYSEIGMKGERRRGKGHDGLYQGLSTATKDTYDALHMQALPPRRAKRSGSGATNFSLLKQAGDVEENPGPTSMDWIWRILFLVGAATGAHSFEQVQLVESGAEVKKPGASVKVSCKASGYTFTGYYMHWVRQAPGQGLEWMGRINPNSGGTNYAQKFQGRVTMTRDTSISTAYMELSRLRSDDTAVYYCASPRGRGSAFDIWGQGTLVTVSSTRIQNPDPAVYQLRDSKSSDKSVCLFTDFDSQTNVSQSKDSDVYITDKTVLDMRSMDFKSNSAVAWSNKSDFACANAFNNSIIPEDTFFPSPESSCGTQSFGLLDPKLCYLLDGILFIYGVILTALFLRVKFSRSADAPAYQQGQNQLYNELNLGRREEYDVLDKRRGRDPEMGGKPQRRKNPQEGLYNELQKDKMAEAYSEIGMKGERRRGKGHDGLYQGLSTATKDTYDALHMQALPPR

SEQ ID NO: 12952 - protein, 956 aa, Artificial Sequence
  Synthetic Polypeptide
MALPVTALLLPLALLLHAARPEVQLVESGGGLVQPGGSLRLSCAASGFSFSDFWMSWVRQAPGKGLEWVATISQAGSEKDYVDSVKGRFTISRDNAKKSLYLQMNSLRAEDTAVYYCASGVYSFDYRGQGTLVTVSSGTGGGGSGGGGSGGGGSEFDNFMLTQPHSVSESPGKTVTISCTRSSGSIASKYVQWYQQRPGSSPTTVIYEDNQRPSGVPDRFSGSIDTSSNSASLTISGLRTEDEADYYCHSYDSNNHSVFGGGTKVTVLGQLEDLKNVFPPEVAVFEPSEAEISHTQKATLVCLATGFYPDHVELSWWVNGKEVHSGVSTDPQPLKEQPALNDSRYCLSSRLRVSATFWQNPRNHFRCQVQFYGLSENDEWTQDRAKPVTQIVSAEAWGRADCGSQSFGLLDPKLCYLLDGILFIYGVILTALFLRVKFSRSADAPAYQQGQNQLYNELNLGRREEYDVLDKRRGRDPEMGGKPQRRKNPQEGLYNELQKDKMAEAYSEIGMKGERRRGKGHDGLYQGLSTATKDTYDALHMQALPPRRAKRSGSGATNFSLLKQAGDVEENPGPTSMDWIWRILFLVGAATGAHSFEEVQLVESGGGVVQPGGSLRLSCAASGFTFSSYAMSWVRQAPGKGLEWVSAISGSGGSTYYADSVKGRFSISRDNSKNTLYLQMNSLRAEDTAVYYCARTRSSGAFDIWGQGTLVTVSSTRIQNPDPAVYQLRDSKSSDKSVCLFTDFDSQTNVSQSKDSDVYITDKTVLDMRSMDFKSNSAVAWSNKSDFACANAFNNSIIPEDTFFPSPESSCGTQSFGLLDPKLCYLLDGILFIYGVILTALFLRVKFSRSADAPAYQQGQNQLYNELNLGRREEYDVLDKRRGRDPEMGGKPQRRKNPQEGLYNELQKDKMAEAYSEIGMKGERRRGKGHDGLYQGLSTATKDTYDALHMQALPPR

SEQ ID NO: 12953 - protein, 951 aa, Artificial Sequence
  Synthetic Polypeptide
MALPVTALLLPLALLLHAARPEVQLVESGGGLVQPGGSLRLSCAASGFSFSDFWMSWVRQAPGKGLEWVATISQAGSEKDYVDSVKGRFTISRDNAKKSLYLQMNSLRAEDTAVYYCASGVYSFDYRGQGTLVTVSSGTGGGGSGGGGSGGGGSEFDIQMNQSPSSLSASLGDTITITCHASQNINVWLSWYQQKPGNIPKLLIYKASNLHTGVPSRFSGSGSGTGFTITISSLQPEDIATYYCQQGQSYPWTFGGGTKLEIKRLEDLKNVFPPEVAVFEPSEAEISHTQKATLVCLATGFYPDHVELSWWVNGKEVHSGVSTDPQPLKEQPALNDSRYCLSSRLRVSATFWQNPRNHFRCQVQFYGLSENDEWTQDRAKPVTQIVSAEAWGRADCGSQSFGLLDPKLCYLLDGILFIYGVILTALFLRVKFSRSADAPAYQQGQNQLYNELNLGRREEYDVLDKRRGRDPEMGGKPQRRKNPQEGLYNELQKDKMAEAYSEIGMKGERRRGKGHDGLYQGLSTATKDTYDALHMQALPPRRAKRSGSGATNFSLLKQAGDVEENPGPTSMDWIWRILFLVGAATGAHSFEEVQLQQSGPELVKPGASVKISCKASGYSFTGYFMNWVKQSHGKSLEYIGRFNPYNGETLYNQKFKGKATLTVDKSSSTVHMELLSVTSEDSAVYYCGRSGNDDAMDYWGQGTSVTVSSATRIQNPDPAVYQLRDSKSSDKSVCLFTDFDSQTNVSQSKDSDVYITDKTVLDMRSMDFKSNSAVAWSNKSDFACANAFNNSIIPEDTFFPSPESSCGTQSFGLLDPKLCYLLDGILFIYGVILTALFLRVKFSRSADAPAYQQGQNQLYNELNLGRREEYDVLDKRRGRDPEMGGKPQRRKNPQEGLYNELQKDKMAEAYSEIGMKGERRRGKGHDGLYQGLSTATKDTYDALHMQALPPR

SEQ ID NO: 12954 - protein, 952 aa, Artificial Sequence
  Synthetic Polypeptide
MALPVTALLLPLALLLHAARPEVQLVESGGGLVQPGGSLRLSCAASGFSFSDFWMSWVRQAPGKGLEWVATISQAGSEKDYVDSVKGRFTISRDNAKKSLYLQMNSLRAEDTAVYYCASGVYSFDYRGQGTLVTVSSGTGGGGSGGGGSGGGGSEFEIVLTQSPATLSLSPGERATLSCRASQSVRSYLAWYQQKPGQAPRLLIYDASNRATGIPARFSGSGSGTDFTLTISSLEPEDFAVYYCQQRSNWPPTFGQGTKVEIKLEDLKNVFPPEVAVFEPSEAEISHTQKATLVCLATGFYPDHVELSWWVNGKEVHSGVSTDPQPLKEQPALNDSRYCLSSRLRVSATFWQNPRNHFRCQVQFYGLSENDEWTQDRAKPVTQIVSAEAWGRADCGSQSFGLLDPKLCYLLDGILFIYGVILTALFLRVKFSRSADAPAYQQGQNQLYNELNLGRREEYDVLDKRRGRDPEMGGKPQRRKNPQEGLYNELQKDKMAEAYSEIGMKGERRRGKGHDGLYQGLSTATKDTYDALHMQALPPRRAKRSGSGATNFSLLKQAGDVEENPGPTSMDWIWRILFLVGAATGAHSFEQLQVQESGPGLVKPSETLSLTCTVSGGSISNSYFSWGWIRQPPGKGLEWIGSFYYGEKTYYNPSLKSRATISIDTSKSQFSLKLSSVTAADTAVYYCPRGPTMIRGVIDSWGQGTLVTVSSTRIQNPDPAVYQLRDSKSSDKSVCLFTDFDSQTNVSQSKDSDVYITDKTVLDMRSMDFKSNSAVAWSNKSDFACANAFNNSIIPEDTFFPSPESSCGTQSFGLLDPKLCYLLDGILFIYGVILTALFLRVKFSRSADAPAYQQGQNQLYNELNLGRREEYDVLDKRRGRDPEMGGKPQRRKNPQEGLYNELQKDKMAEAYSEIGMKGERRRGKGHDGLYQGLSTATKDTYDALHMQALPPR

SEQ ID NO: 12955 - protein, 961 aa, Artificial Sequence
  Synthetic Polypeptide
MALPVTALLLPLALLLHAARPEVQLVESGGGLVQPGGSLRLSCAASGFSFSDFWMSWVRQAPGKGLEWVATISQAGSEKDYVDSVKGRFTISRDNAKKSLYLQMNSLRAEDTAVYYCASGVYSFDYRGQGTLVTVSSGTGGGGSGGGGSGGGGSEFDIVMTQTPLSLPVTPGEPASISCRSSRSLLDSDDGNTYLDWYLQKPGQSPQLLIYTLSYRASGVPDRFSGSGSGTDFTLKISRVEAEDVGVYYCMQRVEFPITFGQGTRLEIKRLEDLKNVFPPEVAVFEPSEAEISHTQKATLVCLATGFYPDHVELSWWVNGKEVHSGVSTDPQPLKEQPALNDSRYCLSSRLRVSATFWQNPRNHFRCQVQFYGLSENDEWTQDRAKPVTQIVSAEAWGRADCGSQSFGLLDPKLCYLLDGILFIYGVILTALFLRVKFSRSADAPAYQQGQNQLYNELNLGRREEYDVLDKRRGRDPEMGGKPQRRKNPQEGLYNELQKDKMAEAYSEIGMKGERRRGKGHDGLYQGLSTATKDTYDALHMQALPPRRAKRSGSGATNFSLLKQAGDVEENPGPTSMDWIWRILFLVGAATGAHSFEQVQLVESGGGVVQPGRSLRLSCAASGFIFSRYGMHWVRQAPGKGLKWVAVIWYDGSNKLYADSVKGRFTISRDNSKNTLYLQMNSLRAEDTAVYYCARDYYDNSRHHWGFDYWGQGTLVTVSSTRIQNPDPAVYQLRDSKSSDKSVCLFTDFDSQTNVSQSKDSDVYITDKTVLDMRSMDFKSNSAVAWSNKSDFACANAFNNSIIPEDTFFPSPESSCGTQSFGLLDPKLCYLLDGILFIYGVILTALFLRVKFSRSADAPAYQQGQNQLYNELNLGRREEYDVLDKRRGRDPEMGGKPQRRKNPQEGLYNELQKDKMAEAYSEIGMKGERRRGKGHDGLYQGLSTATKDTYDALHMQALPPR

SEQ ID NO: 12956 - protein, 951 aa, Artificial Sequence
  Synthetic Polypeptide
MALPVTALLLPLALLLHAARPEVQLVESGGGLVQPGGSLRLSCAASGFSFSDFWMSWVRQAPGKGLEWVATISQAGSEKDYVDSVKGRFTISRDNAKKSLYLQMNSLRAEDTAVYYCASGVYSFDYRGQGTLVTVSSGTGGGGSGGGGSGGGGSEFEIQMTQSPSSMSASLGDTITITCQATQDIFKNLNWYQQKPGKPPSLLIYYATELAEGVPSRFSGSGSGSDYSLTISNLESEDFAAYYCLQFFEFPFTFGSGTKLEMKLEDLKNVFPPEVAVFEPSEAEISHTQKATLVCLATGFYPDHVELSWWVNGKEVHSGVSTDPQPLKEQPALNDSRYCLSSRLRVSATFWQNPRNHFRCQVQFYGLSENDEWTQDRAKPVTQIVSAEAWGRADCGSQSFGLLDPKLCYLLDGILFIYGVILTALFLRVKFSRSADAPAYQQGQNQLYNELNLGRREEYDVLDKRRGRDPEMGGKPQRRKNPQEGLYNELQKDKMAEAYSEIGMKGERRRGKGHDGLYQGLSTATKDTYDALHMQALPPRRAKRSGSGATNFSLLKQAGDVEENPGPTSMDWIWRILFLVGAATGAHSFEQVQLQQSGAELVRPGTSVKVSCKASGYVFTNYWIEWIKQRPGQGLEWIGVMNPGSGETTYNEKFKGKATLTADKSSSTAYMQLSSLTSVDSAVYFCARDHDRDYYAMDYWGQGTSVTVSSTRIQNPDPAVYQLRDSKSSDKSVCLFTDFDSQTNVSQSKDSDVYITDKTVLDMRSMDFKSNSAVAWSNKSDFACANAFNNSIIPEDTFFPSPESSCGTQSFGLLDPKLCYLLDGILFIYGVILTALFLRVKFSRSADAPAYQQGQNQLYNELNLGRREEYDVLDKRRGRDPEMGGKPQRRKNPQEGLYNELQKDKMAEAYSEIGMKGERRRGKGHDGLYQGLSTATKDTYDALHMQALPPR

SEQ ID NO: 12957 - protein, 948 aa, Artificial Sequence
  Synthetic Polypeptide
MALPVTALLLPLALLLHAARPEVQLVESGGGLVQPGGSLRLSCAASGFSFSDFWMSWVRQAPGKGLEWVATISQAGSEKDYVDSVKGRFTISRDNAKKSLYLQMNSLRAEDTAVYYCASGVYSFDYRGQGTLVTVSSGTGGGGSGGGGSGGGGSEFDILLTQSPAILSVSPGERVSFSCRASQNIGTSIHWYQQRTNGSPRLLIKYASESVSGIPSRFSGSGSGTDFTLSINSVESEDIADYYCQHTNSWPTTFGGGTKLEIKRLEDLKNVFPPEVAVFEPSEAEISHTQKATLVCLATGFYPDHVELSWWVNGKEVHSGVSTDPQPLKEQPALNDSRYCLSSRLRVSATFWQNPRNHFRCQVQFYGLSENDEWTQDRAKPVTQIVSAEAWGRADCGSQSFGLLDPKLCYLLDGILFIYGVILTALFLRVKFSRSADAPAYQQGQNQLYNELNLGRREEYDVLDKRRGRDPEMGGKPQRRKNPQEGLYNELQKDKMAEAYSEIGMKGERRRGKGHDGLYQGLSTATKDTYDALHMQALPPRRAKRSGSGATNFSLLKQAGDVEENPGPTSMDWIWRILFLVGAATGAHSFEQVQLQQSDAELVKPGASVKISCKASGYTFTDHAIHWVKQKPEQGLEWIGYFSPGNGDIKYNEKFKGKATLTADKSSSTAYMQLNSLTSEDSAVYFCKRSYGNYDYWGQGTTLTVSSTRIQNPDPAVYQLRDSKSSDKSVCLFTDFDSQTNVSQSKDSDVYITDKTVLDMRSMDFKSNSAVAWSNKSDFACANAFNNSIIPEDTFFPSPESSCGTQSFGLLDPKLCYLLDGILFIYGVILTALFLRVKFSRSADAPAYQQGQNQLYNELNLGRREEYDVLDKRRGRDPEMGGKPQRRKNPQEGLYNELQKDKMAEAYSEIGMKGERRRGKGHDGLYQGLSTATKDTYDALHMQALPPR

SEQ ID NO: 12958 - protein, 953 aa, Artificial Sequence
  Synthetic Polypeptide
MALPVTALLLPLALLLHAARPEVQLVESGGGLVQPGGSLRLSCAASGFSFSDFWMSWVRQAPGKGLEWVATISQAGSEKDYVDSVKGRFTISRDNAKKSLYLQMNSLRAEDTAVYYCASGVYSFDYRGQGTLVTVSSGTGGGGSGGGGSGGGGSEFDIVMTQSPDSLAVSLGERATINCKSSQSLLNSGDQKNYLTWYQQKPGQPPKLLIYWASTRESGVPDRFSGSGSGTDFTLTISSLQAEDVAVYYCQNDYSYPLTFGQGTKVEIKLEDLKNVFPPEVAVFEPSEAEISHTQKATLVCLATGFYPDHVELSWWVNGKEVHSGVSTDPQPLKEQPALNDSRYCLSSRLRVSATFWQNPRNHFRCQVQFYGLSENDEWTQDRAKPVTQIVSAEAWGRADCGSQSFGLLDPKLCYLLDGILFIYGVILTALFLRVKFSRSADAPAYQQGQNQLYNELNLGRREEYDVLDKRRGRDPEMGGKPQRRKNPQEGLYNELQKDKMAEAYSEIGMKGERRRGKGHDGLYQGLSTATKDTYDALHMQALPPRRAKRSGSGATNFSLLKQAGDVEENPGPTSMDWIWRILFLVGAATGAHSFEQVQLVQSGAEVKKTGSSVKVSCKASGYTFTDHAIHVWRQAPGQALEWMGHFSPGNTDIKYNDKFKGRVTLTVDRSMSTAYMELSSLRSEDTAMYYCKTSTFFFDYWGQGTMVTVSSTRIQNPDPAVYQLRDSKSSDKSVCLFTDFDSQTNVSQSKDSDVYITDKTVLDMRSMDFKSNSAVAWSNKSDFACANAFNNSIIPEDTFFPSPESSCGTQSFGLLDPKLCYLLDGILFIYGVILTALFLRVKFSRSADAPAYQQGQNQLYNELNLGRREEYDVLDKRRGRDPEMGGKPQRRKNPQEGLYNELQKDKMAEAYSEIGMKGERRRGKGHDGLYQGLSTATKDTYDALHMQALPPR

SEQ ID NO: 12959 - protein, 952 aa, Artificial Sequence
  Synthetic Polypeptide
MALPVTALLLPLALLLHAARPEVQLVESGGGLVQPGGSLRLSCAASGFSFSDFWMSWVRQAPGKGLEWVATISQAGSEKDYVDSVKGRFTISRDNAKKSLYLQMNSLRAEDTAVYYCASGVYSFDYRGQGTLVTVSSGTGGGGSGGGGSGGGGSEFDIQMTQSPSSLSASVGDRVTITCKASQDVSIAVAWYQQKPGKAPKVLIYSASYRYTGVPDRFSGSGSGTDFTFTISSLQPEDIAVYYCQQHYITPLTFGGGTKVEIKLEDLKNVFPPEVAVFEPSEAEISHTQKATLVCLATGFYPDHVELSWWVNGKEVHSGVSTDPQPLKEQPALNDSRYCLSSRLRVSATFWQNPRNHFRCQVQFYGLSENDEWTQDRAKPVTQIVSAEAWGRADCGSQSFGLLDPKLCYLLDGILFIYGVILTALFLRVKFSRSADAPAYQQGQNQLYNELNLGRREEYDVLDKRRGRDPEMGGKPQRRKNPQEGLYNELQKDKMAEAYSEIGMKGERRRGKGHDGLYQGLSTATKDTYDALHMQALPPRRAKRSGSGATNFSLLKQAGDVEENPGPTSMDWIWRILFLVGAATGAHSFEQIQLVQSGHEVKKPGASVKVSCKASGYTFTNYGMNWVRQAPGQGLEWMGWINTKTGEPTYAEEFKGRFVFSLETSASTAYLQISSLKAEDTAMYFCGRGGYGSSYWYFDVWGQGTTVTVSSTRIQNPDPAVYQLRDSKSSDKSVCLFTDFDSQTNVSQSKDSDVYITDKTVLDMRSMDFKSNSAVAWSNKSDFACANAFNNSIIPEDTFFPSPESSCGTQSFGLLDPKLCYLLDGILFIYGVILTALFLRVKFSRSADAPAYQQGQNQLYNELNLGRREEYDVLDKRRGRDPEMGGKPQRRKNPQEGLYNELQKDKMAEAYSEIGMKGERRRGKGHDGLYQGLSTATKDTYDALHMQALPPR

SEQ ID NO: 12960 - protein, 954 aa, Artificial Sequence
  Synthetic Polypeptide
MALPVTALLLPLALLLHAARPEVQLVESGGGLVQPGGSLRLSCAASGFSFSDFWMSWVRQAPGKGLEWVATISQAGSEKDYVDSVKGRFTISRDNAKKSLYLQMNSLRAEDTAVYYCASGVYSFDYRGQGTLVTVSSGTGGGGSGGGGSGGGGSEFDIVMTQSPDSLAVSLGERATINCRASKSVSTSGYSYMHWYQQKPGQPPKLLIYLASNLESGVPDRFSGSGSGTDFTLTISSLQAEDVAVYYCQHSRELPYTFGQGTKLEIKLEDLKNVFPPEVAVFEPSEAEISHTQKATLVCLATGFYPDHVELSWWVNGKEVHSGVSTDPQPLKEQPALNDSRYCLSSRLRVSATFWQNPRNHFRCQVQFYGLSENDEWTQDRAKPVTQIVSAEAWGRADCGSQSFGLLDPKLCYLLDGILFIYGVILTALFLRVKFSRSADAPAYQQGQNQLYNELNLGRREEYDVLDKRRGRDPEMGGKPQRRKNPQEGLYNELQKDKMAEAYSEIGMKGERRRGKGHDGLYQGLSTATKDTYDALHMQALPPRRAKRSGSGATNFSLLKQAGDVEENPGPTSMDWIWRILFLVGAATGAHSFEQVQLQESGPGLVKPSETLSLTCTVSGGSISSYGVHWIRQPPGKGLEWIGVIWTSGVTDYNSALMGRVTISVDTSKNQFSLKLSSVTAADTAVYYCARDGDYDRYTMDYWGQGTLVTVSSTRIQNPDPAVYQLRDSKSSDKSVCLFTDFDSQTNVSQSKDSDVYITDKTVLDMRSMDFKSNSAVAWSNKSDFACANAFNNSIIPEDTFFPSPESSCGTQSFGLLDPKLCYLLDGILFIYGVILTALFLRVKFSRSADAPAYQQGQNQLYNELNLGRREEYDVLDKRRGRDPEMGGKPQRRKNPQEGLYNELQKDKMAEAYSEIGMKGERRRGKGHDGLYQGLSTATKDTYDALHMQALPPR

SEQ ID NO: 12961 - protein, 954 aa, Artificial Sequence
  Synthetic Polypeptide
MALPVTALLLPLALLLHAARPEVQLVESGGGLVQPGGSLRLSCAASGFSFSDFWMSWVRQAPGKGLEWVATISQAGSEKDYVDSVKGRFTISRDNAKKSLYLQMNSLRAEDTAVYYCASGVYSFDYRGQGTLVTVSSGTGGGGSGGGGSGGGGSEFDIQMTQSPSSLSASVGDRVTITCRASQSIGTSLHWYQQKPGKAPKLLIKFASRLQSGVPSRFSGSGSGTDFTLTISSLQPEDFATYYCQQSPGFPPTFGQGTKLEIKRLEDLKNVFPPEVAVFEPSEAEISHTQKATLVCLATGFYPDHVELSWWVNGKEVHSGVSTDPQPLKEQPALNDSRYCLSSRLRVSATFWQNPRNHFRCQVQFYGLSENDEWTQDRAKPVTQIVSAEAWGRADCGSQSFGLLDPKLCYLLDGILFIYGVILTALFLRVKFSRSADAPAYQQGQNQLYNELNLGRREEYDVLDKRRGRDPEMGGKPQRRKNPQEGLYNELQKDKMAEAYSEIGMKGERRRGKGHDGLYQGLSTATKDTYDALHMQALPPRRAKRSGSGATNFSLLKQAGDVEENPGPTSMDWIWRILFLVGAATGAHSFEQVQLVESGGGLVKPGGSLRLSCAASGFSITTSGYYWTWIRQFPGKGLEWMGYIGYNSKTYYNPALKSRITISRDNAKNSLYLQMNSLRAEDTAVYYCARSLYGGYKDAFDSWGQGTLVTVSSTRIQNPDPAVYQLRDSKSSDKSVCLFTDFDSQTNVSQSKDSDVYITDKTVLDMRSMDFKSNSAVAWSNKSDFACANAFNNSIIPEDTFFPSPESSCGTQSFGLLDPKLCYLLDGILFIYGVILTALFLRVKFSRSADAPAYQQGQNQLYNELNLGRREEYDVLDKRRGRDPEMGGKPQRRKNPQEGLYNELQKDKMAEAYSEIGMKGERRRGKGHDGLYQGLSTATKDTYDALHMQALPPR

SEQ ID NO: 12962 - protein, 959 aa, Artificial Sequence
  Synthetic Polypeptide
MALPVTALLLPLALLLHAARPEVQLVESGGGLVQPGGSLRLSCAASGFSFSDFWMSWVRQAPGKGLEWVATISQAGSEKDYVDSVKGRFTISRDNAKKSLYLQMNSLRAEDTAVYYCASGVYSFDYRGQGTLVTVSSGTGGGGSGGGGSGGGGSEFDEIVLTQSPLSLPVTPGEPASISCRSSQSLLHSIGYNYLDWYLQKPGQSPQLLIYLGSNRASGVPDRFSGSGSGTDFTLKISRVEAEDVGVYYCMQALQTPLTFGGGTKVEIKRLEDLKNVFPPEVAVFEPSEAEISHTQKATLVCLATGFYPDHVELSWWVNGKEVHSGVSTDPQPLKEQPALNDSRYCLSSRLRVSATFWQNPRNHFRCQVQFYGLSENDEWTQDRAKPVTQIVSAEAWGRADCGSQSFGLLDPKLCYLLDGILFIYGVILTALFLRVKFSRSADAPAYQQGQNQLYNELNLGRREEYDVLDKRRGRDPEMGGKPQRRKNPQEGLYNELQKDKMAEAYSEIGMKGERRRGKGHDGLYQGLSTATKDTYDALHMQALPPRRAKRSGSGATNFSLLKQAGDVEENPGPTSMDWIWRILFLVGAATGAHSFEEVQLVESGGGVVQPGRSLRLSCAASGFTFRSYGMHWVRQAPGKGLEWVAVISYDGSNKYYTDSVNGRFTISRDNSKNTLYLQMNSLRAEDTAVYYCARGGGYYETSGPDYWGQGTLVTVSSTRIQNPDPAVYQLRDSKSSDKSVCLFTDFDSQTNVSQSKDSDVYITDKTVLDMRSMDFKSNSAVAWSNKSDFACANAFNNSIIPEDTFFPSPESSCGTQSFGLLDPKLCYLLDGILFIYGVILTALFLRVKFSRSADAPAYQQGQNQLYNELNLGRREEYDVLDKRRGRDPEMGGKPQRRKNPQEGLYNELQKDKMAEAYSEIGMKGERRRGKGHDGLYQGLSTATKDTYDALHMQALPPR

SEQ ID NO: 12963 - protein, 957 aa, Artificial Sequence
  Synthetic Polypeptide
MALPVTALLLPLALLLHAARPEVQLVESGGGLVQPGGSLRLSCAASGFSFSDFWMSWVRQAPGKGLEWVATISQAGSEKDYVDSVKGRFTISRDNAKKSLYLQMNSLRAEDTAVYYCASGVYSFDYRGQGTLVTVSSGTGGGGSGGGGSGGGGSEFDDVVMTQSPLSLPVTPGEPASISCRSSQSLLHSIGYNYLHWFLQKPGQSPQLLIYLGSNRASGVPDRFSGSGSGTDFTLKISRVEAEDVGVYYCMQALQTPPTFGQGTRLEIKRLEDLKNVFPPEVAVFEPSEAEISHTQKATLVCLATGFYPDHVELSWWVNGKEVHSGVSTDPQPLKEQPALNDSRYCLSSRLRVSATFWQNPRNHFRCQVQFYGLSENDEWTQDRAKPVTQIVSAEAWGRADCGSQSFGLLDPKLCYLLDGILFIYGVILTALFLRVKFSRSADAPAYQQGQNQLYNELNLGRREEYDVLDKRRGRDPEMGGKPQRRKNPQEGLYNELQKDKMAEAYSEIGMKGERRRGKGHDGLYQGLSTATKDTYDALHMQALPPRRAKRSGSGATNFSLLKQAGDVEENPGPTSMDWIWRILFLVGAATGAHSFEQLQLQESGPGLVKPSGTLSLTCAVSGGSISSSNWWSWVRQPPGKGLEWIGEIYHSGSTNYNPSLKSRVTISVDKSKNQFSLKLSSVTAADTAVYYCVGSPYGDYVLDYWGQGTLVTVSSTRIQNPDPAVYQLRDSKSSDKSVCLFTDFDSQTNVSQSKDSDVYITDKTVLDMRSMDFKSNSAVAWSNKSDFACANAFNNSIIPEDTFFPSPESSCGTQSFGLLDPKLCYLLDGILFIYGVILTALFLRVKFSRSADAPAYQQGQNQLYNELNLGRREEYDVLDKRRGRDPEMGGKPQRRKNPQEGLYNELQKDKMAEAYSEIGMKGERRRGKGHDGLYQGLSTATKDTYDALHMQALPPR

SEQ ID NO: 12964 - protein, 955 aa, Artificial Sequence
  Synthetic Polypeptide
MALPVTALLLPLALLLHAARPEVQLVESGGGLVQPGGSLRLSCAASGFSFSDFWMSWVRQAPGKGLEWVATISQAGSEKDYVDSVKGRFTISRDNAKKSLYLQMNSLRAEDTAVYYCASGVYSFDYRGQGTLVTVSSGTGGGGSGGGGSGGGGSEFDEIVLTQSPGTLSLSLGERATLSCRASQSISSSFLAWYQQKPGQAPKLLIYAASTRATGIPDRFSGSGSGTDFTLTISRLEPEDFAVYYCQQYGRSLSFGGGTKVEVKLEDLKNVFPPEVAVFEPSEAEISHTQKATLVCLATGFYPDHVELSWWVNGKEVHSGVSTDPQPLKEQPALNDSRYCLSSRLRVSATFWQNPRNHFRCQVQFYGLSENDEWTQDRAKPVTQIVSAEAWGRADCGSQSFGLLDPKLCYLLDGILFIYGVILTALFLRVKFSRSADAPAYQQGQNQLYNELNLGRREEYDVLDKRRGRDPEMGGKPQRRKNPQEGLYNELQKDKMAEAYSEIGMKGERRRGKGHDGLYQGLSTATKDTYDALHMQALPPRRAKRSGSGATNFSLLKQAGDVEENPGPTSMDWIWRILFLVGAATGAHSFEQVQLQQSGPGLVKPSQTLSLTCAISGDSVSGNSATWNWIRQSPSRGLEWLGRTYYRSKWNHDYAESVKSRITINPDTSKNQFSLQLNSVTPEDTAVYYCARGDSSSWYAFDYWGQGTLVTVSSTRIQNPDPAVYQLRDSKSSDKSVCLFTDFDSQTNVSQSKDSDVYITDKTVLDMRSMDFKSNSAVAWSNKSDFACANAFNNSIIPEDTFFPSPESSCGTQSFGLLDPKLCYLLDGILFIYGVILTALFLRVKFSRSADAPAYQQGQNQLYNELNLGRREEYDVLDKRRGRDPEMGGKPQRRKNPQEGLYNELQKDKMAEAYSEIGMKGERRRGKGHDGLYQGLSTATKDTYDALHMQALPPR

SEQ ID NO: 12965 - protein, 954 aa, Artificial Sequence
  Synthetic Polypeptide
MALPVTALLLPLALLLHAARPEVQLVESGGGLVQPGGSLRLSCAASGFSFSDFWMSWVRQAPGKGLEWVATISQAGSEKDYVDSVKGRFTISRDNAKKSLYLQMNSLRAEDTAVYYCASGVYSFDYRGQGTLVTVSSGTGGGGSGGGGSGGGGSEFDQSVVTQPPSVSVAPGKTARITCGRNNIGSKSVHWYQQKPGQAPVLVVYDDSDRPSGIPERFSGSNSGNTATLTISRVEAGDEADYYCQVWDSSSDHVVFGGGTKLTVLGLEDLKNVFPPEVAVFEPSEAEISHTQKATLVCLATGFYPDHVELSWWVNGKEVHSGVSTDPQPLKEQPALNDSRYCLSSRLRVSATFWQNPRNHFRCQVQFYGLSENDEWTQDRAKPVTQIVSAEAWGRADCGSQSFGLLDPKLCYLLDGILFIYGVILTALFLRVKFSRSADAPAYQQGQNQLYNELNLGRREEYDVLDKRRGRDPEMGGKPQRRKNPQEGLYNELQKDKMAEAYSEIGMKGERRRGKGHDGLYQGLSTATKDTYDALHMQALPPRRAKRSGSGATNFSLLKQAGDVEENPGPTSMDWIWRILFLVGAATGAHSFEVQLVQSGGGVMRPGGSLRLSCAASGFTFDDYGMSWVRQAPGKGLEWVSGINWNGGSTGYADSVRGRFTISRDNAKNSLYLQMNSLRAEDTALYYCARERGYGYHDPHDYWGQGTLVTVSSTRIQNPDPAVYQLRDSKSSDKSVCLFTDFDSQTNVSQSKDSDVYITDKTVLDMRSMDFKSNSAVAWSNKSDFACANAFNNSIIPEDTFFPSPESSCGTQSFGLLDPKLCYLLDGILFIYGVILTALFLRVKFSRSADAPAYQQGQNQLYNELNLGRREEYDVLDKRRGRDPEMGGKPQRRKNPQEGLYNELQKDKMAEAYSEIGMKGERRRGKGHDGLYQGLSTATKDTYDALHMQALPPR

SEQ ID NO: 12966 - protein, 967 aa, Artificial Sequence
  Synthetic Polypeptide
MALPVTALLLPLALLLHAARPEVQLVESGGGLVQPGGSLRLSCAASGFSFSDFWMSWVRQAPGKGLEWVATISQAGSEKDYVDSVKGRFTISRDNAKKSLYLQMNSLRAEDTAVYYCASGVYSFDYRGQGTLVTVSSGTGGGGSGGGGSGGGGSEFEQKLISEEDLEFQAVVTQPPSASGTPGQRVTISCSGSSSNIGSNTVNWYQQVPGTAPKLLIYSNNQRPSGVPDRFSGSKSGTSASLAISGLQSEDEADYYCAAWDDSLNGWVFGGGTKLTVLLEDLKNVFPPEVAVFEPSEAEISHTQKATLVCLATGFYPDHVELSWWVNGKEVHSGVSTDPQPLKEQPALNDSRYCLSSRLRVSATFWQNPRNHFRCQVQFYGLSENDEWTQDRAKPVTQIVSAEAWGRADCGSQSFGLLDPKLCYLLDGILFIYGVILTALFLRVKFSRSADAPAYQQGQNQLYNELNLGRREEYDVLDKRRGRDPEMGGKPQRRKNPQEGLYNELQKDKMAEAYSEIGMKGERRRGKGHDGLYQGLSTATKDTYDALHMQALPPRRAKRSGSGATNFSLLKQAGDVEENPGPTSMDWIWRILFLVGAATGAHSFEQMQLVQSGAEVKEPGESLRISCKGSGYSFTNFWISWVRQMPGKGLEWMGRVDPGYSYSTYSPSFQGHVTISADKSTSTAYLQWNSLKASDTAMYYCARVQYSGYYDWFDPWGQGTLVTVSSTRIQNPDPAVYQLRDSKSSDKSVCLFTDFDSQTNVSQSKDSDVYITDKTVLDMRSMDFKSNSAVAWSNKSDFACANAFNNSIIPEDTFFPSPESSCGTQSFGLLDPKLCYLLDGILFIYGVILTALFLRVKFSRSADAPAYQQGQNQLYNELNLGRREEYDVLDKRRGRDPEMGGKPQRRKNPQEGLYNELQKDKMAEAYSEIGMKGERRRGKGHDGLYQGLSTATKDTYDALHMQALPPR

SEQ ID NO: 12967 - protein, 961 aa, Artificial Sequence
  Synthetic Polypeptide
MALPVTALLLPLALLLHAARPEVQLVESGGGLVQPGGSLRLSCAASGFSFSDFWMSWVRQAPGKGLEWVATISQAGSEKDYVDSVKGRFTISRDNAKKSLYLQMNSLRAEDTAVYYCASGVYSFDYRGQGTLVTVSSGTGGGGSGGGGSGGGGSEFEQKLISEEDLEFDIQMTQSPSTLSASVGDRVTITCRASQNINKWLAWYQQRPGKAPQLLIYKASSLESGVPSRFSGSGSGTEYTLTISSLQPDDFATYYCQQYNSYATFGQGTKVEIKRLEDLKNVFPPEVAVFEPSEAEISHTQKATLVCLATGFYPDHVELSWWVNGKEVHSGVSTDPQPLKEQPALNDSRYCLSSRLRVSATFWQNPRNHFRCQVQFYGLSENDEWTQDRAKPVTQIVSAEAWGRADCGSQSFGLLDPKLCYLLDGILFIYGVILTALFLRVKFSRSADAPAYQQGQNQLYNELNLGRREEYDVLDKRRGRDPEMGGKPQRRKNPQEGLYNELQKDKMAEAYSEIGMKGERRRGKGHDGLYQGLSTATKDTYDALHMQALPPRRAKRSGSGATNFSLLKQAGDVEENPGPTSMDWIWRILFLVGAATGAHSFEQVQLVQSGAEVKKPGESLKISCKGSGYNFSNKWIGWVRQLPGRGLEWIAIIYPGYSDITYSPSFQGRVTISADTSINTAYLHWHSLKASDTAMYYCVRHTALAGFDYWGLGTLVTVSSTRIQNPDPAVYQLRDSKSSDKSVCLFTDFDSQTNVSQSKDSDVYITDKTVLDMRSMDFKSNSAVAWSNKSDFACANAFNNSIIPEDTFFPSPESSCGTQSFGLLDPKLCYLLDGILFIYGVILTALFLRVKFSRSADAPAYQQGQNQLYNELNLGRREEYDVLDKRRGRDPEMGGKPQRRKNPQEGLYNELQKDKMAEAYSEIGMKGERRRGKGHDGLYQGLSTATKDTYDALHMQALPPR

SEQ ID NO: 12968 - protein, 953 aa, Artificial Sequence
  Synthetic Polypeptide
MALPVTALLLPLALLLHAARPEVQLVESGGGLVQPGGSLRLSCAASGFSFSDFWMSWVRQAPGKGLEWVATISQAGSEKDYVDSVKGRFTISRDNAKKSLYLQMNSLRAEDTAVYYCASGVYSFDYRGQGTLVTVSSGTGGGGSGGGGSGGGGSEFDIVLTQSPASLAVSLGQRATISCRASESVDNYGNTFMHWYQQKPGQPPKLLIYRASNLESGIPARFSGSGSRTDFTLTINPVEADDVATYYCQQSNEDPPTFGAGTKLELKLEDLKNVFPPEVAVFEPSEAEISHTQKATLVCLATGFYPDHVELSWWVNGKEVHSGVSTDPQPLKEQPALNDSRYCLSSRLRVSATFWQNPRNHFRCQVQFYGLSENDEWTQDRAKPVTQIVSAEAWGRADCGSQSFGLLDPKLCYLLDGILFIYGVILTALFLRVKFSRSADAPAYQQGQNQLYNELNLGRREEYDVLDKRRGRDPEMGGKPQRRKNPQEGLYNELQKDKMAEAYSEIGMKGERRRGKGHDGLYQGLSTATKDTYDALHMQALPPRRAKRSGSGATNFSLLKQAGDVEENPGPTSMDWIWRILFLVGAATGAHSFEQIQLVQSGPELKKPGETVKISCKASGYIFTNYGMNWVKQAPGKSFKWMGWINTYTGESTYSADFKGRFAFSLETSASTAYLHINDLKNEDTATYFCARSGGYDPMDYWGQGTSVTVSSTRIQNPDPAVYQLRDSKSSDKSVCLFTDFDSQTNVSQSKDSDVYITDKTVLDMRSMDFKSNSAVAWSNKSDFACANAFNNSIIPEDTFFPSPESSCGTQSFGLLDPKLCYLLDGILFIYGVILTALFLRVKFSRSADAPAYQQGQNQLYNELNLGRREEYDVLDKRRGRDPEMGGKPQRRKNPQEGLYNELQKDKMAEAYSEIGMKGERRRGKGHDGLYQGLSTATKDTYDALHMQALPPR

SEQ ID NO: 12969 - protein, 952 aa, Artificial Sequence
  Synthetic Polypeptide
MALPVTALLLPLALLLHAARPEVQLVESGGGLVQPGGSLRLSCAASGFSFSDFWMSWVRQAPGKGLEWVATISQAGSEKDYVDSVKGRFTISRDNAKKSLYLQMNSLRAEDTAVYYCASGVYSFDYRGQGTLVTVSSGTGGGGSGGGGSGGGGSEFDEIVLTQSPGTLSLSPGERATLSCRASQSVSNTYLAWYHQRPGQAPRLLIYGASSRATGIPDRFSGSGSGTDFALTISSLEPEDFAVYYCQQYSNSWTFGQGTKVEIKRLEDLKNVFPPEVAVFEPSEAEISHTQKATLVCLATGFYPDHVELSWWVNGKEVHSGVSTDPQPLKEQPALNDSRYCLSSRLRVSATFWQNPRNHFRCQVQFYGLSENDEWTQDRAKPVTQIVSAEAWGRADCGSQSFGLLDPKLCYLLDGILFIYGVILTALFLRVKFSRSADAPAYQQGQNQLYNELNLGRREEYDVLDKRRGRDPEMGGKPQRRKNPQEGLYNELQKDKMAEAYSEIGMKGERRRGKGHDGLYQGLSTATKDTYDALHMQALPPRRAKRSGSGATNFSLLKQAGDVEENPGPTSMDWIWRILFLVGAATGAHSFEQVQLVESGGGVVQPGRSLRLSCAASGFTFSSYDMHWVRQAPGKGLEWVAVISYDGTNEYYADSVKGRFTISRDTSKNTLYLQMNSLRAEDTAVYYCARERYFDWSFDYWGQGTLVSVSSTRIQNPDPAVYQLRDSKSSDKSVCLFTDFDSQTNVSQSKDSDVYITDKTVLDMRSMDFKSNSAVAWSNKSDFACANAFNNSIIPEDTFFPSPESSCGTQSFGLLDPKLCYLLDGILFIYGVILTALFLRVKFSRSADAPAYQQGQNQLYNELNLGRREEYDVLDKRRGRDPEMGGKPQRRKNPQEGLYNELQKDKMAEAYSEIGMKGERRRGKGHDGLYQGLSTATKDTYDALHMQALPPR

SEQ ID NO: 12970 - protein, 951 aa, Artificial Sequence
  Synthetic Polypeptide
MALPVTALLLPLALLLHAARPEVQLVESGGGLVQPGGSLRLSCAASGFSFSDFWMSWVRQAPGKGLEWVATISQAGSEKDYVDSVKGRFTISRDNAKKSLYLQMNSLRAEDTAVYYCASGVYSFDYRGQGTLVTVSSGTGGGGSGGGGSGGGGSEFDELTQDPAVSVALGQTVRITCQGDSLRSNYANWYQQKPGQAPVLVIYGQNNRPSGIPDRFSGSSSGNTASLTITGAQAADEADYYCDSRVSTGNHVVFGGGTKLTVLGQLEDLKNVFPPEVAVFEPSEAEISHTQKATLVCLATGFYPDHVELSWWVNGKEVHSGVSTDPQPLKEQPALNDSRYCLSSRLRVSATFWQNPRNHFRCQVQFYGLSENDEWTQDRAKPVTQIVSAEAWGRADCGSQSFGLLDPKLCYLLDGILFIYGVILTALFLRVKFSRSADAPAYQQGQNQLYNELNLGRREEYDVLDKRRGRDPEMGGKPQRRKNPQEGLYNELQKDKMAEAYSEIGMKGERRRGKGHDGLYQGLSTATKDTYDALHMQALPPRRAKRSGSGATNFSLLKQAGDVEENPGPTSMDWIWRILFLVGAATGAHSFEEVQLVQSGAEVKKPGASVKVSCKASGYTFTSYAMHWVRQAPGQRLEWMGWINAGNGNTKYSQKFQGRVTITRDTSASTAYMELSSLRSEDTAVYYCARDISYGSFDYWGQGTLVTVSSTRIQNPDPAVYQLRDSKSSDKSVCLFTDFDSQTNVSQSKDSDVYITDKTVLDMRSMDFKSNSAVAWSNKSDFACANAFNNSIIPEDTFFPSPESSCGTQSFGLLDPKLCYLLDGILFIYGVILTALFLRVKFSRSADAPAYQQGQNQLYNELNLGRREEYDVLDKRRGRDPEMGGKPQRRKNPQEGLYNELQKDKMAEAYSEIGMKGERRRGKGHDGLYQGLSTATKDTYDALHMQALPPR

SEQ ID NO: 12971 - protein, 953 aa, Artificial Sequence
  Synthetic Polypeptide
MALPVTALLLPLALLLHAARPEVQLVESGGGLVQPGGSLRLSCAASGFSFSDFWMSWVRQAPGKGLEWVATISQAGSEKDYVDSVKGRFTISRDNAKKSLYLQMNSLRAEDTAVYYCASGVYSFDYRGQGTLVTVSSGTGGGGSGGGGSGGGGSEFDDIVLTQTPATLSVTPGDSVSLSCRASQSISNNLHWYQQKSHESPRLLIKNASQSISGIPSKFSGSGSGTDFTLRINSVETEDFGMYFCQQSNSWPYTFGSGTKLEIKLEDLKNVFPPEVAVFEPSEAEISHTQKATLVCLATGFYPDHVELSWWVNGKEVHSGVSTDPQPLKEQPALNDSRYCLSSRLRVSATFWQNPRNHFRCQVQFYGLSENDEWTQDRAKPVTQIVSAEAWGRADCGSQSFGLLDPKLCYLLDGILFIYGVILTALFLRVKFSRSADAPAYQQGQNQLYNELNLGRREEYDVLDKRRGRDPEMGGKPQRRKNPQEGLYNELQKDKMAEAYSEIGMKGERRRGKGHDGLYQGLSTATKDTYDALHMQALPPRRAKRSGSGATNFSLLKQAGDVEENPGPTSMDWIWRILFLVGAATGAHSFEQVKLQQSGPELVKPGASVKISCKASGYSFTGYYMHWVKQSHGNILDWIGYIYPYNGVSSYNQKFKGKATLTVDKSSSTAYMELRSLTSEDSAVYYCARERGLYQLRAMDYWGQGTSVTVSSTRIQNPDPAVYQLRDSKSSDKSVCLFTDFDSQTNVSQSKDSDVYITDKTVLDMRSMDFKSNSAVAWSNKSDFACANAFNNSIIPEDTFFPSPESSCGTQSFGLLDPKLCYLLDGILFIYGVILTALFLRVKFSRSADAPAYQQGQNQLYNELNLGRREEYDVLDKRRGRDPEMGGKPQRRKNPQEGLYNELQKDKMAEAYSEIGMKGERRRGKGHDGLYQGLSTATKDTYDALHMQALPPR

SEQ ID NO: 12972 - protein, 944 aa, Artificial Sequence
  Synthetic Polypeptide
MALPVTALLLPLALLLHAARPEVQLVESGGGLVQPGGSLRLSCAASGFSFSDFWMSWVRQAPGKGLEWVATISQAGSEKDYVDSVKGRFTISRDNAKKSLYLQMNSLRAEDTAVYYCASGVYSFDYRGQGTLVTVSSGTGGGGSGGGGSGGGGSEFDDIVMTQTPAIMSASPGQKVTITCSASSSVNYMHWYQQKLGSSPKLWIYDTSKLAPGVPARFSGSGSGTSYSLTISSMEAEDAASYFCHQWSSYPYTFGSGTKLEIKLEDLKNVFPPEVAVFEPSEAEISHTQKATLVCLATGFYPDHVELSWWVNGKEVHSGVSTDPQPLKEQPALNDSRYCLSSRLRVSATFWQNPRNHFRCQVQFYGLSENDEWTQDRAKPVTQIVSAEAWGRADCGSQSFGLLDPKLCYLLDGILFIYGVILTALFLRVKFSRSADAPAYQQGQNQLYNELNLGRREEYDVLDKRRGRDPEMGGKPQRRKNPQEGLYNELQKDKMAEAYSEIGMKGERRRGKGHDGLYQGLSTATKDTYDALHMQALPPRRAKRSGSGATNFSLLKQAGDVEENPGPTSMDWIWRILFLVGAATGAHSFEEVQLQESGPDLVKPSQSLSLTCTVTGYSITSGYGWHWIRQFPGNKLEWMGYIHYSGSTTYNPSLKSRISISRDTSKNQFFLQLNSVTTEDTATYYCARSLRYWGQGTTLTVSSTRIQNPDPAVYQLRDSKSSDKSVCLFTDFDSQTNVSQSKDSDVYITDKTVLDMRSMDFKSNSAVAWSNKSDFACANAFNNSIIPEDTFFPSPESSCGTQSFGLLDPKLCYLLDGILFIYGVILTALFLRVKFSRSADAPAYQQGQNQLYNELNLGRREEYDVLDKRRGRDPEMGGKPQRRKNPQEGLYNELQKDKMAEAYSEIGMKGERRRGKGHDGLYQGLSTATKDTYDALHMQALPPR

SEQ ID NO: 12973 - protein, 947 aa, Artificial Sequence
  Synthetic Polypeptide
MALPVTALLLPLALLLHAARPEVQLVESGGGLVQPGGSLRLSCAASGFSFSDFWMSWVRQAPGKGLEWVATISQAGSEKDYVDSVKGRFTISRDNAKKSLYLQMNSLRAEDTAVYYCASGVYSFDYRGQGTLVTVSSGTGGGGSGGGGSGGGGSEFDDIQMTQSPSSLSASVGDRVTITCSATSSISYMHWYQQKPGKAPKGWIYDTSKLAHGVPSRFSGSGSGTDFTLTISSLQPEDFATYYCHQRRSYPFTFGQGTKVEIKLEDLKNVFPPEVAVFEPSEAEISHTQKATLVCLATGFYPDHVELSWWVNGKEVHSGVSTDPQPLKEQPALNDSRYCLSSRLRVSATFWQNPRNHFRCQVQFYGLSENDEWTQDRAKPVTQIVSAEAWGRADCGSQSFGLLDPKLCYLLDGILFIYGVILTALFLRVKFSRSADAPAYQQGQNQLYNELNLGRREEYDVLDKRRGRDPEMGGKPQRRKNPQEGLYNELQKDKMAEAYSEIGMKGERRRGKGHDGLYQGLSTATKDTYDALHMQALPPRRAKRSGSGATNFSLLKQAGDVEENPGPTSMDWIWRILFLVGAATGAHSFEEVQLVQSGAEVKKPGASVKVSCKASGYTFTNFWIHWVRQAPGQGLEWIGEIDPSDSYTNYNQKFKGRVTITRDTSTSTAYLELSSLRSEDTAVYYCAREITTVDYWGQGTLVTVSSTRIQNPDPAVYQLRDSKSSDKSVCLFTDFDSQTNVSQSKDSDVYITDKTVLDMRSMDFKSNSAVAWSNKSDFACANAFNNSIIPEDTFFPSPESSCGTQSFGLLDPKLCYLLDGILFIYGVILTALFLRVKFSRSADAPAYQQGQNQLYNELNLGRREEYDVLDKRRGRDPEMGGKPQRRKNPQEGLYNELQKDKMAEAYSEIGMKGERRRGKGHDGLYQGLSTATKDTYDALHMQALPPR

SEQ ID NO: 12974 - protein, 954 aa, Artificial Sequence
  Synthetic Polypeptide
MALPVTALLLPLALLLHAARPEVQLVESGGGLVQPGGSLRLSCAASGFSFSDFWMSWVRQAPGKGLEWVATISQAGSEKDYVDSVKGRFTISRDNAKKSLYLQMNSLRAEDTAVYYCASGVYSFDYRGQGTLVTVSSGTGGGGSGGGGSGGGGSEFDDIQMTQSPSSLSASVGDRVTITCKASQGFNKYVAWYQQKPGKAPKLLIYYTSTLQPGVPSRFSGSGSGRDYTLTISSLQPEDFATYYCLQYGNLLYAFGQGTKVEIKRLEDLKNVFPPEVAVFEPSEAEISHTQKATLVCLATGFYPDHVELSWWVNGKEVHSGVSTDPQPLKEQPALNDSRYCLSSRLRVSATFWQNPRNHFRCQVQFYGLSENDEWTQDRAKPVTQIVSAEAWGRADCGSQSFGLLDPKLCYLLDGILFIYGVILTALFLRVKFSRSADAPAYQQGQNQLYNELNLGRREEYDVLDKRRGRDPEMGGKPQRRKNPQEGLYNELQKDKMAEAYSEIGMKGERRRGKGHDGLYQGLSTATKDTYDALHMQALPPRRAKRSGSGATNFSLLKQAGDVEENPGPTSMDWIWRILFLVGAATGAHSFEEVQLVQSGAEVKKPGASVKVSCKASGYTFTSYWIGWVRQAPGQGLEWIGDIYPGGGYTNYNEKFKGRVTITRDTSTSTAYLELSSLRSEDTAVYYCARLDGSSYRGAMDSWGQGTLVTVSSTRIQNPDPAVYQLRDSKSSDKSVCLFTDFDSQTNVSQSKDSDVYITDKTVLDMRSMDFKSNSAVAWSNKSDFACANAFNNSIIPEDTFFPSPESSCGTQSFGLLDPKLCYLLDGILFIYGVILTALFLRVKFSRSADAPAYQQGQNQLYNELNLGRREEYDVLDKRRGRDPEMGGKPQRRKNPQEGLYNELQKDKMAEAYSEIGMKGERRRGKGHDGLYQGLSTATKDTYDALHMQALPPR

SEQ ID NO: 12975 - protein, 950 aa, Artificial Sequence
  Synthetic Polypeptide
MALPVTALLLPLALLLHAARPEVQLVESGGGLVQPGGSLRLSCAASGFSFSDFWMSWVRQAPGKGLEWVATISQAGSEKDYVDSVKGRFTISRDNAKKSLYLQMNSLRAEDTAVYYCASGVYSFDYRGQGTLVTVSSGTGGGGSGGGGSGGGGSEFDDIQMTQSPSSLSASVGDRVTITCRASQDIRYYLNWYQQKPGKAPKLLIYVASSLQSGVPSRFSGSGSGTEFTLTVSSLQPEDFATYYCLQVYSTPRTFGQGTKVEIKLEDLKNVFPPEVAVFEPSEAEISHTQKATLVCLATGFYPDHVELSWWVNGKEVHSGVSTDPQPLKEQPALNDSRYCLSSRLRVSATFWQNPRNHFRCQVQFYGLSENDEWTQDRAKPVTQIVSAEAWGRADCGSQSFGLLDPKLCYLLDGILFIYGVILTALFLRVKFSRSADAPAYQQGQNQLYNELNLGRREEYDVLDKRRGRDPEMGGKPQRRKNPQEGLYNELQKDKMAEAYSEIGMKGERRRGKGHDGLYQGLSTATKDTYDALHMQALPPRRAKRSGSGATNFSLLKQAGDVEENPGPTSMDWIWRILFLVGAATGAHSFEEVQLVESGGGLAKPGGSLRLSCAASGFRFTFNNYYMDWVRQAPGQGLEWVSRISSSGDPTWYADSVKGRFTISRENAKNTLFLQMNSLRAEDTAVYYCASLTTGSDSWGQGVLVTVSSTRIQNPDPAVYQLRDSKSSDKSVCLFTDFDSQTNVSQSKDSDVYITDKTVLDMRSMDFKSNSAVAWSNKSDFACANAFNNSIIPEDTFFPSPESSCGTQSFGLLDPKLCYLLDGILFIYGVILTALFLRVKFSRSADAPAYQQGQNQLYNELNLGRREEYDVLDKRRGRDPEMGGKPQRRKNPQEGLYNELQKDKMAEAYSEIGMKGERRRGKGHDGLYQGLSTATKDTYDALHMQALPPR

SEQ ID NO: 12976 - protein, 950 aa, Artificial Sequence
  Synthetic Polypeptide
MALPVTALLLPLALLLHAARPEVQLVESGGGLVQPGGSLRLSCAASGFSFSDFWMSWVRQAPGKGLEWVATISQAGSEKDYVDSVKGRFTISRDNAKKSLYLQMNSLRAEDTAVYYCASGVYSFDYRGQGTLVTVSSGTGGGGSGGGGSGGGGSEFEIVMTQSPATLSVSPGERATLSCRASQSVSRNLAWYQQKPGQAPRLLIYGASTRATGIPARFSGSGSGTEFTLTIGSLQSEDFAVYYCQQYKTWPRTFGQGTNVEIKLEDLKNVFPPEVAVFEPSEAEISHTQKATLVCLATGFYPDHVELSWWVNGKEVHSGVSTDPQPLKEQPALNDSRYCLSSRLRVSATFWQNPRNHFRCQVQFYGLSENDEWTQDRAKPVTQIVSAEAWGRADCGSQSFGLLDPKLCYLLDGILFIYGVILTALFLRVKFSRSADAPAYQQGQNQLYNELNLGRREEYDVLDKRRGRDPEMGGKPQRRKNPQEGLYNELQKDKMAEAYSEIGMKGERRRGKGHDGLYQGLSTATKDTYDALHMQALPPRRAKRSGSGATNFSLLKQAGDVEENPGPTSMDWIWRILFLVGAATGAHSFEQVQLQQWGAGLLKPSETLSLTCAVFGGSFSGYYWSWIRQPPGKGLEWIGEINHRGNTNDNPSLKSRVTISVDTSKNQFALKLSSVTAADTAVYYCARERGYTYGNFDHWGQGTLVTVSSTRIQNPDPAVYQLRDSKSSDKSVCLFTDFDSQTNVSQSKDSDVYITDKTVLDMRSMDFKSNSAVAWSNKSDFACANAFNNSIIPEDTFFPSPESSCGTQSFGLLDPKLCYLLDGILFIYGVILTALFLRVKFSRSADAPAYQQGQNQLYNELNLGRREEYDVLDKRRGRDPEMGGKPQRRKNPQEGLYNELQKDKMAEAYSEIGMKGERRRGKGHDGLYQGLSTATKDTYDALHMQALPPR

SEQ ID NO: 12977 - protein, 951 aa, Artificial Sequence
  Synthetic Polypeptide
MALPVTALLLPLALLLHAARPEVQLVESGGGLVQPGGSLRLSCAASGFSFSDFWMSWVRQAPGKGLEWVATISQAGSEKDYVDSVKGRFTISRDNAKKSLYLQMNSLRAEDTAVYYCASGVYSFDYRGQGTLVTVSSGTGGGGSGGGGSGGGGSEFEIVMTPSSATLSVSPGERATLSCRASQSVSRNLAWYQQKPGQAPRLLIYGASTRATGIPARFSGSGSGTEFTLTISSLQSEDFAVYYCHQYSNWMCSFGQGTKLEIKLEDLKNVFPPEVAVFEPSEAEISHTQKATLVCLATGFYPDHVELSWWVNGKEVHSGVSTDPQPLKEQPALNDSRYCLSSRLRVSATFWQNPRNHFRCQVQFYGLSENDEWTQDRAKPVTQIVSAEAWGRADCGSQSFGLLDPKLCYLLDGILFIYGVILTALFLRVKFSRSADAPAYQQGQNQLYNELNLGRREEYDVLDKRRGRDPEMGGKPQRRKNPQEGLYNELQKDKMAEAYSEIGMKGERRRGKGHDGLYQGLSTATKDTYDALHMQALPPRRAKRSGSGATNFSLLKQAGDVEENPGPTSMDWIWRILFLVGAATGAHSFEEVQLLESGGGLVQPGGSLRLSCAASGFTFSRYAMNWVRQAPGKGLEWVSGISGSGGRTYYADSVKGRFTISRDNSKNTLYLQMNSLRAEDTAVYYCAKDRDFWSGPFDYWGQGTLVTVSSTRIQNPDPAVYQLRDSKSSDKSVCLFTDFDSQTNVSQSKDSDVYITDKTVLDMRSMDFKSNSAVAWSNKSDFACANAFNNSIIPEDTFFPSPESSCGTQSFGLLDPKLCYLLDGILFIYGVILTALFLRVKFSRSADAPAYQQGQNQLYNELNLGRREEYDVLDKRRGRDPEMGGKPQRRKNPQEGLYNELQKDKMAEAYSEIGMKGERRRGKGHDGLYQGLSTATKDTYDALHMQALPPR

SEQ ID NO: 12978 - protein, 956 aa, Artificial Sequence
  Synthetic Polypeptide
MALPVTALLLPLALLLHAARPEVQLVESGGGLVQPGGSLRLSCAASGFSFSDFWMSWVRQAPGKGLEWVATISQAGSEKDYVDSVKGRFTISRDNAKKSLYLQMNSLRAEDTAVYYCASGVYSFDYRGQGTLVTVSSGTGGGGSGGGGSGGGGSEFDIQMTQSPSSLSASVGDRVTITCKASKNIRSYLAWYQQKPGKAPKLLIYSGSTLHSGVPSRFSGSGSGTDFTLTISSLQPEDFATYYCQQHHEYPLTFGQGTKVEIKRLEDLKNVFPPEVAVFEPSEAEISHTQKATLVCLATGFYPDHVELSWWVNGKEVHSGVSTDPQPLKEQPALNDSRYCLSSRLRVSATFWQNPRNHFRCQVQFYGLSENDEWTQDRAKPVTQIVSAEAWGRADCGSQSFGLLDPKLCYLLDGILFIYGVILTALFLRVKFSRSADAPAYQQGQNQLYNELNLGRREEYDVLDKRRGRDPEMGGKPQRRKNPQEGLYNELQKDKMAEAYSEIGMKGERRRGKGHDGLYQGLSTATKDTYDALHMQALPPRRAKRSGSGATNFSLLKQAGDVEENPGPTSMDWIWRILFLVGAATGAHSFEQVQLQESGPGLVKPSETLSLTCTVSGYTITSGYDWSWIRQPPGKGLEWIGYINYGGSTNYKPSLGSRVTISVDTSKNQFSLKLSSVTAADTAVYYCARYNEYKSYIYDWYFDFWGQGTLVTVSSTRIQNPDPAVYQLRDSKSSDKSVCLFTDFDSQTNVSQSKDSDVYITDKTVLDMRSMDFKSNSAVAWSNKSDFACANAFNNSIIPEDTFFPSPESSCGTQSFGLLDPKLCYLLDGILFIYGVILTALFLRVKFSRSADAPAYQQGQNQLYNELNLGRREEYDVLDKRRGRDPEMGGKPQRRKNPQEGLYNELQKDKMAEAYSEIGMKGERRRGKGHDGLYQGLSTATKDTYDALHMQALPPR

SEQ ID NO: 12979 - protein, 958 aa, Artificial Sequence
  Synthetic Polypeptide
MALPVTALLLPLALLLHAARPEVQLVESGGGLVQPGGSLRLSCAASGFSFSDFWMSWVRQAPGKGLEWVATISQAGSEKDYVDSVKGRFTISRDNAKKSLYLQMNSLRAEDTAVYYCASGVYSFDYRGQGTLVTVSSGTGGGGSGGGGSGGGGSEFQSVVTQPPSVSAAPGQKVTISCSGSSSNIGNNYVSWYQQLPGTAPKLLIYDNNKRPSGIPDRFSGSKSGTSATLGITGLQTGDEADYYCGTWDGSLYTMLFGGGTKLTVLLEDLKNVFPPEVAVFEPSEAEISHTQKATLVCLATGFYPDHVELSWWVNGKEVHSGVSTDPQPLKEQPALNDSRYCLSSRLRVSATFWQNPRNHFRCQVQFYGLSENDEWTQDRAKPVTQIVSAEAWGRADCGSQSFGLLDPKLCYLLDGILFIYGVILTALFLRVKFSRSADAPAYQQGQNQLYNELNLGRREEYDVLDKRRGRDPEMGGKPQRRKNPQEGLYNELQKDKMAEAYSEIGMKGERRRGKGHDGLYQGLSTATKDTYDALHMQALPPRRAKRSGSGATNFSLLKQAGDVEENPGPTSMDWIWRILFLVGAATGAHSFEEVQLVESGGGLVKPGGSLRLSCAASGFTFSNAWMSWVRQAPGKGLEWVGFIRSKAYGGTTEYAASVKGRFTISRDDSKSIAYLQMNNLKTEDTAVYYCARDGLYSSSWYDSDYWGQGTLVTVSSTRIQNPDPAVYQLRDSKSSDKSVCLFTDFDSQTNVSQSKDSDVYITDKTVLDMRSMDFKSNSAVAWSNKSDFACANAFNNSIIPEDTFFPSPESSCGTQSFGLLDPKLCYLLDGILFIYGVILTALFLRVKFSRSADAPAYQQGQNQLYNELNLGRREEYDVLDKRRGRDPEMGGKPQRRKNPQEGLYNELQKDKMAEAYSEIGMKGERRRGKGHDGLYQGLSTATKDTYDALHMQALPPR

SEQ ID NO: 12980 - protein, 963 aa, Artificial Sequence
  Synthetic Polypeptide
MALPVTALLLPLALLLHAARPEVQLVESGGGLVQPGGSLRLSCAASGFSFSDFWMSWVRQAPGKGLEWVATISQAGSEKDYVDSVKGRFTISRDNAKKSLYLQMNSLRAEDTAVYYCASGVYSFDYRGQGTLVTVSSGTGGGGSGGGGSGGGGSEFQSVLTQPPSVSGAPGQRVTISCTGSSSNIGAGYDVHWYQQLPGTAPKLLIFGNSNRPSGVPDRFSGFKSGTSASLAITGLQAEDEADYFCQSYDSSLSGSGVFGTGTKVTVLGLEDLKNVFPPEVAVFEPSEAEISHTQKATLVCLATGFYPDHVELSWWVNGKEVHSGVSTDPQPLKEQPALNDSRYCLSSRLRVSATFWQNPRNHFRCQVQFYGLSENDEWTQDRAKPVTQIVSAEAWGRADCGSQSFGLLDPKLCYLLDGILFIYGVILTALFLRVKFSRSADAPAYQQGQNQLYNELNLGRREEYDVLDKRRGRDPEMGGKPQRRKNPQEGLYNELQKDKMAEAYSEIGMKGERRRGKGHDGLYQGLSTATKDTYDALHMQALPPRRAKRSGSGATNFSLLKQAGDVEENPGPTSMDWIWRILFLVGAATGAHSFEQMQLVQSGGGLVQPGRSLRLSCAASGFTFDDYAMHWVRQAPGKGLEWVSGISWNSGSIGYADSVKGRFTISRDNAKNSLYLQMNSLRAEDTALYYCAKDIHSGSYYGLLYYAMDVWGQGTTVTVSSTRIQNPDPAVYQLRDSKSSDKSVCLFTDFDSQTNVSQSKDSDVYITDKTVLDMRSMDFKSNSAVAWSNKSDFACANAFNNSIIPEDTFFPSPESSCGTQSFGLLDPKLCYLLDGILFIYGVILTALFLRVKFSRSADAPAYQQGQNQLYNELNLGRREEYDVLDKRRGRDPEMGGKPQRRKNPQEGLYNELQKDKMAEAYSEIGMKGERRRGKGHDGLYQGLSTATKDTYDALHMQALPPR

SEQ ID NO: 12981 - protein, 963 aa, Artificial Sequence
  Synthetic Polypeptide
MALPVTALLLPLALLLHAARPEVQLVESGGGLVQPGGSLRLSCAASGFSFSDFWMSWVRQAPGKGLEWVATISQAGSEKDYVDSVKGRFTISRDNAKKSLYLQMNSLRAEDTAVYYCASGVYSFDYRGQGTLVTVSSGTGGGGSGGGGSGGGGSEFLPVLTQPPSASGTPGQRVTISCSGRSSNIGSNSVNWYRQLPGAAPKLLIYSNNQRPPGVPVRFSGSKSGTSASLAISGLQSEDEATYYCATWDDNLNVHYVFGTGTKVTVLGSRLEDLKNVFPPEVAVFEPSEAEISHTQKATLVCLATGFYPDHVELSWWVNGKEVHSGVSTDPQPLKEQPALNDSRYCLSSRLRVSATFWQNPRNHFRCQVQFYGLSENDEWTQDRAKPVTQIVSAEAWGRADCGSQSFGLLDPKLCYLLDGILFIYGVILTALFLRVKFSRSADAPAYQQGQNQLYNELNLGRREEYDVLDKRRGRDPEMGGKPQRRKNPQEGLYNELQKDKMAEAYSEIGMKGERRRGKGHDGLYQGLSTATKDTYDALHMQALPPRRAKRSGSGATNFSLLKQAGDVEENPGPTSMDWIWRILFLVGAATGAHSFELEMAQVQLVQSGAEVKKPGSSVKVSCKASGGTFSSYAISWVRQAPGQGLEWMGRIIPILGIANYAQKFQGRVTITADKSTSTAYMELSSLRSEDTAVYYCARGGYYSHDMWSEDWGQGTLVTVSSTRIQNPDPAVYQLRDSKSSDKSVCLFTDFDSQTNVSQSKDSDVYITDKTVLDMRSMDFKSNSAVAWSNKSDFACANAFNNSIIPEDTFFPSPESSCGTQSFGLLDPKLCYLLDGILFIYGVILTALFLRVKFSRSADAPAYQQGQNQLYNELNLGRREEYDVLDKRRGRDPEMGGKPQRRKNPQEGLYNELQKDKMAEAYSEIGMKGERRRGKGHDGLYQGLSTATKDTYDALHMQALPPR

SEQ ID NO: 12982 - protein, 957 aa, Artificial Sequence
  Synthetic Polypeptide
MALPVTALLLPLALLLHAARPEVQLVESGGGLVQPGGSLRLSCAASGFSFSDFWMSWVRQAPGKGLEWVATISQAGSEKDYVDSVKGRFTISRDNAKKSLYLQMNSLRAEDTAVYYCASGVYSFDYRGQGTLVTVSSGTGGGGSGGGGSGGGGSEFDFVMTQSPDSLAVSLGERVTMSCKSSQSLLNSGNQKNYLTWYQQKPGQPPKLLIYWASTRESGVPDRFSGSGSGTDFTLTISSLQAEDVAVYYCQNDYSYPYTFGQGTKLEIKLEDLKNVFPPEVAVFEPSEAEISHTQKATLVCLATGFYPDHVELSWWVNGKEVHSGVSTDPQPLKEQPALNDSRYCLSSRLRVSATFWQNPRNHFRCQVQFYGLSENDEWTQDRAKPVTQIVSAEAWGRADCGSQSFGLLDPKLCYLLDGILFIYGVILTALFLRVKFSRSADAPAYQQGQNQLYNELNLGRREEYDVLDKRRGRDPEMGGKPQRRKNPQEGLYNELQKDKMAEAYSEIGMKGERRRGKGHDGLYQGLSTATKDTYDALHMQALPPRRAKRSGSGATNFSLLKQAGDVEENPGPTSMDWIWRILFLVGAATGAHSFEEVQLVQSGAELKKPGASVKVSCKASGYTFTDYYMKWVRQAPGQGLEWIGDIIPSNGATFYNQKFKGRVTITVDKSTSTAYMELSSLRSEDTAVYYCARSHLLRASWFAYWGQGTLVTVSSTRIQNPDPAVYQLRDSKSSDKSVCLFTDFDSQTNVSQSKDSDVYITDKTVLDMRSMDFKSNSAVAWSNKSDFACANAFNNSIIPEDTFFPSPESSCGTQSFGLLDPKLCYLLDGILFIYGVILTALFLRVKFSRSADAPAYQQGQNQLYNELNLGRREEYDVLDKRRGRDPEMGGKPQRRKNPQEGLYNELQKDKMAEAYSEIGMKGERRRGKGHDGLYQGLSTATKDTYDALHMQALPPR

SEQ ID NO: 12983 - protein, 957 aa, Artificial Sequence
  Synthetic Polypeptide
MALPVTALLLPLALLLHAARPEVQLVESGGGLVQPGGSLRLSCAASGFSFSDFWMSWVRQAPGKGLEWVATISQAGSEKDYVDSVKGRFTISRDNAKKSLYLQMNSLRAEDTAVYYCASGVYSFDYRGQGTLVTVSSGTGGGGSGGGGSGGGGSEFDFVMTQSPDSLAVSLGERVTMSCKSSQSLLNSGNQKNYLTWYQQKPGQPPKLLIYWASTRESGVPDRFSGSGSGTDFTLTISSLQAEDVAVYYCQNDYSYPYTFGQGTKLEIKLEDLKNVFPPEVAVFEPSEAEISHTQKATLVCLATGFYPDHVELSWWVNGKEVHSGVSTDPQPLKEQPALNDSRYCLSSRLRVSATFWQNPRNHFRCQVQFYGLSENDEWTQDRAKPVTQIVSAEAWGRADCGSQSFGLLDPKLCYLLDGILFIYGVILTALFLRVKFSRSADAPAYQQGQNQLYNELNLGRREEYDVLDKRRGRDPEMGGKPQRRKNPQEGLYNELQKDKMAEAYSEIGMKGERRRGKGHDGLYQGLSTATKDTYDALHMQALPPRRAKRSGSGATNFSLLKQAGDVEENPGPTSMDWIWRILFLVGAATGAHSFEQVQLVQSGAELKKPGASVKVSCKASGYTFTDYYMKWVRQAPGQGLEWIGDIIPSNGATFYNQKFKGRVTITVDKSTSTAYMELSSLRSEDTAVYYCARSHLLRASWFAYWGQGTLVTVSSTRIQNPDPAVYQLRDSKSSDKSVCLFTDFDSQTNVSQSKDSDVYITDKTVLDMRSMDFKSNSAVAWSNKSDFACANAFNNSIIPEDTFFPSPESSCGTQSFGLLDPKLCYLLDGILFIYGVILTALFLRVKFSRSADAPAYQQGQNQLYNELNLGRREEYDVLDKRRGRDPEMGGKPQRRKNPQEGLYNELQKDKMAEAYSEIGMKGERRRGKGHDGLYQGLSTATKDTYDALHMQALPPR

SEQ ID NO: 12984 - protein, 947 aa, Artificial Sequence
  Synthetic Polypeptide
MALPVTALLLPLALLLHAARPEVQLVESGGGLVQPGGSLRLSCAASGFSFSDFWMSWVRQAPGKGLEWVATISQAGSEKDYVDSVKGRFTISRDNAKKSLYLQMNSLRAEDTAVYYCASGVYSFDYRGQGTLVTVSSGTGGGGSGGGGSGGGGSEFDVQITQSPSYLAASPGETITINCRASKSISKDLAWYQEKPGKTNKLLIYSGSTLQSGIPSRFSGSGSGTDFTLTISSLEPEDFAMYYCQQHNKYPYTFGGGTKLEIKRLEDLKNVFPPEVAVFEPSEAEISHTQKATLVCLATGFYPDHVELSWWVNGKEVHSGVSTDPQPLKEQPALNDSRYCLSSRLRVSATFWQNPRNHFRCQVQFYGLSENDEWTQDRAKPVTQIVSAEAWGRADCGSQSFGLLDPKLCYLLDGILFIYGVILTALFLRVKFSRSADAPAYQQGQNQLYNELNLGRREEYDVLDKRRGRDPEMGGKPQRRKNPQEGLYNELQKDKMAEAYSEIGMKGERRRGKGHDGLYQGLSTATKDTYDALHMQALPPRRAKRSGSGATNFSLLKQAGDVEENPGPTSMDWIWRILFLVGAATGAHSFEQVQLQQPGAELVRPGASVKLSCKASGYTFTSYWMNWVKQRPDQGLEWIGRIDPYDSETHYNQKFKDKAILTVDKSSSTAYMQLSSLTSEDSAVYYCARGNWDDYWGQGTTLTVSSTRIQNPDPAVYQLRDSKSSDKSVCLFTDFDSQTNVSQSKDSDVYITDKTVLDMRSMDFKSNSAVAWSNKSDFACANAFNNSIIPEDTFFPSPESSCGTQSFGLLDPKLCYLLDGILFIYGVILTALFLRVKFSRSADAPAYQQGQNQLYNELNLGRREEYDVLDKRRGRDPEMGGKPQRRKNPQEGLYNELQKDKMAEAYSEIGMKGERRRGKGHDGLYQGLSTATKDTYDALHMQALPPR

SEQ ID NO: 12985 - protein, 949 aa, Artificial Sequence
  Synthetic Polypeptide
MALPVTALLLPLALLLHAARPEVQLVESGGGLVQPGGSLRLSCAASGFSFSDFWMSWVRQAPGKGLEWVATISQAGSEKDYVDSVKGRFTISRDNAKKSLYLQMNSLRAEDTAVYYCASGVYSFDYRGQGTLVTVSSGTGGGGSGGGGSGGGGSEFEIVLTQSPTSMTASPGEQVTITCRASSSINYMHWYQQKPGASPRPWIYETSKLASGVPDRFSGSASGTSYSLTINNMEAEDAATYYCQQWNYPSWTFGGGTKLELKLEDLKNVFPPEVAVFEPSEAEISHTQKATLVCLATGFYPDHVELSWWVNGKEVHSGVSTDPQPLKEQPALNDSRYCLSSRLRVSATFWQNPRNHFRCQVQFYGLSENDEWTQDRAKPVTQIVSAEAWGRADCGSQSFGLLDPKLCYLLDGILFIYGVILTALFLRVKFSRSADAPAYQQGQNQLYNELNLGRREEYDVLDKRRGRDPEMGGKPQRRKNPQEGLYNELQKDKMAEAYSEIGMKGERRRGKGHDGLYQGLSTATKDTYDALHMQALPPRRAKRSGSGATNFSLLKQAGDVEENPGPTSMDWIWRILFLVGAATGAHSFEEVQLVESGGGLVQPGRSLKLSCAASGFTFSDYNMAWVRQAPKKGLEWVATILYDGGRTYYRGSVKGRFTISRDNAKSTLYLRMDSLRSEDTATYYCATHSRGTDYFDYWGQGVMVTVSSTRIQNPDPAVYQLRDSKSSDKSVCLFTDFDSQTNVSQSKDSDVYITDKTVLDMRSMDFKSNSAVAWSNKSDFACANAFNNSIIPEDTFFPSPESSCGTQSFGLLDPKLCYLLDGILFIYGVILTALFLRVKFSRSADAPAYQQGQNQLYNELNLGRREEYDVLDKRRGRDPEMGGKPQRRKNPQEGLYNELQKDKMAEAYSEIGMKGERRRGKGHDGLYQGLSTATKDTYDALHMQALPPR

SEQ ID NO: 12986 - protein, 958 aa, Artificial Sequence
  Synthetic Polypeptide
MALPVTALLLPLALLLHAARPEVQLVESGGGLVQPGGSLRLSCAASGFSFSDFWMSWVRQAPGKGLEWVATISQAGSEKDYVDSVKGRFTISRDNAKKSLYLQMNSLRAEDTAVYYCASGVYSFDYRGQGTLVTVSSGTGGGGSGGGGSGGGGSEFDIVMTQSPSSLAVSEGETVTINCKSSQSFLSSGDGKNYVAWYQYKPGQSPKLLIYWASTRQSGVPDRFIGSGSGTDFTLTISTVQAEDLAIYYCQQYYDTPLTFGSGTKLEIKLEDLKNVFPPEVAVFEPSEAEISHTQKATLVCLATGFYPDHVELSWWVNGKEVHSGVSTDPQPLKEQPALNDSRYCLSSRLRVSATFWQNPRNHFRCQVQFYGLSENDEWTQDRAKPVTQIVSAEAWGRADCGSQSFGLLDPKLCYLLDGILFIYGVILTALFLRVKFSRSADAPAYQQGQNQLYNELNLGRREEYDVLDKRRGRDPEMGGKPQRRKNPQEGLYNELQKDKMAEAYSEIGMKGERRRGKGHDGLYQGLSTATKDTYDALHMQALPPRRAKRSGSGATNFSLLKQAGDVEENPGPTSMDWIWRILFLVGAATGAHSFEEVKLQESGPSLVQSSQTLSLTCTVSGFSLTSYHIHWVRQTPGKGLEWMGVMWSDGDTSYNSALKSRLSISRDTSQSQVFLKMNSLQTEDTATYYCARGYYSSYLYLWFAYWGQGTLVTVSSTRIQNPDPAVYQLRDSKSSDKSVCLFTDFDSQTNVSQSKDSDVYITDKTVLDMRSMDFKSNSAVAWSNKSDFACANAFNNSIIPEDTFFPSPESSCGTQSFGLLDPKLCYLLDGILFIYGVILTALFLRVKFSRSADAPAYQQGQNQLYNELNLGRREEYDVLDKRRGRDPEMGGKPQRRKNPQEGLYNELQKDKMAEAYSEIGMKGERRRGKGHDGLYQGLSTATKDTYDALHMQALPPR

SEQ ID NO: 12987 - protein, 962 aa, Artificial Sequence
  Synthetic Polypeptide
MALPVTALLLPLALLLHAARPEVQLVESGGGLVQPGGSLRLSCAASGFSFSDFWMSWVRQAPGKGLEWVATISQAGSEKDYVDSVKGRFTISRDNAKKSLYLQMNSLRAEDTAVYYCASGVYSFDYRGQGTLVTVSSGTGGGGSGGGGSGGGGSEFDVLMTQTPVSLPVSLGGQVSISCRSSQSLVHSDGDTYLHWYLQKPGQSPQLLIYRVSNRFSGVPDRFSGSGSGTDFTLKISRVEPEDLGLYYCLQTTHFPPWTFGGGTKLEMKLEDLKNVFPPEVAVFEPSEAEISHTQKATLVCLATGFYPDHVELSWWVNGKEVHSGVSTDPQPLKEQPALNDSRYCLSSRLRVSATFWQNPRNHFRCQVQFYGLSENDEWTQDRAKPVTQIVSAEAWGRADCGSQSFGLLDPKLCYLLDGILFIYGVILTALFLRVKFSRSADAPAYQQGQNQLYNELNLGRREEYDVLDKRRGRDPEMGGKPQRRKNPQEGLYNELQKDKMAEAYSEIGMKGERRRGKGHDGLYQGLSTATKDTYDALHMQALPPRRAKRSGSGATNFSLLKQAGDVEENPGPTSMDWIWRILFLVGAATGAHSFEQVQLQQSGPELRRPGSSVRLSCKASGYRIKDFLIHWIKNRPEHGLEWIGWIDPEDGETKYAQKFQTKATLTADTSSNTAYMQLSSLTSEDTATYFCARWGDVYYGLMRGHVMDAWGQGTSVTVSSTRIQNPDPAVYQLRDSKSSDKSVCLFTDFDSQTNVSQSKDSDVYITDKTVLDMRSMDFKSNSAVAWSNKSDFACANAFNNSIIPEDTFFPSPESSCGTQSFGLLDPKLCYLLDGILFIYGVILTALFLRVKFSRSADAPAYQQGQNQLYNELNLGRREEYDVLDKRRGRDPEMGGKPQRRKNPQEGLYNELQKDKMAEAYSEIGMKGERRRGKGHDGLYQGLSTATKDTYDALHMQALPPR

SEQ ID NO: 12988 - protein, 957 aa, Artificial Sequence
  Synthetic Polypeptide
MALPVTALLLPLALLLHAARPEVQLVESGGGLVQPGGSLRLSCAASGFSFSDFWMSWVRQAPGKGLEWVATISQAGSEKDYVDSVKGRFTISRDNAKKSLYLQMNSLRAEDTAVYYCASGVYSFDYRGQGTLVTVSSGTGGGGSGGGGSGGGGSEFDIVMTQSPATLSLSPGERATLSCRSSKSLQNVNGNTYLYWFQQKPGQSPQLLIYRMSNLNSGVPDRFSGSGSGTEFTLTISSLEPEDFAVYYCMQHLEYPITFGAGTKLEIKLEDLKNVFPPEVAVFEPSEAEISHTQKATLVCLATGFYPDHVELSWWVNGKEVHSGVSTDPQPLKEQPALNDSRYCLSSRLRVSATFWQNPRNHFRCQVQFYGLSENDEWTQDRAKPVTQIVSAEAWGRADCGSQSFGLLDPKLCYLLDGILFIYGVILTALFLRVKFSRSADAPAYQQGQNQLYNELNLGRREEYDVLDKRRGRDPEMGGKPQRRKNPQEGLYNELQKDKMAEAYSEIGMKGERRRGKGHDGLYQGLSTATKDTYDALHMQALPPRRAKRSGSGATNFSLLKQAGDVEENPGPTSMDWIWRILFLVGAATGAHSFEEVQLVESGGGLVKPGGSLKLSCAASGYTFTSYVMHWVRQAPGKGLEWIGYINPYNDGTKYNEKFQGRVTISSDKSISTAYMELSSLRSEDTAMYYCARGTYYYGTRVFDYWGQGTLVTVSSTRIQNPDPAVYQLRDSKSSDKSVCLFTDFDSQTNVSQSKDSDVYITDKTVLDMRSMDFKSNSAVAWSNKSDFACANAFNNSIIPEDTFFPSPESSCGTQSFGLLDPKLCYLLDGILFIYGVILTALFLRVKFSRSADAPAYQQGQNQLYNELNLGRREEYDVLDKRRGRDPEMGGKPQRRKNPQEGLYNELQKDKMAEAYSEIGMKGERRRGKGHDGLYQGLSTATKDTYDALHMQALPPR

SEQ ID NO: 12989 - protein, 953 aa, Artificial Sequence
  Synthetic Polypeptide
MALPVTALLLPLALLLHAARPEVQLVESGGGLVQPGGSLRLSCAASGFSFSDFWMSWVRQAPGKGLEWVATISQAGSEKDYVDSVKGRFTISRDNAKKSLYLQMNSLRAEDTAVYYCASGVYSFDYRGQGTLVTVSSGTGGGGSGGGGSGGGGSEFDIQMTQSPSSLSASVGDRVTITCKASDHINNWLAWYQQKPGQAPKLLIYGATTLETGVPSRFSGSGSGTDYTLTISSLQPEDFATYYCQQSWNTPWTFGQGTKLEIKRLEDLKNVFPPEVAVFEPSEAEISHTQKATLVCLATGFYPDHVELSWWVNGKEVHSGVSTDPQPLKEQPALNDSRYCLSSRLRVSATFWQNPRNHFRCQVQFYGLSENDEWTQDRAKPVTQIVSAEAWGRADCGSQSFGLLDPKLCYLLDGILFIYGVILTALFLRVKFSRSADAPAYQQGQNQLYNELNLGRREEYDVLDKRRGRDPEMGGKPQRRKNPQEGLYNELQKDKMAEAYSEIGMKGERRRGKGHDGLYQGLSTATKDTYDALHMQALPPRRAKRSGSGATNFSLLKQAGDVEENPGPTSMDWIWRILFLVGAATGAHSFEQVQLQQPGAELVKPGASVKMSCKASGYAFSSYWINWMKQKPGQGLEWIGQIYPGDGDTNYNGKFKGRATLTADTSSSTAYMQLSSLTSEDSAVYFCARSITTVVGCAMDYWGQGTSVTVSSTRIQNPDPAVYQLRDSKSSDKSVCLFTDFDSQTNVSQSKDSDVYITDKTVLDMRSMDFKSNSAVAWSNKSDFACANAFNNSIIPEDTFFPSPESSCGTQSFGLLDPKLCYLLDGILFIYGVILTALFLRVKFSRSADAPAYQQGQNQLYNELNLGRREEYDVLDKRRGRDPEMGGKPQRRKNPQEGLYNELQKDKMAEAYSEIGMKGERRRGKGHDGLYQGLSTATKDTYDALHMQALPPR

SEQ ID NO: 12990 - protein, 955 aa, Artificial Sequence
  Synthetic Polypeptide
MALPVTALLLPLALLLHAARPEVQLVESGGGLVQPGGSLRLSCAASGFSFSDFWMSWVRQAPGKGLEWVATISQAGSEKDYVDSVKGRFTISRDNAKKSLYLQMNSLRAEDTAVYYCASGVYSFDYRGQGTLVTVSSGTGGGGSGGGGSGGGGSEFQIVLSQSPAILSASPGEKVTMTCRASSSVSYMHWYQQKPGSSPKPWIYATSNLASGVPARFSGSGSGTSYSFTISRVEAEDAATYYCQQWTFNPPTFGGGTRLEIKRTVAALEDLKNVFPPEVAVFEPSEAEISHTQKATLVCLATGFYPDHVELSWWVNGKEVHSGVSTDPQPLKEQPALNDSRYCLSSRLRVSATFWQNPRNHFRCQVQFYGLSENDEWTQDRAKPVTQIVSAEAWGRADCGSQSFGLLDPKLCYLLDGILFIYGVILTALFLRVKFSRSADAPAYQQGQNQLYNELNLGRREEYDVLDKRRGRDPEMGGKPQRRKNPQEGLYNELQKDKMAEAYSEIGMKGERRRGKGHDGLYQGLSTATKDTYDALHMQALPPRRAKRSGSGATNFSLLKQAGDVEENPGPTSMDWIWRILFLVGAATGAHSFEQAYLQQSGAELVRPGASVKMSCKASGYTFTSYNMHWVKQTPRQGLEWIGGIYPGNGDTSYNQKFKGKATLTVGKSSSTAYMQLSSLTSEDSAVYFCARYDYNYAMDYWGQGTSVTVSSASTRIQNPDPAVYQLRDSKSSDKSVCLFTDFDSQTNVSQSKDSDVYITDKTVLDMRSMDFKSNSAVAWSNKSDFACANAFNNSIIPEDTFFPSPESSCGTQSFGLLDPKLCYLLDGILFIYGVILTALFLRVKFSRSADAPAYQQGQNQLYNELNLGRREEYDVLDKRRGRDPEMGGKPQRRKNPQEGLYNELQKDKMAEAYSEIGMKGERRRGKGHDGLYQGLSTATKDTYDALHMQALPPR

SEQ ID NO: 12991 - protein, 953 aa, Artificial Sequence
  Synthetic Polypeptide
MALPVTALLLPLALLLHAARPEVQLVESGGGLVQPGGSLRLSCAASGFSFSDFWMSWVRQAPGKGLEWVATISQAGSEKDYVDSVKGRFTISRDNAKKSLYLQMNSLRAEDTAVYYCASGVYSFDYRGQGTLVTVSSGTGGGGSGGGGSGGGGSEFEIVLTQSPATLSLSPGERATLSCRASQSVSSYLAWYQQKPGQAPRLLIYDASNRATGIPARFSGSGSGTDFTLTISSLEPEDFAVYYCQQRSNWPITFGQGTRLEIKLEDLKNVFPPEVAVFEPSEAEISHTQKATLVCLATGFYPDHVELSWWVNGKEVHSGVSTDPQPLKEQPALNDSRYCLSSRLRVSATFWQNPRNHFRCQVQFYGLSENDEWTQDRAKPVTQIVSAEAWGRADCGSQSFGLLDPKLCYLLDGILFIYGVILTALFLRVKFSRSADAPAYQQGQNQLYNELNLGRREEYDVLDKRRGRDPEMGGKPQRRKNPQEGLYNELQKDKMAEAYSEIGMKGERRRGKGHDGLYQGLSTATKDTYDALHMQALPPRRAKRSGSGATNFSLLKQAGDVEENPGPTSMDWIWRILFLVGAATGAHSFEEVQLVESGGGLVQPDRSLRLSCAASGFTFHDYAMHWVRQAPGKGLEWVSTISWNSGTIGYADSVKGRFTISRDNAKNSLYLQMNSLRAEDTALYYCAKDIQYGNYYYGMDVWGQGTTVTVSSTRIQNPDPAVYQLRDSKSSDKSVCLFTDFDSQTNVSQSKDSDVYITDKTVLDMRSMDFKSNSAVAWSNKSDFACANAFNNSIIPEDTFFPSPESSCGTQSFGLLDPKLCYLLDGILFIYGVILTALFLRVKFSRSADAPAYQQGQNQLYNELNLGRREEYDVLDKRRGRDPEMGGKPQRRKNPQEGLYNELQKDKMAEAYSEIGMKGERRRGKGHDGLYQGLSTATKDTYDALHMQALPPR

SEQ ID NO: 12992 - protein, 948 aa, Artificial Sequence
  Synthetic Polypeptide
MALPVTALLLPLALLLHAARPEVQLVESGGGLVQPGGSLRLSCAASGFSFSDFWMSWVRQAPGKGLEWVATISQAGSEKDYVDSVKGRFTISRDNAKKSLYLQMNSLRAEDTAVYYCASGVYSFDYRGQGTLVTVSSGTGGGGSGGGGSGGGGSEFDIQMTQSPSSLSASVGDRVTINCKASQDINSYLSWFQQKPGKAPKTLIYRANRLVDGVPSRFSGSGSGQDYTLTISSLQPEDFATYYCLQYDEFPLTFGGGTKVEIKLEDLKNVFPPEVAVFEPSEAEISHTQKATLVCLATGFYPDHVELSWWVNGKEVHSGVSTDPQPLKEQPALNDSRYCLSSRLRVSATFWQNPRNHFRCQVQFYGLSENDEWTQDRAKPVTQIVSAEAWGRADCGSQSFGLLDPKLCYLLDGILFIYGVILTALFLRVKFSRSADAPAYQQGQNQLYNELNLGRREEYDVLDKRRGRDPEMGGKPQRRKNPQEGLYNELQKDKMAEAYSEIGMKGERRRGKGHDGLYQGLSTATKDTYDALHMQALPPRRAKRSGSGATNFSLLKQAGDVEENPGPTSMDWIWRILFLVGAATGAHSFEQVQLVQSGAEVKKPGASVKVSCKASGYTFTNYDINWVRQAPGQGLEWIGWIYPGDGSTKYNEKFKAKATLTADTSTSTAYMELRSLRSDDTAVYYCASGYEDAMDYWGQGTTVTVSSTRIQNPDPAVYQLRDSKSSDKSVCLFTDFDSQTNVSQSKDSDVYITDKTVLDMRSMDFKSNSAVAWSNKSDFACANAFNNSIIPEDTFFPSPESSCGTQSFGLLDPKLCYLLDGILFIYGVILTALFLRVKFSRSADAPAYQQGQNQLYNELNLGRREEYDVLDKRRGRDPEMGGKPQRRKNPQEGLYNELQKDKMAEAYSEIGMKGERRRGKGHDGLYQGLSTATKDTYDALHMQALPPR

SEQ ID NO: 12993 - protein, 950 aa, Artificial Sequence
  Synthetic Polypeptide
MALPVTALLLPLALLLHAARPEVQLVESGGGLVQPGGSLRLSCAASGFSFSDFWMSWVRQAPGKGLEWVATISQAGSEKDYVDSVKGRFTISRDNAKKSLYLQMNSLRAEDTAVYYCASGVYSFDYRGQGTLVTVSSGTGGGGSGGGGSGGGGSEFDIVMTQTPLSLSVTPGQPASISCKSSQSLLDGDGKTYLNWLLQKPGQSPQRLIYLVSKLDSGVPDRFSGSGSGTDFTLKISRVEAEDVGVYYCWQGTHFPRTFGQGTKLEIKLEDLKNVFPPEVAVFEPSEAEISHTQKATLVCLATGFYPDHVELSWWVNGKEVHSGVSTDPQPLKEQPALNDSRYCLSSRLRVSATFWQNPRNHFRCQVQFYGLSENDEWTQDRAKPVTQIVSAEAWGRADCGSQSFGLLDPKLCYLLDGILFIYGVILTALFLRVKFSRSADAPAYQQGQNQLYNELNLGRREEYDVLDKRRGRDPEMGGKPQRRKNPQEGLYNELQKDKMAEAYSEIGMKGERRRGKGHDGLYQGLSTATKDTYDALHMQALPPRRAKRSGSGATNFSLLKQAGDVEENPGPTSMDWIWRILFLVGAATGAHSFEQVQLVQSGAEVKKPGASVKVSCKASGYTFKDTYIHWVRQAPGQGLEWMGRIDPANGNTKYDPKFQGRVTMTRDTSISTAYMELSRLRSDDTAVYYCARRGGVDWGQGTLVTVSSTRIQNPDPAVYQLRDSKSSDKSVCLFTDFDSQTNVSQSKDSDVYITDKTVLDMRSMDFKSNSAVAWSNKSDFACANAFNNSIIPEDTFFPSPESSCGTQSFGLLDPKLCYLLDGILFIYGVILTALFLRVKFSRSADAPAYQQGQNQLYNELNLGRREEYDVLDKRRGRDPEMGGKPQRRKNPQEGLYNELQKDKMAEAYSEIGMKGERRRGKGHDGLYQGLSTATKDTYDALHMQALPPR

SEQ ID NO: 12994 - protein, 951 aa, Artificial Sequence
  Synthetic Polypeptide
MALPVTALLLPLALLLHAARPEVQLVESGGGLVQPGGSLRLSCAASGFSFSDFWMSWVRQAPGKGLEWVATISQAGSEKDYVDSVKGRFTISRDNAKKSLYLQMNSLRAEDTAVYYCASGVYSFDYRGQGTLVTVSSGTGGGGSGGGGSGGGGSEFDIQMTQSPSSLSASVGDRVTITCKASQDVSTAVAWFQQKPGKAPKLLIYSPSYRYTGVPSRFSGSGSGTDFTLTISSLQPEDFTYYCQQLYSTPYTFGQGTKVEIKLEDLKNVFPPEVAVFEPSEAEISHTQKATLVCLATGFYPDHVELSWWVNGKEVHSGVSTDPQPLKEQPALNDSRYCLSSRLRVSATFWQNPRNHFRCQVQFYGLSENDEWTQDRAKPVTQIVSAEAWGRADCGSQSFGLLDPKLCYLLDGILFIYGVILTALFLRVKFSRSADAPAYQQGQNQLYNELNLGRREEYDVLDKRRGRDPEMGGKPQRRKNPQEGLYNELQKDKMAEAYSEIGMKGERRRGKGHDGLYQGLSTATKDTYDALHMQALPPRRAKRSGSGATNFSLLKQAGDVEENPGPTSMDWIWRILFLVGAATGAHSFEEVQLVQSGAEVKKPGASVKVSCKASGYTFTDYYLDVVVRQAPGQGLEWIGRVNPYNGGTIYNQKFKGRVTLTRDTSTSTAYLELSSLRSEDTAVYYCARDHYRYDPLLDYWGQGTLVTVSSTRIQNPDPAVYQLRDSKSSDKSVCLFTDFDSQTNVSQSKDSDVYITDKTVLDMRSMDFKSNSAVAWSNKSDFACANAFNNSIIPEDTFFPSPESSCGTQSFGLLDPKLCYLLDGILFIYGVILTALFLRVKFSRSADAPAYQQGQNQLYNELNLGRREEYDVLDKRRGRDPEMGGKPQRRKNPQEGLYNELQKDKMAEAYSEIGMKGERRRGKGHDGLYQGLSTATKDTYDALHMQALPPR

SEQ ID NO: 12995 - protein, 957 aa, Artificial Sequence
  Synthetic Polypeptide
MALPVTALLLPLALLLHAARPEVQLVESGGGLVQPGGSLRLSCAASGFSFSDFWMSWVRQAPGKGLEWVATISQAGSEKDYVDSVKGRFTISRDNAKKSLYLQMNSLRAEDTAVYYCASGVYSFDYRGQGTLVTVSSGTGGGGSGGGGSGGGGSEFDIQMTQSPSSLSASVGDRVTITCRASQSVSTSSYNYMHWYQQKPGKPPKLLIKYASNLESGVPSRFSGSGSGTDFTLTISSLQPEDFATYYCQHSWEIPLTFGQGTKVEIKLEDLKNVFPPEVAVFEPSEAEISHTQKATLVCLATGFYPDHVELSWWVNGKEVHSGVSTDPQPLKEQPALNDSRYCLSSRLRVSATFWQNPRNHFRCQVQFYGLSENDEWTQDRAKPVTQIVSAEAWGRADCGSQSFGLLDPKLCYLLDGILFIYGVILTALFLRVKFSRSADAPAYQQGQNQLYNELNLGRREEYDVLDKRRGRDPEMGGKPQRRKNPQEGLYNELQKDKMAEAYSEIGMKGERRRGKGHDGLYQGLSTATKDTYDALHMQALPPRRAKRSGSGATNFSLLKQAGDVEENPGPTSMDWIWRILFLVGAATGAHSFEEVQLVQSGAEVKKPGASVKVSCKASGYSFTDYYMHWVRQAPGQGLEWIGRINPYNGAAFYSQNFKDRVTLTVDTSTSTAYLELSSLRSEDTAVYYCAIERGADLEGYAMDYWGQGTLVTVSSTRIQNPDPAVYQLRDSKSSDKSVCLFTDFDSQTNVSQSKDSDVYITDKTVLDMRSMDFKSNSAVAWSNKSDFACANAFNNSIIPEDTFFPSPESSCGTQSFGLLDPKLCYLLDGILFIYGVILTALFLRVKFSRSADAPAYQQGQNQLYNELNLGRREEYDVLDKRRGRDPEMGGKPQRRKNPQEGLYNELQKDKMAEAYSEIGMKGERRRGKGHDGLYQGLSTATKDTYDALHMQALPPR

SEQ ID NO: 12996 - protein, 955 aa, Artificial Sequence
  Synthetic Polypeptide
MALPVTALLLPLALLLHAARPEVQLVESGGGLVQPGGSLRLSCAASGFSFSDFWMSWVRQAPGKGLEWVATISQAGSEKDYVDSVKGRFTISRDNAKKSLYLQMNSLRAEDTAVYYCASGVYSFDYRGQGTLVTVSSGTGGGGSGGGGSGGGGSEFEIVLTQSPATLSASPGERVTLTCRASSNVISSYVHWYQQKPGSSPRLFLYSTSNLASGVPSRFSGSGSGTDFTFTISSLEAEDAATYYCQQYSGYPLTFGQGTRLEIKLEDLKNVFPPEVAVFEPSEAEISHTQKATLVCLATGFYPDHVELSWWVNGKEVHSGVSTDPQPLKEQPALNDSRYCLSSRLRVSATFWQNPRNHFRCQVQFYGLSENDEWTQDRAKPVTQIVSAEAWGRADCGSQSFGLLDPKLCYLLDGILFIYGVILTALFLRVKFSRSADAPAYQQGQNQLYNELNLGRREEYDVLDKRRGRDPEMGGKPQRRKNPQEGLYNELQKDKMAEAYSEIGMKGERRRGKGHDGLYQGLSTATKDTYDALHMQALPPRRAKRSGSGATNFSLLKQAGDVEENPGPTSMDWIWRILFLVGAATGAHSFEQVQLQESGPGLVKPSETLSLTCAVSGYSITSAYYWNWIRQPPGKGLEWIGYISYDGRNNYNPSLKNRITINPDTSKNQFSLQLNSVTPEDTAVYYCAREGDYDVGNYYAMDYWGQGTLVTVSSTRIQNPDPAVYQLRDSKSSDKSVCLFTDFDSQTNVSQSKDSDVYITDKTVLDMRSMDFKSNSAVAWSNKSDFACANAFNNSIIPEDTFFPSPESSCGTQSFGLLDPKLCYLLDGILFIYGVILTALFLRVKFSRSADAPAYQQGQNQLYNELNLGRREEYDVLDKRRGRDPEMGGKPQRRKNPQEGLYNELQKDKMAEAYSEIGMKGERRRGKGHDGLYQGLSTATKDTYDALHMQALPPR

SEQ ID NO: 12997 - protein, 955 aa, Artificial Sequence
  Synthetic Polypeptide
MALPVTALLLPLALLLHAARPEVQLVESGGGLVQPGGSLRLSCAASGFSFSDFWMSWVRQAPGKGLEWVATISQAGSEKDYVDSVKGRFTISRDNAKKSLYLQMNSLRAEDTAVYYCASGVYSFDYRGQGTLVTVSSGTGGGGSGGGGSGGGGSEFEIVLTQSPATLSLSPGERATLSCRASSNVISSYVHWYQQKPGQAPRLLIYSTSNLASGIPARFSGSGSGTDFTLTISSLEPEDFAVYYCQQYSGYPLTFGQGTRLEIKLEDLKNVFPPEVAVFEPSEAEISHTQKATLVCLATGFYPDHVELSWWVNGKEVHSGVSTDPQPLKEQPALNDSRYCLSSRLRVSATFWQNPRNHFRCQVQFYGLSENDEWTQDRAKPVTQIVSAEAWGRADCGSQSFGLLDPKLCYLLDGILFIYGVILTALFLRVKFSRSADAPAYQQGQNQLYNELNLGRREEYDVLDKRRGRDPEMGGKPQRRKNPQEGLYNELQKDKMAEAYSEIGMKGERRRGKGHDGLYQGLSTATKDTYDALHMQALPPRRAKRSGSGATNFSLLKQAGDVEENPGPTSMDWIWRILFLVGAATGAHSFEEVQLVESGGGLVQPGRSLRLSCAASGYSITSAYYWNWVRQAPGKGLEWVSYISYDGRNNYNPSLKNRFTISRDNAKKSLYLQMNSLRAEDTALYYCAKEGDYDVGNYYAMDYWGQGTTVTVSSTRIQNPDPAVYQLRDSKSSDKSVCLFTDFDSQTNVSQSKDSDVYITDKTVLDMRSMDFKSNSAVAWSNKSDFACANAFNNSIIPEDTFFPSPESSCGTQSFGLLDPKLCYLLDGILFIYGVILTALFLRVKFSRSADAPAYQQGQNQLYNELNLGRREEYDVLDKRRGRDPEMGGKPQRRKNPQEGLYNELQKDKMAEAYSEIGMKGERRRGKGHDGLYQGLSTATKDTYDALHMQALPPR

SEQ ID NO: 12998 - protein, 954 aa, Artificial Sequence
  Synthetic Polypeptide
MALPVTALLLPLALLLHAARPEVQLVESGGGLVQPGGSLRLSCAASGFSFSDFWMSWVRQAPGKGLEWVATISQAGSEKDYVDSVKGRFTISRDNAKKSLYLQMNSLRAEDTAVYYCASGVYSFDYRGQGTLVTVSSGTGGGGSGGGGSGGGGSEFDVVMTQTPLSLPVSLGDQASISCRSSQSLVHSNGNTYLRWYLQKPGQSPKVLIYKVSNRVSGVPDRFSGSGSGTDFTLKINRVEAEDLGVYFCSQSTHVPWTFGGGTKLEIKLEDLKNVFPPEVAVFEPSEAEISHTQKATLVCLATGFYPDHVELSWWVNGKEVHSGVSTDPQPLKEQPALNDSRYCLSSRLRVSATFWQNPRNHFRCQVQFYGLSENDEWTQDRAKPVTQIVSAEAWGRADCGSQSFGLLDPKLCYLLDGILFIYGVILTALFLRVKFSRSADAPAYQQGQNQLYNELNLGRREEYDVLDKRRGRDPEMGGKPQRRKNPQEGLYNELQKDKMAEAYSEIGMKGERRRGKGHDGLYQGLSTATKDTYDALHMQALPPRRAKRSGSGATNFSLLKQAGDVEENPGPTSMDWIWRILFLVGAATGAHSFEGVKLDETGGGLVQPGGAMKLSCVTSGFTFGHYWMNWVRQSPEKGLEWVAQFRNKPYNYETYYSDSVKGRFTISRDDSKSSVYLQMNNLRVEDTGIYYCTGASYGMEYLGQGTSVTVSTTRIQNPDPAVYQLRDSKSSDKSVCLFTDFDSQTNVSQSKDSDVYITDKTVLDMRSMDFKSNSAVAWSNKSDFACANAFNNSIIPEDTFFPSPESSCGTQSFGLLDPKLCYLLDGILFIYGVILTALFLRVKFSRSADAPAYQQGQNQLYNELNLGRREEYDVLDKRRGRDPEMGGKPQRRKNPQEGLYNELQKDKMAEAYSEIGMKGERRRGKGHDGLYQGLSTATKDTYDALHMQALPPR

SEQ ID NO: 12999 - protein, 960 aa, Artificial Sequence
  Synthetic Polypeptide
MALPVTALLLPLALLLHAARPEVQLVESGGGLVQPGGSLRLSCAASGFSFSDFWMSWVRQAPGKGLEWVATISQAGSEKDYVDSVKGRFTISRDNAKKSLYLQMNSLRAEDTAVYYCASGVYSFDYRGQGTLVTVSSGTGGGGSGGGGSGGGGSEFQVQLVESGGNLVQPGGSLRLSCAASGFTFGSFSMSWVRQAPGGGLEWVAGLSARSSLTHYADSVKGRFTISRDNAKNSVYLQMNSLRVEDTAVYYCARRSYDSSGYWGHFYSYMDVWGQGTLVTVSLEDLKNVFPPEVAVFEPSEAEISHTQKATLVCLATGFYPDHVELSWWVNGKEVHSGVSTDPQPLKEQPALNDSRYCLSSRLRVSATFWQNPRNHFRCQVQFYGLSENDEWTQDRAKPVTQIVSAEAWGRADCGSQSFGLLDPKLCYLLDGILFIYGVILTALFLRVKFSRSADAPAYQQGQNQLYNELNLGRREEYDVLDKRRGRDPEMGGKPQRRKNPQEGLYNELQKDKMAEAYSEIGMKGERRRGKGHDGLYQGLSTATKDTYDALHMQALPPRRAKRSGSGATNFSLLKQAGDVEENPGPTSMDWIWRILFLVGAATGAHSFESVLTQPSSVSAAPGQKVTISCSGSTSNIGNNYVSWYQQHPGKAPKLMIYDVSKRPSGVPDRFSGSKSGNSASLDISGLQSEDEADYYCAAWDDSLSEFLFGTGTKLTVLGTRIQNPDPAVYQLRDSKSSDKSVCLFTDFDSQTNVSQSKDSDVYITDKTVLDMRSMDFKSNSAVAWSNKSDFACANAFNNSIIPEDTFFPSPESSCGTQSFGLLDPKLCYLLDGILFIYGVILTALFLRVKFSRSADAPAYQQGQNQLYNELNLGRREEYDVLDKRRGRDPEMGGKPQRRKNPQEGLYNELQKDKMAEAYSEIGMKGERRRGKGHDGLYQGLSTATKDTYDALHMQALPPR

SEQ ID NO: 13000 - protein, 955 aa, Artificial Sequence
  Synthetic Polypeptide
MALPVTALLLPLALLLHAARPEVQLVESGGGLVQPGGSLRLSCAASGFSFSDFWMSWVRQAPGKGLEWVATISQAGSEKDYVDSVKGRFTISRDNAKKSLYLQMNSLRAEDTAVYYCASGVYSFDYRGQGTLVTVSSGTGGGGSGGGGSGGGGSEFDVVMTQSPSSLSASVGDRVTITCQSSLDISHYLNWYQQKPGKAPKLLIYDASNLETGVPSRFSGSGSGTHFTFTISSLQPEDFATYYCQQYDNLPLTFGGGTKLEIKRLEDLKNVFPPEVAVFEPSEAEISHTQKATLVCLATGFYPDHVELSWWVNGKEVHSGVSTDPQPLKEQPALNDSRYCLSSRLRVSATFWQNPRNHFRCQVQFYGLSENDEWTQDRAKPVTQIVSAEAWGRADCGSQSFGLLDPKLCYLLDGILFIYGVILTALFLRVKFSRSADAPAYQQGQNQLYNELNLGRREEYDVLDKRRGRDPEMGGKPQRRKNPQEGLYNELQKDKMAEAYSEIGMKGERRRGKGHDGLYQGLSTATKDTYDALHMQALPPRRAKRSGSGATNFSLLKQAGDVEENPGPTSMDWIWRILFLVGAATGAHSFEQVQLVQSGGGVVQPGGSLRVSCAASGVTLSDYGMHWVRQAPGKGLEWVAFIRNDGSDKYYADSVKGRFTISRDNSEKTVSLQMSSLRAEDTAVYYCAKNGESGPLDYWYLDLWGRGTLVTVSSTRIQNPDPAVYQLRDSKSSDKSVCLFTDFDSQTNVSQSKDSDVYITDKTVLDMRSMDFKSNSAVAWSNKSDFACANAFNNSIIPEDTFFPSPESSCGTQSFGLLDPKLCYLLDGILFIYGVILTALFLRVKFSRSADAPAYQQGQNQLYNELNLGRREEYDVLDKRRGRDPEMGGKPQRRKNPQEGLYNELQKDKMAEAYSEIGMKGERRRGKGHDGLYQGLSTATKDTYDALHMQALPPR

SEQ ID NO: 13001 - protein, 959 aa, Artificial Sequence
  Synthetic Polypeptide
MALPVTALLLPLALLLHAARPEVQLVESGGGLVQPGGSLRLSCAASGFSFSDFWMSWVRQAPGKGLEWVATISQAGSEKDYVDSVKGRFTISRDNAKKSLYLQMNSLRAEDTAVYYCASGVYSFDYRGQGTLVTVSSGTGGGGSGGGGSGGGGSEFSYELTQPPSVSGTPGQRVAISCSGSSSNIGTRMVTWYQHVPGTAPKLLIFNNNQRPSGVPDRFSASKSGTSASLAIIGLQSDDEADYYCATWDDNVKSYVFGTGTKVTVLGSRLEDLKNVFPPEVAVFEPSEAEISHTQKATLVCLATGFYPDHVELSWWVNGKEVHSGVSTDPQPLKEQPALNDSRYCLSSRLRVSATFWQNPRNHFRCQVQFYGLSENDEWTQDRAKPVTQIVSAEAWGRADCGSQSFGLLDPKLCYLLDGILFIYGVILTALFLRVKFSRSADAPAYQQGQNQLYNELNLGRREEYDVLDKRRGRDPEMGGKPQRRKNPQEGLYNELQKDKMAEAYSEIGMKGERRRGKGHDGLYQGLSTATKDTYDALHMQALPPRRAKRSGSGATNFSLLKQAGDVEENPGPTSMDWIWRILFLVGAATGAHSFELEMAQVQLQQWGAGLLKPSETLSLTCAVYGGSFSGYYWSWIRQPPGKGLEWIGEINHSGSTNYNPSLKSRVTISVDTSKNQFSLKLSSVTAADTAVYYCARAPQSWYVGDVWGQGTLVTVSSTRIQNPDPAVYQLRDSKSSDKSVCLFTDFDSQTNVSQSKDSDVYITDKTVLDMRSMDFKSNSAVAWSNKSDFACANAFNNSIIPEDTFFPSPESSCGTQSFGLLDPKLCYLLDGILFIYGVILTALFLRVKFSRSADAPAYQQGQNQLYNELNLGRREEYDVLDKRRGRDPEMGGKPQRRKNPQEGLYNELQKDKMAEAYSEIGMKGERRRGKGHDGLYQGLSTATKDTYDALHMQALPPR

SEQ ID NO: 13002 - protein, 956 aa, Artificial Sequence
  Synthetic Polypeptide
MALPVTALLLPLALLLHAARPEVQLVESGGGLVQPGGSLRLSCAASGFSFSDFWMSWVRQAPGKGLEWVATISQAGSEKDYVDSVKGRFTISRDNAKKSLYLQMNSLRAEDTAVYYCASGVYSFDYRGQGTLVTVSSGTGGGGSGGGGSGGGGSEFQSVLTQPPSLSVAPGKTASITCGGNNIGMKSVHWYQQRPGQAPVLVIYYDSDRPSGIPGRFSGSNSGNTATLTISRVEAGDEADYYCQVWDTTGDHPGYVFGTGTKVTVLLEDLKNVFPPEVAVFEPSEAEISHTQKATLVCLATGFYPDHVELSWWVNGKEVHSGVSTDPQPLKEQPALNDSRYCLSSRLRVSATFWQNPRNHFRCQVQFYGLSENDEWTQDRAKPVTQIVSAEAWGRADCGSQSFGLLDPKLCYLLDGILFIYGVILTALFLRVKFSRSADAPAYQQGQNQLYNELNLGRREEYDVLDKRRGRDPEMGGKPQRRKNPQEGLYNELQKDKMAEAYSEIGMKGERRRGKGHDGLYQGLSTATKDTYDALHMQALPPRRAKRSGSGATNFSLLKQAGDVEENPGPTSMDWIWRILFLVGAATGAHSFEQVQLVQSGAEVKKPGSSVKVSCKASGGTFSSYAISWVRQAPGQGLEWMGGIIPIFGTANYAQKFQGRVTITADESTSTAYMELSSLRSEDTAVYYCARGVYGYSGSAPYDEWGQGTLVTVSSTRIQNPDPAVYQLRDSKSSDKSVCLFTDFDSQTNVSQSKDSDVYITDKTVLDMRSMDFKSNSAVAWSNKSDFACANAFNNSIIPEDTFFPSPESSCGTQSFGLLDPKLCYLLDGILFIYGVILTALFLRVKFSRSADAPAYQQGQNQLYNELNLGRREEYDVLDKRRGRDPEMGGKPQRRKNPQEGLYNELQKDKMAEAYSEIGMKGERRRGKGHDGLYQGLSTATKDTYDALHMQALPPR

SEQ ID NO: 13003 - protein, 954 aa, Artificial Sequence
  Synthetic Polypeptide
MALPVTALLLPLALLLHAARPEVQLVESGGGLVQPGGSLRLSCAASGFSFSDFWMSWVRQAPGKGLEWVATISQAGSEKDYVDSVKGRFTISRDNAKKSLYLQMNSLRAEDTAVYYCASGVYSFDYRGQGTLVTVSSGTGGGGSGGGGSGGGGSEFEVQLVESGGGLVQPGRSLRLSCAASGFTFDDYAMHWVRQAPGKGLEWVSGISWNSGSIGYADSVKGRFTISRDNAKNSLYLQMNSLRAEDTALYYCAKDKGGGYYDFWSGSDYWGQGTLVTVSSLEDLKNVFPPEVAVFEPSEAEISHTQKATLVCLATGFYPDHVELSWWVNGKEVHSGVSTDPQPLKEQPALNDSRYCLSSRLRVSATFWQNPRNHFRCQVQFYGLSENDEWTQDRAKPVTQIVSAEAWGRADCGSQSFGLLDPKLCYLLDGILFIYGVILTALFLRVKFSRSADAPAYQQGQNQLYNELNLGRREEYDVLDKRRGRDPEMGGKPQRRKNPQEGLYNELQKDKMAEAYSEIGMKGERRRGKGHDGLYQGLSTATKDTYDALHMQALPPRRAKRSGSGATNFSLLKQAGDVEENPGPTSMDWIWRILFLVGAATGAHSFESSELTQDPAVSVALGQTVRITCQGDSLRSYYASWYQQKPGQAPVLVIYGKNNRPSGIPDRFSGSSSGNTASLTITGAQAEDEADYYCNSRDSSGWVFGGGTKLTVLTRIQNPDPAVYQLRDSKSSDKSVCLFTDFDSQTNVSQSKDSDVYITDKTVLDMRSMDFKSNSAVAWSNKSDFACANAFNNSIIPEDTFFPSPESSCGTQSFGLLDPKLCYLLDGILFIYGVILTALFLRVKFSRSADAPAYQQGQNQLYNELNLGRREEYDVLDKRRGRDPEMGGKPQRRKNPQEGLYNELQKDKMAEAYSEIGMKGERRRGKGHDGLYQGLSTATKDTYDALHMQALPPR

SEQ ID NO: 13004 - protein, 963 aa, Artificial Sequence
  Synthetic Polypeptide
MALPVTALLLPLALLLHAARPEVQLVESGGGLVQPGGSLRLSCAASGFSFSDFWMSWVRQAPGKGLEWVATISQAGSEKDYVDSVKGRFTISRDNAKKSLYLQMNSLRAEDTAVYYCASGVYSFDYRGQGTLVTVSSGTGGGGSGGGGSGGGGSEFEVQLQQSGPGLVKPSQTLSLTCAISGDSVLSNSDTWNWIRQSPSRGLEWLGRTYHRSTWYDDYASSVRGRVSINVDTSKNQYSLQLNAVTPEDTGVYYCARDRLQDGNSWSDAFDVWGQGTMVTVSSLEDLKNVFPPEVAVFEPSEAEISHTQKATLVCLATGFYPDHVELSWWVNGKEVHSGVSTDPQPLKEQPALNDSRYCLSSRLRVSATFWQNPRNHFRCQVQFYGLSENDEWTQDRAKPVTQIVSAEAWGRADCGSQSFGLLDPKLCYLLDGILFIYGVILTALFLRVKFSRSADAPAYQQGQNQLYNELNLGRREEYDVLDKRRGRDPEMGGKPQRRKNPQEGLYNELQKDKMAEAYSEIGMKGERRRGKGHDGLYQGLSTATKDTYDALHMQALPPRRAKRSGSGATNFSLLKQAGDVEENPGPTSMDWIWRILFLVGAATGAHSFEQSALTQPASVSGSPGQSITISCTGTSSDVGGYNYVSWYQQHPGKAPKLMIYDVSNRPSGVSNRFSGSKSGNTASLTISGLQAEDEADYYCSSYTSSSTLVYVFGTGTKVTVLTRIQNPDPAVYQLRDSKSSDKSVCLFTDFDSQTNVSQSKDSDVYITDKTVLDMRSMDFKSNSAVAWSNKSDFACANAFNNSIIPEDTFFPSPESSCGTQSFGLLDPKLCYLLDGILFIYGVILTALFLRVKFSRSADAPAYQQGQNQLYNELNLGRREEYDVLDKRRGRDPEMGGKPQRRKNPQEGLYNELQKDKMAEAYSEIGMKGERRRGKGHDGLYQGLSTATKDTYDALHMQALPPR

SEQ ID NO: 13005 - protein, 941 aa, Artificial Sequence
  Synthetic Polypeptide
MALPVTALLLPLALLLHAARPEVQLVESGGGLVQPGGSLRLSCAASGFSFSDFWMSWVRQAPGKGLEWVATISQAGSEKDYVDSVKGRFTISRDNAKKSLYLQMNSLRAEDTAVYYCASGVYSFDYRGQGTLVTVSSGTGGGGSGGGGSGGGGSEFQVQLVQSGAEVKKPGASVKVSCKASGYTFTSYDINWVRQATGQGLEWMGWMNPNSGNTGYAQKFQGRVTMTRNTSISTAYMELSSLRSEDTAVYYCARGDSTKVEIKLEDLKNVFPPEVAVFEPSEAEISHTQKATLVCLATGFYPDHVELSWWVNGKEVHSGVSTDPQPLKEQPALNDSRYCLSSRLRVSATFWQNPRNHFRCQVQFYGLSENDEWTQDRAKPVTQIVSAEAWGRADCGSQSFGLLDPKLCYLLDGILFIYGVILTALFLRVKFSRSADAPAYQQGQNQLYNELNLGRREEYDVLDKRRGRDPEMGGKPQRRKNPQEGLYNELQKDKMAEAYSEIGMKGERRRGKGHDGLYQGLSTATKDTYDALHMQALPPRRAKRSGSGATNFSLLKQAGDVEENPGPTSMDWIWRILFLVGAATGAHSFEQSVLTQPRSVSGSPGQSVTISCTGTSSDVGGYNYVSWYQQHPGEAPKLIIYDADKRPSGISNRFSSGKSGNTASLTISGLQVEDEADYYCCSYAGGSTWVFGGGTKVTVLTRIQNPDPAVYQLRDSKSSDKSVCLFTDFDSQTNVSQSKDSDVYITDKTVLDMRSMDFKSNSAVAWSNKSDFACANAFNNSIIPEDTFFPSPESSCGTQSFGLLDPKLCYLLDGILFIYGVILTALFLRVKFSRSADAPAYQQGQNQLYNELNLGRREEYDVLDKRRGRDPEMGGKPQRRKNPQEGLYNELQKDKMAEAYSEIGMKGERRRGKGHDGLYQGLSTATKDTYDALHMQALPPR

SEQ ID NO: 13006 - protein, 963 aa, Artificial Sequence
  Synthetic Polypeptide
MALPVTALLLPLALLLHAARPEVQLVESGGGLVQPGGSLRLSCAASGFSFSDFWMSWVRQAPGKGLEWVATISQAGSEKDYVDSVKGRFTISRDNAKKSLYLQMNSLRAEDTAVYYCASGVYSFDYRGQGTLVTVSSGTGGGGSGGGGSGGGGSEFEVQLQQSGPGLVKPSQTLSLTCAISGDSVSSNSAAWNWIRQSPSRGLEWLGRTYYRSKWYSDYAVSVKSRITINPDTSKNQFSLQLNSVTPEDTAVYYCARDPYDFWSGYPDAFDIWGQGTMVTVSSLEDLKNVFPPEVAVFEPSEAEISHTQKATLVCLATGFYPDHVELSWWVNGKEVHSGVSTDPQPLKEQPALNDSRYCLSSRLRVSATFWQNPRNHFRCQVQFYGLSENDEWTQDRAKPVTQIVSAEAWGRADCGSQSFGLLDPKLCYLLDGILFIYGVILTALFLRVKFSRSADAPAYQQGQNQLYNELNLGRREEYDVLDKRRGRDPEMGGKPQRRKNPQEGLYNELQKDKMAEAYSEIGMKGERRRGKGHDGLYQGLSTATKDTYDALHMQALPPRRAKRSGSGATNFSLLKQAGDVEENPGPTSMDWIWRILFLVGAATGAHSFEQSALTQPASVSGSPGQSITISCTGTSSDVGGYNYVSWYQQHPGKAPKVIISEVNNRPSGVSHRFSGSKSGNTASLTISGLQAEDEADYFCSSYTSGRTLYVFGTGSKVTVLGTRIQNPDPAVYQLRDSKSSDKSVCLFTDFDSQTNVSQSKDSDVYITDKTVLDMRSMDFKSNSAVAWSNKSDFACANAFNNSIIPEDTFFPSPESSCGTQSFGLLDPKLCYLLDGILFIYGVILTALFLRVKFSRSADAPAYQQGQNQLYNELNLGRREEYDVLDKRRGRDPEMGGKPQRRKNPQEGLYNELQKDKMAEAYSEIGMKGERRRGKGHDGLYQGLSTATKDTYDALHMQALPPR

SEQ ID NO: 13007 - protein, 962 aa, Artificial Sequence
  Synthetic Polypeptide
MALPVTALLLPLALLLHAARPEVQLVESGGGLVQPGGSLRLSCAASGFSFSDFWMSWVRQAPGKGLEWVATISQAGSEKDYVDSVKGRFTISRDNAKKSLYLQMNSLRAEDTAVYYCASGVYSFDYRGQGTLVTVSSGTGGGGSGGGGSGGGGSEFQSALTQPASASGSPGQSVTISCTGTSSDVGGYNYVSWYQQHPGKAPKLMIYDVSNRPSGVSNRFSGSKSGNTASLTISGLQAEDEADYYCSSYTSSSTLYVFGTGTQLTVLLEDLKNVFPPEVAVFEPSEAEISHTQKATLVCLATGFYPDHVELSWWVNGKEVHSGVSTDPQPLKEQPALNDSRYCLSSRLRVSATFWQNPRNHFRCQVQFYGLSENDEWTQDRAKPVTQIVSAEAWGRADCGSQSFGLLDPKLCYLLDGILFIYGVILTALFLRVKFSRSADAPAYQQGQNQLYNELNLGRREEYDVLDKRRGRDPEMGGKPQRRKNPQEGLYNELQKDKMAEAYSEIGMKGERRRGKGHDGLYQGLSTATKDTYDALHMQALPPRRAKRSGSGATNFSLLKQAGDVEENPGPTSMDWIWRILFLVGAATGAHSFEEVQLQQSGPGLVKPSQTLSLTCAISGDSMLSNSDTWNWIRQSPSRGLEWLGRTYHRSTWYDDYASSVRGRVSINVDTSKNQYSLQLNAVTPEDTGVYYCARVRLQDGNSWSDAFDVWGQGTMVTVSSTRIQNPDPAVYQLRDSKSSDKSVCLFTDFDSQTNVSQSKDSDVYITDKTVLDMRSMDFKSNSAVAWSNKSDFACANAFNNSIIPEDTFFPSPESSCGTQSFGLLDPKLCYLLDGILFIYGVILTALFLRVKFSRSADAPAYQQGQNQLYNELNLGRREEYDVLDKRRGRDPEMGGKPQRRKNPQEGLYNELQKDKMAEAYSEIGMKGERRRGKGHDGLYQGLSTATKDTYDALHMQALPPR

SEQ ID NO: 13008 - protein, 962 aa, Artificial Sequence
  Synthetic Polypeptide
MALPVTALLLPLALLLHAARPEVQLVESGGGLVQPGGSLRLSCAASGFSFSDFWMSWVRQAPGKGLEWVATISQAGSEKDYVDSVKGRFTISRDNAKKSLYLQMNSLRAEDTAVYYCASGVYSFDYRGQGTLVTVSSGTGGGGSGGGGSGGGGSEFDVMLTQTPLSLPVSLGDQASISCRSSQSILHSTGDTYLEWYLQKPGQSPKLLINKVSNRLSGVPDRFSGSGSGTDFTLKISRVEAEDLGVYYCFQGSHVPWTFGGGTKLEIKRADAAPTVSIFPLEDLKNVFPPEVAVFEPSEAEISHTQKATLVCLATGFYPDHVELSWWVNGKEVHSGVSTDPQPLKEQPALNDSRYCLSSRLRVSATFWQNPRNHFRCQVQFYGLSENDEWTQDRAKPVTQIVSAEAWGRADCGSQSFGLLDPKLCYLLDGILFIYGVILTALFLRVKFSRSADAPAYQQGQNQLYNELNLGRREEYDVLDKRRGRDPEMGGKPQRRKNPQEGLYNELQKDKMAEAYSEIGMKGERRRGKGHDGLYQGLSTATKDTYDALHMQALPPRRAKRSGSGATNFSLLKQAGDVEENPGPTSMDWIWRILFLVGAATGAHSFEQVKLQQSGPSLVKPGASVKMSCKASGYTFTDFYMKWVKQSHGKSLEWIGDINPNIGDTFYNQKFKGKATLTVDKSSSTAYMQLNSLTSEDSAVYFCSVGYFDVWGAGTTVTVSSTRIQNPDPAVYQLRDSKSSDKSVCLFTDFDSQTNVSQSKDSDVYITDKTVLDMRSMDFKSNSAVAWSNKSDFACANAFNNSIIPEDTFFPSPESSCGTQSFGLLDPKLCYLLDGILFIYGVILTALFLRVKFSRSADAPAYQQGQNQLYNELNLGRREEYDVLDKRRGRDPEMGGKPQRRKNPQEGLYNELQKDKMAEAYSEIGMKGERRRGKGHDGLYQGLSTATKDTYDALHMQALPPR

SEQ ID NO: 13009 - protein, 958 aa, Artificial Sequence
  Synthetic Polypeptide
MALPVTALLLPLALLLHAARPEVQLVESGGGLVQPGGSLRLSCAASGFSFSDFWMSWVRQAPGKGLEWVATISQAGSEKDYVDSVKGRFTISRDNAKKSLYLQMNSLRAEDTAVYYCASGVYSFDYRGQGTLVTVSSGTGGGGSGGGGSGGGGSEFEIVLTQSPATLSLSPGERATLSCRASQSVSIYLAWYQQKPGQAPRLLIYDASNRATGIPARFSGSGSGTDFTLTISSLEPEDFAVYYCQQRSNWPPFTFGPGTKVDIKLEDLKNVFPPEVAVFEPSEAEISHTQKATLVCLATGFYPDHVELSWWVNGKEVHSGVSTDPQPLKEQPALNDSRYCLSSRLRVSATFWQNPRNHFRCQVQFYGLSENDEWTQDRAKPVTQIVSAEAWGRADCGSQSFGLLDPKLCYLLDGILFIYGVILTALFLRVKFSRSADAPAYQQGQNQLYNELNLGRREEYDVLDKRRGRDPEMGGKPQRRKNPQEGLYNELQKDKMAEAYSEIGMKGERRRGKGHDGLYQGLSTATKDTYDALHMQALPPRRAKRSGSGATNFSLLKQAGDVEENPGPTSMDWIWRILFLVGAATGAHSFEQVQLVESGGGVVQPGRSLRLSCAASGFTFSSYGMHWVRQAPGKGLEWVAVIWDDGSNKYYVDSVKGRFTISRDNSKNTLYLQMNSLRAEDTAVYYCARDDYYGSGSFNSYYGTDVWGQGTTVTVSSTRIQNPDPAVYQLRDSKSSDKSVCLFTDFDSQTNVSQSKDSDVYITDKTVLDMRSMDFKSNSAVAWSNKSDFACANAFNNSIIPEDTFFPSPESSCGTQSFGLLDPKLCYLLDGILFIYGVILTALFLRVKFSRSADAPAYQQGQNQLYNELNLGRREEYDVLDKRRGRDPEMGGKPQRRKNPQEGLYNELQKDKMAEAYSEIGMKGERRRGKGHDGLYQGLSTATKDTYDALHMQALPPR

SEQ ID NO: 13010 - protein, 943 aa, Artificial Sequence
  Synthetic Polypeptide
MALPVTALLLPLALLLHAARPEVQLVESGGGLVQPGGSLRLSCAASGFSFSDFWMSWVRQAPGKGLEWVATISQAGSEKDYVDSVKGRFTISRDNAKKSLYLQMNSLRAEDTAVYYCASGVYSFDYRGQGTLVTVSSGTGGGGSGGGGSGGGGSEFDIQMTQSPSSLSASVGDRVTITCRASQGISSWLAWYQQKPEKAPKSLIYAASSLQSGVPSRFSGSGSGTDFTLTISSLQPEDFATYYCQQYNSYPYTFGQGTKLEIKLEDLKNVFPPEVAVFEPSEAEISHTQKATLVCLATGFYPDHVELSWWVNGKEVHSGVSTDPQPLKEQPALNDSRYCLSSRLRVSATFWQNPRNHFRCQVQFYGLSENDEWTQDRAKPVTQIVSAEAWGRADCGSQSFGLLDPKLCYLLDGILFIYGVILTALFLRVKFSRSADAPAYQQGQNQLYNELNLGRREEYDVLDKRRGRDPEMGGKPQRRKNPQEGLYNELQKDKMAEAYSEIGMKGERRRGKGHDGLYQGLSTATKDTYDALHMQALPPRRAKRSGSGATNFSLLKQAGDVEENPGPTSMDWIWRILFLVGAATGAHSFEEVQLVQSGGGLVHPGGSLRLSCAGSGFTFSTYLMYWVRQAPGKTLEWVSAIGSGGDTYYADSVKGRFTISRDNAKNSLYLQMNSLRAEDMAVYYCARGLGYWGQGTLVTVSSTRIQNPDPAVYQLRDSKSSDKSVCLFTDFDSQTNVSQSKDSDVYITDKTVLDMRSMDFKSNSAVAWSNKSDFACANAFNNSIIPEDTFFPSPESSCGTQSFGLLDPKLCYLLDGILFIYGVILTALFLRVKFSRSADAPAYQQGQNQLYNELNLGRREEYDVLDKRRGRDPEMGGKPQRRKNPQEGLYNELQKDKMAEAYSEIGMKGERRRGKGHDGLYQGLSTATKDTYDALHMQALPPR

SEQ ID NO: 13011 - protein, 962 aa, Artificial Sequence
  Synthetic Polypeptide
MALPVTALLLPLALLLHAARPEVQLVESGGGLVQPGGSLRLSCAASGFSFSDFWMSWVRQAPGKGLEWVATISQAGSEKDYVDSVKGRFTISRDNAKKSLYLQMNSLRAEDTAVYYCASGVYSFDYRGQGTLVTVSSGTGGGGSGGGGSGGGGSEFLPVLTQPPSVSVAPGKTARITCGGNNIGSKSVHWYQQKPGQAPVLVVYDDSDRPSGIPERFSGSNSGNTATLTISRVEAGDEADYYCQVWDSSSDYVVFGGGTKLTVLLEDLKNVFPPEVAVFEPSEAEISHTQKATLVCLATGFYPDHVELSWWVNGKEVHSGVSTDPQPLKEQPALNDSRYCLSSRLRVSATFWQNPRNHFRCQVQFYGLSENDEWTQDRAKPVTQIVSAEAWGRADCGSQSFGLLDPKLCYLLDGILFIYGVILTALFLRVKFSRSADAPAYQQGQNQLYNELNLGRREEYDVLDKRRGRDPEMGGKPQRRKNPQEGLYNELQKDKMAEAYSEIGMKGERRRGKGHDGLYQGLSTATKDTYDALHMQALPPRRAKRSGSGATNFSLLKQAGDVEENPGPTSMDWIWRILFLVGAATGAHSFEEVQLVQSGAEVKKPGESLKISCKGSGYSFTSYWIGWVRQMPGKGLEWMGIIYPGDSDTRYSPSFQGQVTISADKSISTAYLQWSSLKASDTAMYYCARQVWGWQGGMYPRSNWWYNLDSWGQGTLVTVSSTRIQNPDPAVYQLRDSKSSDKSVCLFTDFDSQTNVSQSKDSDVYITDKTVLDMRSMDFKSNSAVAWSNKSDFACANAFNNSIIPEDTFFPSPESSCGTQSFGLLDPKLCYLLDGILFIYGVILTALFLRVKFSRSADAPAYQQGQNQLYNELNLGRREEYDVLDKRRGRDPEMGGKPQRRKNPQEGLYNELQKDKMAEAYSEIGMKGERRRGKGHDGLYQGLSTATKDTYDALHMQALPPR

SEQ ID NO: 13012 - protein, 955 aa, Artificial Sequence
  Synthetic Polypeptide
MALPVTALLLPLALLLHAARPEVQLVESGGGLVQPGGSLRLSCAASGFSFSDFWMSWVRQAPGKGLEWVATISQAGSEKDYVDSVKGRFTISRDNAKKSLYLQMNSLRAEDTAVYYCASGVYSFDYRGQGTLVTVSSGTGGGGSGGGGSGGGGSEFELVMTQSPASLAVSLGQRATISCRASESVDSYGKSFMHWYQLKPGQPPKLLIYRASNLESGVPARFSGSGSRTDFTLTIDPVEADDAATYYCQQNNEDPWTFGGGTKLEIKLEDLKNVFPPEVAVFEPSEAEISHTQKATLVCLATGFYPDHVELSWWVNGKEVHSGVSTDPQPLKEQPALNDSRYCLSSRLRVSATFWQNPRNHFRCQVQFYGLSENDEWTQDRAKPVTQIVSAEAWGRADCGSQSFGLLDPKLCYLLDGILFIYGVILTALFLRVKFSRSADAPAYQQGQNQLYNELNLGRREEYDVLDKRRGRDPEMGGKPQRRKNPQEGLYNELQKDKMAEAYSEIGMKGERRRGKGHDGLYQGLSTATKDTYDALHMQALPPRRAKRSGSGATNFSLLKQAGDVEENPGPTSMDWIWRILFLVGAATGAHSFEEVQLEQSGPELVKPGASVKMSCKASGYTFTNYYMKWVKQSHGKSLEWIGDLNPNNGDTFYNQKFKGKATLTVDKSSNTAYMQLNSLTSEDSAVYYCARTGRYEENAMDYWGQGTSVTVSSTRIQNPDPAVYQLRDSKSSDKSVCLFTDFDSQTNVSQSKDSDVYITDKTVLDMRSMDFKSNSAVAWSNKSDFACANAFNNSIIPEDTFFPSPESSCGTQSFGLLDPKLCYLLDGILFIYGVILTALFLRVKFSRSADAPAYQQGQNQLYNELNLGRREEYDVLDKRRGRDPEMGGKPQRRKNPQEGLYNELQKDKMAEAYSEIGMKGERRRGKGHDGLYQGLSTATKDTYDALHMQALPPR

SEQ ID NO: 13013 - protein, 949 aa, Artificial Sequence
  Synthetic Polypeptide
MALPVTALLLPLALLLHAARPEVQLVESGGGLVQPGGSLRLSCAASGFSFSDFWMSWVRQAPGKGLEWVATISQAGSEKDYVDSVKGRFTISRDNAKKSLYLQMNSLRAEDTAVYYCASGVYSFDYRGQGTLVTVSSGTGGGGSGGGGSGGGGSEFDVVMTQSPSSLSASVGDRVTITCMASEDIYIRLAWYQQKPGNAPKLLIYAATSLETGVPSRFSGSGSGTDFTLTISSLQPEDFATYYCQQYWSSPWTFGGGTKVEIKLEDLKNVFPPEVAVFEPSEAEISHTQKATLVCLATGFYPDHVELSWWVNGKEVHSGVSTDPQPLKEQPALNDSRYCLSSRLRVSATFWQNPRNHFRCQVQFYGLSENDEWTQDRAKPVTQIVSAEAWGRADCGSQSFGLLDPKLCYLLDGILFIYGVILTALFLRVKFSRSADAPAYQQGQNQLYNELNLGRREEYDVLDKRRGRDPEMGGKPQRRKNPQEGLYNELQKDKMAEAYSEIGMKGERRRGKGHDGLYQGLSTATKDTYDALHMQALPPRRAKRSGSGATNFSLLKQAGDVEENPGPTSMDWIWRILFLVGAATGAHSFEQVQLQESGPGLVKPSQTLSLTCTVSGYSITSDYTWNWIRQPPGNGLEWIGYITYSGSTSYNPSLKSRVLISVDTSKNQVSLKLSSVTAADTAVYYCARLGRRYTMDYWGQGTTVTVSSTRIQNPDPAVYQLRDSKSSDKSVCLFTDFDSQTNVSQSKDSDVYITDKTVLDMRSMDFKSNSAVAWSNKSDFACANAFNNSIIPEDTFFPSPESSCGTQSFGLLDPKLCYLLDGILFIYGVILTALFLRVKFSRSADAPAYQQGQNQLYNELNLGRREEYDVLDKRRGRDPEMGGKPQRRKNPQEGLYNELQKDKMAEAYSEIGMKGERRRGKGHDGLYQGLSTATKDTYDALHMQALPPR

SEQ ID NO: 13014 - protein, 953 aa, Artificial Sequence; identical to SEQ ID NO: 12877
  Synthetic Polypeptide

SEQ ID NO: 13015 - protein, 953 aa, Artificial Sequence
  Synthetic Polypeptide
MALPVTALLLPLALLLHAARPEVQLVESGGGLVQPGGSLRLSCAASGFSFSDFWMSWVRQAPGKGLEWVATISQAGSEKDYVDSVKGRFTISRDNAKKSLYLQMNSLRAEDTAVYYCASGVYSFDYRGQGTLVTVSSGTGGGGSGGGGSGGGGSEFDIVLTQSPATLSLSPGDRATLSCRASESVTILGSHLIYWYQQKPGQAPRLLIQLASNVQTGIPARFSGSGSRTDFTLTISSLEPEDFAVYYCLQSRTIPRTFGQGTKLEIKRLEDLKNVFPPEVAVFEPSEAEISHTQKATLVCLATGFYPDHVELSWWVNGKEVHSGVSTDPQPLKEQPALNDSRYCLSSRLRVSATFWQNPRNHFRCQVQFYGLSENDEWTQDRAKPVTQIVSAEAWGRADCGSQSFGLLDPKLCYLLDGILFIYGVILTALFLRVKFSRSADAPAYQQGQNQLYNELNLGRREEYDVLDKRRGRDPEMGGKPQRRKNPQEGLYNELQKDKMAEAYSEIGMKGERRRGKGHDGLYQGLSTATKDTYDALHMQALPPRRAKRSGSGATNFSLLKQAGDVEENPGPTSMDWIWRILFLVGAATGAHSFEQVQLVQSGSELKKPGESVKISCKASGYTFTHYSMNWVRQAPGQGLEWMGRINTETGEPLYADDFKGRFVFSLDTSASTAYLQISSLKAEDTAVYYCSNDYLYSLDYWGQGTLVTVSSTRIQNPDPAVYQLRDSKSSDKSVCLFTDFDSQTNVSQSKDSDVYITDKTVLDMRSMDFKSNSAVAWSNKSDFACANAFNNSIIPEDTFFPSPESSCGTQSFGLLDPKLCYLLDGILFIYGVILTALFLRVKFSRSADAPAYQQGQNQLYNELNLGRREEYDVLDKRRGRDPEMGGKPQRRKNPQEGLYNELQKDKMAEAYSEIGMKGERRRGKGHDGLYQGLSTATKDTYDALHMQALPPR

SEQ ID NO: 13016 - protein, 954 aa, Artificial Sequence
  Synthetic Polypeptide
MALPVTALLLPLALLLHAARPEVQLVESGGGLVQPGGSLRLSCAASGFSFSDFWMSWVRQAPGKGLEWVATISQAGSEKDYVDSVKGRFTISRDNAKKSLYLQMNSLRAEDTAVYYCASGVYSFDYRGQGTLVTVSSGTGGGGSGGGGSGGGGSEFDIQLTQSPSFLSASVGDRVTITCRASQGISTDLNWYQQKPGKAPKLLIYAASNLESGVPSRFSGSGSGTEFTLTISSLQPEDFATYYCQQSYNWPYTFGGGTKVEIKRLEDLKNVFPPEVAVFEPSEAEISHTQKATLVCLATGFYPDHVELSWWVNGKEVHSGVSTDPQPLKEQPALNDSRYCLSSRLRVSATFWQNPRNHFRCQVQFYGLSENDEWTQDRAKPVTQIVSAEAWGRADCGSQSFGLLDPKLCYLLDGILFIYGVILTALFLRVKFSRSADAPAYQQGQNQLYNELNLGRREEYDVLDKRRGRDPEMGGKPQRRKNPQEGLYNELQKDKMAEAYSEIGMKGERRRGKGHDGLYQGLSTATKDTYDALHMQALPPRRAKRSGSGATNFSLLKQAGDVEENPGPTSMDWIWRILFLVGAATGAHSFEEVQLVESGGGLVKPGGSLRLSCAASGFTFSNFEMNWVRQAPGKGLEWVSGISSNGRYINYADSVKGRFTISRDNAKNSLYLQMNSLRAEDTAVYYCARVVDFDQDYNGFDYWGQGTLVTVSSTRIQNPDPAVYQLRDSKSSDKSVCLFTDFDSQTNVSQSKDSDVYITDKTVLDMRSMDFKSNSAVAWSNKSDFACANAFNNSIIPEDTFFPSPESSCGTQSFGLLDPKLCYLLDGILFIYGVILTALFLRVKFSRSADAPAYQQGQNQLYNELNLGRREEYDVLDKRRGRDPEMGGKPQRRKNPQEGLYNELQKDKMAEAYSEIGMKGERRRGKGHDGLYQGLSTATKDTYDALHMQALPPR

SEQ ID NO: 13017 - protein, 952 aa, Artificial Sequence
  Synthetic Polypeptide
MALPVTALLLPLALLLHAARPEVQLVESGGGLVQPGGSLRLSCAASGFSFSDFWMSWVRQAPGKGLEWVATISQAGSEKDYVDSVKGRFTISRDNAKKSLYLQMNSLRAEDTAVYYCASGVYSFDYRGQGTLVTVSSGTGGGGSGGGGSGGGGSEFDIQLTQSPSFLSASVGDRVTITCSLSLGISTWRDWFPPRLGRGLEPLTYAASTLQSGVPSRFSGSGSGTEFTLTISSLQPEDFATYYCQQLNSYPLTFGGGTKVEIKRLEDLKNVFPPEVAVFEPSEAEISHTQKATLVCLATGFYPDHVELSWWVNGKEVHSGVSTDPQPLKEQPALNDSRYCLSSRLRVSATFWQNPRNHFRCQVQFYGLSENDEWTQDRAKPVTQIVSAEAWGRADCGSQSFGLLDPKLCYLLDGILFIYGVILTALFLRVKFSRSADAPAYQQGQNQLYNELNLGRREEYDVLDKRRGRDPEMGGKPQRRKNPQEGLYNELQKDKMAEAYSEIGMKGERRRGKGHDGLYQGLSTATKDTYDALHMQALPPRRAKRSGSGATNFSLLKQAGDVEENPGPTSMDWIWRILFLVGAATGAHSFEEVQLVESGGGLVKPGGSLRLSCAASGFTFSTYGMSWVRQAPGKGLEWVAYINNGSGYIYYADSVKGRFTISRDNAKNSLYLQMNSLRAEDTAVYYCARGQWWSGGDFDYWGQGTLVTVSSTRIQNPDPAVYQLRDSKSSDKSVCLFTDFDSQTNVSQSKDSDVYITDKTVLDMRSMDFKSNSAVAWSNKSDFACANAFNNSIIPEDTFFPSPESSCGTQSFGLLDPKLCYLLDGILFIYGVILTALFLRVKFSRSADAPAYQQGQNQLYNELNLGRREEYDVLDKRRGRDPEMGGKPQRRKNPQEGLYNELQKDKMAEAYSEIGMKGERRRGKGHDGLYQGLSTATKDTYDALHMQALPPR

SEQ ID NO: 13018 - protein, 953 aa, Artificial Sequence
  Synthetic Polypeptide
MALPVTALLLPLALLLHAARPEVQLVESGGGLVQPGGSLRLSCAASGFSFSDFWMSWVRQAPGKGLEWVATISQAGSEKDYVDSVKGRFTISRDNAKKSLYLQMNSLRAEDTAVYYCASGVYSFDYRGQGTLVTVSSGTGGGGSGGGGSGGGGSEFEIVLTQSPATLSLSPGERATLSCSASSSVSYMYWYQQKPGQAPRLLIYRTSNLASGIPARFSGSGSGTDFTLTISSLEPEDFAVYYCQQYHSYPTTFGQGTKVEIKRTVLEDLKNVFPPEVAVFEPSEAEISHTQKATLVCLATGFYPDHVELSWWVNGKEVHSGVSTDPQPLKEQPALNDSRYCLSSRLRVSATFWQNPRNHFRCQVQFYGLSENDEWTQDRAKPVTQIVSAEAWGRADCGSQSFGLLDPKLCYLLDGILFIYGVILTALFLRVKFSRSADAPAYQQGQNQLYNELNLGRREEYDVLDKRRGRDPEMGGKPQRRKNPQEGLYNELQKDKMAEAYSEIGMKGERRRGKGHDGLYQGLSTATKDTYDALHMQALPPRRAKRSGSGATNFSLLKQAGDVEENPGPTSMDWIWRILFLVGAATGAHSFEEVQLVESGGGLVQPGGSLRLSCAASGFSFNTYAMNWVRQAPGKGLEWVSHIRSKSNNFATYYADSVKDRFTISRDNAKNSLYLQMNSLRAEDTAVYYCARQGGDFPMDYWGQGTLVTVSSTRIQNPDPAVYQLRDSKSSDKSVCLFTDFDSQTNVSQSKDSDVYITDKTVLDMRSMDFKSNSAVAWSNKSDFACANAFNNSIIPEDTFFPSPESSCGTQSFGLLDPKLCYLLDGILFIYGVILTALFLRVKFSRSADAPAYQQGQNQLYNELNLGRREEYDVLDKRRGRDPEMGGKPQRRKNPQEGLYNELQKDKMAEAYSEIGMKGERRRGKGHDGLYQGLSTATKDTYDALHMQALPPR

SEQ ID NO: 13019 - protein, 949 aa, Artificial Sequence
  Synthetic Polypeptide
MALPVTALLLPLALLLHAARPEVQLVESGGGLVQPGGSLRLSCAASGFSFSDFWMSWVRQAPGKGLEWVATISQAGSEKDYVDSVKGRFTISRDNAKKSLYLQMNSLRAEDTAVYYCASGVYSFDYRGQGTLVTVSSGTGGGGSGGGGSGGGGSEFDVVMTQSPSSLSASVGDRVTITCKASEDIYIRLAWYQQKPGKAPKLLIYAATSLETGVPSRFSGSGSGTDFTLTISSLQPEDFATYYCQQYWTTPWTFGGGTKVEIKLEDLKNVFPPEVAVFEPSEAEISHTQKATLVCLATGFYPDHVELSWWVNGKEVHSGVSTDPQPLKEQPALNDSRYCLSSRLRVSATFWQNPRNHFRCQVQFYGLSENDEWTQDRAKPVTQIVSAEAWGRADCGSQSFGLLDPKLCYLLDGILFIYGVILTALFLRVKFSRSADAPAYQQGQNQLYNELNLGRREEYDVLDKRRGRDPEMGGKPQRRKNPQEGLYNELQKDKMAEAYSEIGMKGERRRGKGHDGLYQGLSTATKDTYDALHMQALPPRRAKRSGSGATNFSLLKQAGDVEENPGPTSMDWIWRILFLVGAATGAHSFEQVQLQESGPGLVKPSQTLSLTCTVSGYSITIDYTWNWIRQPPGKGLEWIGYITYSGSTDYNPSLKSRVLISVDTSKNQVSLKLSSVTAADTAVYYCARLGRRYALDYWGQGTTVTVSSTRIQNPDPAVYQLRDSKSSDKSVCLFTDFDSQTNVSQSKDSDVYITDKTVLDMRSMDFKSNSAVAWSNKSDFACANAFNNSIIPEDTFFPSPESSCGTQSFGLLDPKLCYLLDGILFIYGVILTALFLRVKFSRSADAPAYQQGQNQLYNELNLGRREEYDVLDKRRGRDPEMGGKPQRRKNPQEGLYNELQKDKMAEAYSEIGMKGERRRGKGHDGLYQGLSTATKDTYDALHMQALPPR

SEQ ID NO: 13020 - protein, 953 aa, Artificial Sequence
  Synthetic Polypeptide
MALPVTALLLPLALLLHAARPEVQLVESGGGLVQPGGSLRLSCAASGFSFSDFWMSWVRQAPGKGLEWVATISQAGSEKDYVDSVKGRFTISRDNAKKSLYLQMNSLRAEDTAVYYCASGVYSFDYRGQGTLVTVSSGTGGGGSGGGGSGGGGSEFDIQMTQTTSSLSASLGDRVTISCRASQDISNYLNWYQQKPDGTVKLLIYYTSILHSGVPSRFSGSGSGTDYSLTISNLEQEDFATYFCQQGNTLPWTFGGGTKLEIKALEDLKNVFPPEVAVFEPSEAEISHTQKATLVCLATGFYPDHVELSWWVNGKEVHSGVSTDPQPLKEQPALNDSRYCLSSRLRVSATFWQNPRNHFRCQVQFYGLSENDEWTQDRAKPVTQIVSAEAWGRADCGSQSFGLLDPKLCYLLDGILFIYGVILTALFLRVKFSRSADAPAYQQGQNQLYNELNLGRREEYDVLDKRRGRDPEMGGKPQRRKNPQEGLYNELQKDKMAEAYSEIGMKGERRRGKGHDGLYQGLSTATKDTYDALHMQALPPRRAKRSGSGATNFSLLKQAGDVEENPGPTSMDWIWRILFLVGAATGAHSFEVQLVESGGGLVKPGGSLKLSCAASGFAFSIYDMSWVRQTPEKRLEWVAYISSGGGTYYPDTVKGRFTISRDNAKNTLYLQMSSLKSEDTAMYYCARHSGYGTHWGVLFAYWGQGTLVTVSATRIQNPDPAVYQLRDSKSSDKSVCLFTDFDSQTNVSQSKDSDVYITDKTVLDMRSMDFKSNSAVAWSNKSDFACANAFNNSIIPEDTFFPSPESSCGTQSFGLLDPKLCYLLDGILFIYGVILTALFLRVKFSRSADAPAYQQGQNQLYNELNLGRREEYDVLDKRRGRDPEMGGKPQRRKNPQEGLYNELQKDKMAEAYSEIGMKGERRRGKGHDGLYQGLSTATKDTYDALHMQALPPR

SEQ ID NO: 13021 - protein, 964 aa, Artificial Sequence
  Synthetic Polypeptide
MALPVTALLLPLALLLHAARPEVQLVESGGGLVQPGGSLRLSCAASGFSFSDFWMSWVRQAPGKGLEWVATISQAGSEKDYVDSVKGRFTISRDNAKKSLYLQMNSLRAEDTAVYYCASGVYSFDYRGQGTLVTVSSGTGGGGSGGGGSGGGGSEFDIVMTQSPDSLAVSLGERATINCKSSQSLLYRSNQKNYLAWYQQKPGQPPKLLIYWASTRESGVPDRFSGSGSGTDFTLTISSLQAEDVAVYYCQQYYNYPRTFGQGTKVEIKRTVLEDLKNVFPPEVAVFEPSEAEISHTQKATLVCLATGFYPDHVELSWWVNGKEVHSGVSTDPQPLKEQPALNDSRYCLSSRLRVSATFWQNPRNHFRCQVQFYGLSENDEWTQDRAKPVTQIVSAEAWGRADCGSQSFGLLDPKLCYLLDGILFIYGVILTALFLRVKFSRSADAPAYQQGQNQLYNELNLGRREEYDVLDKRRGRDPEMGGKPQRRKNPQEGLYNELQKDKMAEAYSEIGMKGERRRGKGHDGLYQGLSTATKDTYDALHMQALPPRRAKRSGSGATNFSLLKQAGDVEENPGPTSMDWIWRILFLVGAATGAHSFEEVQLLESGGGLVQPGGSLRLSCAASGYSITSDYAWNWVRQAPGKGLEWVSYISNSGSTSYNPSLKSRFTISRDNSKNTLYLQMNSLRAEDTAVYYCAKERNYDYDDYYYAMDYWGQGTLVTVSSTRIQNPDPAVYQLRDSKSSDKSVCLFTDFDSQTNVSQSKDSDVYITDKTVLDMRSMDFKSNSAVAWSNKSDFACANAFNNSIIPEDTFFPSPESSCGTQSFGLLDPKLCYLLDGILFIYGVILTALFLRVKFSRSADAPAYQQGQNQLYNELNLGRREEYDVLDKRRGRDPEMGGKPQRRKNPQEGLYNELQKDKMAEAYSEIGMKGERRRGKGHDGLYQGLSTATKDTYDALHMQALPPR

SEQ ID NO: 13022 - protein, 957 aa, Artificial Sequence
  Synthetic Polypeptide
MALPVTALLLPLALLLHAARPEVQLVESGGGLVQPGGSLRLSCAASGFSFSDFWMSWVRQAPGKGLEWVATISQAGSEKDYVDSVKGRFTISRDNAKKSLYLQMNSLRAEDTAVYYCASGVYSFDYRGQGTLVTVSSGTGGGGSGGGGSGGGGSEFDVVMTQSPLSLPVTLGQPASISCRSSQSLLHSSGNTYLEWYQQRPGQSPRPLIYKISTRFSGVPDRFSGSGSGTDFTLKISRVEAEDVGVYYCFQGSHVPYTFGGGTKVEIKRLEDLKNVFPPEVAVFEPSEAEISHTQKATLVCLATGFYPDHVELSWWVNGKEVHSGVSTDPQPLKEQPALNDSRYCLSSRLRVSATFWQNPRNHFRCQVQFYGLSENDEWTQDRAKPVTQIVSAEAWGRADCGSQSFGLLDPKLCYLLDGILFIYGVILTALFLRVKFSRSADAPAYQQGQNQLYNELNLGRREEYDVLDKRRGRDPEMGGKPQRRKNPQEGLYNELQKDKMAEAYSEIGMKGERRRGKGHDGLYQGLSTATKDTYDALHMQALPPRRAKRSGSGATNFSLLKQAGDVEENPGPTSMDWIWRILFLVGAATGAHSFEQVQLVQSGAEVKKPGASVKVSCKASGLTIEDYYMHWVRQAPGQGLEWMGWIDPENGDTEYGPKFQGRVTMTRDTSINTAYMELSRLRSDDTAVYYCAVHNAHYGTWFAYWGQGTLVTVSSTRIQNPDPAVYQLRDSKSSDKSVCLFTDFDSQTNVSQSKDSDVYITDKTVLDMRSMDFKSNSAVAWSNKSDFACANAFNNSIIPEDTFFPSPESSCGTQSFGLLDPKLCYLLDGILFIYGVILTALFLRVKFSRSADAPAYQQGQNQLYNELNLGRREEYDVLDKRRGRDPEMGGKPQRRKNPQEGLYNELQKDKMAEAYSEIGMKGERRRGKGHDGLYQGLSTATKDTYDALHMQALPPR

SEQ ID NO: 13023 - protein, 949 aa, Artificial Sequence
  Synthetic Polypeptide
MALPVTALLLPLALLLHAARPEVQLVESGGGLVQPGGSLRLSCAASGFSFSDFWMSWVRQAPGKGLEWVATISQAGSEKDYVDSVKGRFTISRDNAKKSLYLQMNSLRAEDTAVYYCASGVYSFDYRGQGTLVTVSSGTGGGGSGGGGSGGGGSEFDIQMTQSPSSLSASVGDRVTITCRASENIYSNLAWYQQKPGKAPKLLIYAATNLADGVPSRFSGSGSGTDFTLTISSLQPEDFATYYCQHFWGTPTFGQGTKVEIKRTVLEDLKNVFPPEVAVFEPSEAEISHTQKATLVCLATGFYPDHVELSWWVNGKEVHSGVSTDPQPLKEQPALNDSRYCLSSRLRVSATFWQNPRNHFRCQVQFYGLSENDEWTQDRAKPVTQIVSAEAWGRADCGSQSFGLLDPKLCYLLDGILFIYGVILTALFLRVKFSRSADAPAYQQGQNQLYNELNLGRREEYDVLDKRRGRDPEMGGKPQRRKNPQEGLYNELQKDKMAEAYSEIGMKGERRRGKGHDGLYQGLSTATKDTYDALHMQALPPRRAKRSGSGATNFSLLKQAGDVEENPGPTSMDWIWRILFLVGAATGAHSFEEVQLVESGGGLVQPGGSLRLSCAASGFSLTNYGVHWVRQAPGKGLEWVSVIWSGGSTDYNAAFISRFTISADTSKNTAYLQMNSLRAEDTAVYYCARELIHAMDNWGQGTLVTVSSTRIQNPDPAVYQLRDSKSSDKSVCLFTDFDSQTNVSQSKDSDVYITDKTVLDMRSMDFKSNSAVAWSNKSDFACANAFNNSIIPEDTFFPSPESSCGTQSFGLLDPKLCYLLDGILFIYGVILTALFLRVKFSRSADAPAYQQGQNQLYNELNLGRREEYDVLDKRRGRDPEMGGKPQRRKNPQEGLYNELQKDKMAEAYSEIGMKGERRRGKGHDGLYQGLSTATKDTYDALHMQALPPR

SEQ ID NO: 13024 - protein, 956 aa, Artificial Sequence
  Synthetic Polypeptide
MALPVTALLLPLALLLHAARPEVQLVESGGGLVQPGGSLRLSCAASGFSFSDFWMSWVRQAPGKGLEWVATISQAGSEKDYVDSVKGRFTISRDNAKKSLYLQMNSLRAEDTAVYYCASGVYSFDYRGQGTLVTVSSGTGGGGSGGGGSGGGGSEFDFVMTQSPLSLPVTPGEPASISCRSSQSIVHSNGNTYLEWYLQKPGQSPQLLIYKVSNRFSGVPDRFSGSGSGTDFTLKISRVEAEDVGVYYCFQGSHVPLTFGQGTKLEIKRLEDLKNVFPPEVAVFEPSEAEISHTQKATLVCLATGFYPDHVELSWWVNGKEVHSGVSTDPQPLKEQPALNDSRYCLSSRLRVSATFWQNPRNHFRCQVQFYGLSENDEWTQDRAKPVTQIVSAEAWGRADCGSQSFGLLDPKLCYLLDGILFIYGVILTALFLRVKFSRSADAPAYQQGQNQLYNELNLGRREEYDVLDKRRGRDPEMGGKPQRRKNPQEGLYNELQKDKMAEAYSEIGMKGERRRGKGHDGLYQGLSTATKDTYDALHMQALPPRRAKRSGSGATNFSLLKQAGDVEENPGPTSMDWIWRILFLVGAATGAHSFEEVQLVESGAEVKKPGASVKVSCKASGYTFTSYWIHWVRQAPGQGLEWMGENDPSNGRTNYNEKFKNRVTLTVDTSISTAYMELSRLRSDDTAVYYCARGPNYFYSMDYWGQGTMVTVSSTRIQNPDPAVYQLRDSKSSDKSVCLFTDFDSQTNVSQSKDSDVYITDKTVLDMRSMDFKSNSAVAWSNKSDFACANAFNNSIIPEDTFFPSPESSCGTQSFGLLDPKLCYLLDGILFIYGVILTALFLRVKFSRSADAPAYQQGQNQLYNELNLGRREEYDVLDKRRGRDPEMGGKPQRRKNPQEGLYNELQKDKMAEAYSEIGMKGERRRGKGHDGLYQGLSTATKDTYDALHMQALPPR

SEQ ID NO: 13025 - protein, 949 aa, Artificial Sequence
  Synthetic Polypeptide
MALPVTALLLPLALLLHAARPEVQLVESGGGLVQPGGSLRLSCAASGFSFSDFWMSWVRQAPGKGLEWVATISQAGSEKDYVDSVKGRFTISRDNAKKSLYLQMNSLRAEDTAVYYCASGVYSFDYRGQGTLVTVSSGTGGGGSGGGGSGGGGSEFDIQLTQSPSFLSASVGDRVTITCSARSSISFMYWYQQKPGKAPKLLIYDTSNLASGVPSRFSGSGSGTEFTLTISSLEAEDAATYYCQQWSSYPLTFGQGTKLEIKLEDLKNVFPPEVAVFEPSEAEISHTQKATLVCLATGFYPDHVELSWWVNGKEVHSGVSTDPQPLKEQPALNDSRYCLSSRLRVSATFWQNPRNHFRCQVQFYGLSENDEWTQDRAKPVTQIVSAEAWGRADCGSQSFGLLDPKLCYLLDGILFIYGVILTALFLRVKFSRSADAPAYQQGQNQLYNELNLGRREEYDVLDKRRGRDPEMGGKPQRRKNPQEGLYNELQKDKMAEAYSEIGMKGERRRGKGHDGLYQGLSTATKDTYDALHMQALPPRRAKRSGSGATNFSLLKQAGDVEENPGPTSMDWIWRILFLVGAATGAHSFEQVQLVQSGAEVKKPGASVKVSCKASGYTFTGSWMNWVRQAPGQGLEWIGRIYPGDGETNYNGKFKDRVTITADKSTSTAYMELSSLRSEDTAVYYCARIYGNNVYFDVWGQGTTVTVSSTRIQNPDPAVYQLRDSKSSDKSVCLFTDFDSQTNVSQSKDSDVYITDKTVLDMRSMDFKSNSAVAWSNKSDFACANAFNNSIIPEDTFFPSPESSCGTQSFGLLDPKLCYLLDGILFIYGVILTALFLRVKFSRSADAPAYQQGQNQLYNELNLGRREEYDVLDKRRGRDPEMGGKPQRRKNPQEGLYNELQKDKMAEAYSEIGMKGERRRGKGHDGLYQGLSTATKDTYDALHMQALPPR

SEQ ID NO: 13026 - protein, 957 aa, Artificial Sequence
  Synthetic Polypeptide
MALPVTALLLPLALLLHAARPEVQLVESGGGLVQPGGSLRLSCAASGFSFSDFWMSWVRQAPGKGLEWVATISQAGSEKDYVDSVKGRFTISRDNAKKSLYLQMNSLRAEDTAVYYCASGVYSFDYRGQGTLVTVSSGTGGGGSGGGGSGGGGSEFQLVLTQSPSASASLGSSVKLTCTLSSGHKTDTIDWYQQQPGKAPRYLMKLEGSGSYNKGSGVPDRFSGSSSGADWYLTISSLQSEDEADYYCGTDYPGNYLFGGGTQLTVLGLEDLKNVFPPEVAVFEPSEAEISHTQKATLVCLATGFYPDHVELSWWVNGKEVHSGVSTDPQPLKEQPALNDSRYCLSSRLRVSATFWQNPRNHFRCQVQFYGLSENDEWTQDRAKPVTQIVSAEAWGRADCGSQSFGLLDPKLCYLLDGILFIYGVILTALFLRVKFSRSADAPAYQQGQNQLYNELNLGRREEYDVLDKRRGRDPEMGGKPQRRKNPQEGLYNELQKDKMAEAYSEIGMKGERRRGKGHDGLYQGLSTATKDTYDALHMQALPPRRAKRSGSGATNFSLLKQAGDVEENPGPTSMDWIWRILFLVGAATGAHSFEQEQLVESGGGLVQPGGSLRLSCAASGFTFSDYYMSWIRQAPGKGLEWVATIYPSSGKTYYADSAKGRLTISSDNAKDSLYLQMNSLRAEDTAVYYCTRDSYADDAALFDIWGQGTTVTVSSTRIQNPDPAVYQLRDSKSSDKSVCLFTDFDSQTNVSQSKDSDVYITDKTVLDMRSMDFKSNSAVAWSNKSDFACANAFNNSIIPEDTFFPSPESSCGTQSFGLLDPKLCYLLDGILFIYGVILTALFLRVKFSRSADAPAYQQGQNQLYNELNLGRREEYDVLDKRRGRDPEMGGKPQRRKNPQEGLYNELQKDKMAEAYSEIGMKGERRRGKGHDGLYQGLSTATKDTYDALHMQALPPR

SEQ ID NO: 13027 - protein, 953 aa, Artificial Sequence
  Synthetic Polypeptide
MALPVTALLLPLALLLHAARPEVQLVESGGGLVQPGGSLRLSCAASGFSFSDFWMSWVRQAPGKGLEWVATISQAGSEKDYVDSVKGRFTISRDNAKKSLYLQMNSLRAEDTAVYYCASGVYSFDYRGQGTLVTVSSGTGGGGSGGGGSGGGGSEFEIVLTQSPDTLSLSPGEKATLSCRASQSVSSSFLAWYQQKPGQAPSLLIYVASRRAAGIPDRFSGSGSGTDFTLTISRLEPEDFGMFYCQHYGRTPFTFGPGTKVDIKRLEDLKNVFPPEVAVFEPSEAEISHTQKATLVCLATGFYPDHVELSWWVNGKEVHSGVSTDPQPLKEQPALNDSRYCLSSRLRVSATFWQNPRNHFRCQVQFYGLSENDEWTQDRAKPVTQIVSAEAWGRADCGSQSFGLLDPKLCYLLDGILFIYGVILTALFLRVKFSRSADAPAYQQGQNQLYNELNLGRREEYDVLDKRRGRDPEMGGKPQRRKNPQEGLYNELQKDKMAEAYSEIGMKGERRRGKGHDGLYQGLSTATKDTYDALHMQALPPRRAKRSGSGATNFSLLKQAGDVEENPGPTSMDWIWRILFLVGAATGAHSFEQIQLVESGGGVVQPGRSLRLSCVASGFTFKNYGMHWVRQAPGKGLEWVAVIWYDGSNEYYGDPVKGRFTISRDNSKNMLYLQMNSLRADDTAVYYCARSGIAVAGAFDYWGQGTLVTVSSTRIQNPDPAVYQLRDSKSSDKSVCLFTDFDSQTNVSQSKDSDVYITDKTVLDMRSMDFKSNSAVAWSNKSDFACANAFNNSIIPEDTFFPSPESSCGTQSFGLLDPKLCYLLDGILFIYGVILTALFLRVKFSRSADAPAYQQGQNQLYNELNLGRREEYDVLDKRRGRDPEMGGKPQRRKNPQEGLYNELQKDKMAEAYSEIGMKGERRRGKGHDGLYQGLSTATKDTYDALHMQALPPR

SEQ ID NO: 13028 - protein, 959 aa, Artificial Sequence
  Synthetic Polypeptide
MALPVTALLLPLALLLHAARPEVQLVESGGGLVQPGGSLRLSCAASGFSFSDFWMSWVRQAPGKGLEWVATISQAGSEKDYVDSVKGRFTISRDNAKKSLYLQMNSLRAEDTAVYYCASGVYSFDYRGQGTLVTVSSGTGGGGSGGGGSGGGGSEFDIQMTQSPSSLSASLGDRVTITCRASQGIRNDLGWYQQKPGKAPKRLIYASSTLQSGVPSRFSGSGSGTEFTLTISSLQPEDFATYYCLQHNNFPWTFGQGTKVEIKRLEDLKNVFPPEVAVFEPSEAEISHTQKATLVCLATGFYPDHVELSWWVNGKEVHSGVSTDPQPLKEQPALNDSRYCLSSRLRVSATFWQNPRNHFRCQVQFYGLSENDEWTQDRAKPVTQIVSAEAWGRADCGSQSFGLLDPKLCYLLDGILFIYGVILTALFLRVKFSRSADAPAYQQGQNQLYNELNLGRREEYDVLDKRRGRDPEMGGKPQRRKNPQEGLYNELQKDKMAEAYSEIGMKGERRRGKGHDGLYQGLSTATKDTYDALHMQALPPRRAKRSGSGATNFSLLKQAGDVEENPGPTSMDWIWRILFLVGAATGAHSFEQVTLKESGPVLVKPTETLTLTCTVSGFSLINARMGVSWIRQPPGKALEWLAHIFSNAEKSYRTSLKSRLTISKDTSKSQVVLTMTNMDPVDTATYYCARIPGYGGNGDYHYYGMDVWGQGTTVTVSSTRIQNPDPAVYQLRDSKSSDKSVCLFTDFDSQTNVSQSKDSDVYITDKTVLDMRSMDFKSNSAVAWSNKSDFACANAFNNSIIPEDTFFPSPESSCGTQSFGLLDPKLCYLLDGILFIYGVILTALFLRVKFSRSADAPAYQQGQNQLYNELNLGRREEYDVLDKRRGRDPEMGGKPQRRKNPQEGLYNELQKDKMAEAYSEIGMKGERRRGKGHDGLYQGLSTATKDTYDALHMQALPPR

SEQ ID NO: 13029 - protein, 952 aa, Artificial Sequence
  Synthetic Polypeptide
MALPVTALLLPLALLLHAARPEVQLVESGGGLVQPGGSLRLSCAASGFSFSDFWMSWVRQAPGKGLEWVATISQAGSEKDYVDSVKGRFTISRDNAKKSLYLQMNSLRAEDTAVYYCASGVYSFDYRGQGTLVTVSSGTGGGGSGGGGSGGGGSEFDIVLTQSPPSLAMSLGKRATISCRASESVTILGSHLIHWYQQKPGQPPTLLIQLASNVQTGVPARFSGSGSRTDFTLTIDPVEEDDVAVYYCLQSRTIPRTFGGGTKLEIKLEDLKNVFPPEVAVFEPSEAEISHTQKATLVCLATGFYPDHVELSWWVNGKEVHSGVSTDPQPLKEQPALNDSRYCLSSRLRVSATFWQNPRNHFRCQVQFYGLSENDEWTQDRAKPVTQIVSAEAWGRADCGSQSFGLLDPKLCYLLDGILFIYGVILTALFLRVKFSRSADAPAYQQGQNQLYNELNLGRREEYDVLDKRRGRDPEMGGKPQRRKNPQEGLYNELQKDKMAEAYSEIGMKGERRRGKGHDGLYQGLSTATKDTYDALHMQALPPRRAKRSGSGATNFSLLKQAGDVEENPGPTSMDWIWRILFLVGAATGAHSFEQIQLVQSGPELKKPGETVKISCKASGYTFTDYSINWVKRAPGKGLKWMGWINTETREPAYAYDFRGRFAFSLETSASTAYLQINNLKYEDTATYFCALDYSYAMDYWGQGTSVTVSSTRIQNPDPAVYQLRDSKSSDKSVCLFTDFDSQTNVSQSKDSDVYITDKTVLDMRSMDFKSNSAVAWSNKSDFACANAFNNSIIPEDTFFPSPESSCGTQSFGLLDPKLCYLLDGILFIYGVILTALFLRVKFSRSADAPAYQQGQNQLYNELNLGRREEYDVLDKRRGRDPEMGGKPQRRKNPQEGLYNELQKDKMAEAYSEIGMKGERRRGKGHDGLYQGLSTATKDTYDALHMQALPPR

SEQ ID NO: 13030 - protein, 954 aa, Artificial Sequence
  Synthetic Polypeptide
MALPVTALLLPLALLLHAARPEVQLVESGGGLVQPGGSLRLSCAASGFSFSDFWMSWVRQAPGKGLEWVATISQAGSEKDYVDSVKGRFTISRDNAKKSLYLQMNSLRAEDTAVYYCASGVYSFDYRGQGTLVTVSSGTGGGGSGGGGSGGGGSEFDIQLTQSPSSLSASVGDRVSFTCQASQDINNFLNWYQQKPGKAPKLLIYDASNLETGVPSRFSGSGSGTDFTFTISSLQPEDIATYYCQQYGNLPFTFGGGTKVEIKRLEDLKNVFPPEVAVFEPSEAEISHTQKATLVCLATGFYPDHVELSWWVNGKEVHSGVSTDPQPLKEQPALNDSRYCLSSRLRVSATFWQNPRNHFRCQVQFYGLSENDEWTQDRAKPVTQIVSAEAWGRADCGSQSFGLLDPKLCYLLDGILFIYGVILTALFLRVKFSRSADAPAYQQGQNQLYNELNLGRREEYDVLDKRRGRDPEMGGKPQRRKNPQEGLYNELQKDKMAEAYSEIGMKGERRRGKGHDGLYQGLSTATKDTYDALHMQALPPRRAKRSGSGATNFSLLKQAGDVEENPGPTSMDWIWRILFLVGAATGAHSFEQVQLQESGPGLVKPSETLSLTCTVSGGSISSYYWSWIRQPPGKGLEWIGYIYYSGSTNYNPSLKSRVTISVDTSKNQFSLKLSSVTAADTAVYYCVSLVYCGGDCYSGFDYWGQGTLVTVSSTRIQNPDPAVYQLRDSKSSDKSVCLFTDFDSQTNVSQSKDSDVYITDKTVLDMRSMDFKSNSAVAWSNKSDFACANAFNNSIIPEDTFFPSPESSCGTQSFGLLDPKLCYLLDGILFIYGVILTALFLRVKFSRSADAPAYQQGQNQLYNELNLGRREEYDVLDKRRGRDPEMGGKPQRRKNPQEGLYNELQKDKMAEAYSEIGMKGERRRGKGHDGLYQGLSTATKDTYDALHMQALPPR

SEQ ID NO: 13031 - protein, 956 aa, Artificial Sequence
  Synthetic Polypeptide
MALPVTALLLPLALLLHAARPEVQLVESGGGLVQPGGSLRLSCAASGFSFSDFWMSWVRQAPGKGLEWVATISQAGSEKDYVDSVKGRFTISRDNAKKSLYLQMNSLRAEDTAVYYCASGVYSFDYRGQGTLVTVSSGTGGGGSGGGGSGGGGSEFDIQLTQSPSSLSASVGDRVSFTCQASQDINNFLNWYQQKPGKAPKLLIYDASNLETGVPSRFSGSGSGTDFTFTISSLQPEDIATYYCQQYGNLPFTFGGGTKVEIKRLEDLKNVFPPEVAVFEPSEAEISHTQKATLVCLATGFYPDHVELSWWVNGKEVHSGVSTDPQPLKEQPALNDSRYCLSSRLRVSATFWQNPRNHFRCQVQFYGLSENDEWTQDRAKPVTQIVSAEAWGRADCGSQSFGLLDPKLCYLLDGILFIYGVILTALFLRVKFSRSADAPAYQQGQNQLYNELNLGRREEYDVLDKRRGRDPEMGGKPQRRKNPQEGLYNELQKDKMAEAYSEIGMKGERRRGKGHDGLYQGLSTATKDTYDALHMQALPPRRAKRSGSGATNFSLLKQAGDVEENPGPTSMDWIWRILFLVGAATGAHSFEQVQLQESGPGLVKPSQTLSLTCTVSGGSISSGGFYWSWIRQHPGKGLEWIGYIHHSGSTHYNPSLKSRVTISIDTSKNLFSLRLSSVTAADTAVYYCASLVYCGGDCYSGFDYWGQGTLVTVSSTRIQNPDPAVYQLRDSKSSDKSVCLFTDFDSQTNVSQSKDSDVYITDKTVLDMRSMDFKSNSAVAWSNKSDFACANAFNNSIIPEDTFFPSPESSCGTQSFGLLDPKLCYLLDGILFIYGVILTALFLRVKFSRSADAPAYQQGQNQLYNELNLGRREEYDVLDKRRGRDPEMGGKPQRRKNPQEGLYNELQKDKMAEAYSEIGMKGERRRGKGHDGLYQGLSTATKDTYDALHMQALPPR

SEQ ID NO: 13032 - protein, 952 aa, Artificial Sequence
  Synthetic Polypeptide
MALPVTALLLPLALLLHAARPEVQLVESGGGLVQPGGSLRLSCAASGFSFSDFWMSWVRQAPGKGLEWVATISQAGSEKDYVDSVKGRFTISRDNAKKSLYLQMNSLRAEDTAVYYCASGVYSFDYRGQGTLVTVSSGTGGGGSGGGGSGGGGSEFDIQMTQSPSSLSASVGDRVTITCKSSQSVLYSSNQKNYLAWFQQKPGKAPKLLIYWASTRESGVPSRFSGSGSGTDFTLTISSLQPEDFATYFCHQYLSSYTFGQGTKVEIKRLEDLKNVFPPEVAVFEPSEAEISHTQKATLVCLATGFYPDHVELSWWVNGKEVHSGVSTDPQPLKEQPALNDSRYCLSSRLRVSATFWQNPRNHFRCQVQFYGLSENDEWTQDRAKPVTQIVSAEAWGRADCGSQSFGLLDPKLCYLLDGILFIYGVILTALFLRVKFSRSADAPAYQQGQNQLYNELNLGRREEYDVLDKRRGRDPEMGGKPQRRKNPQEGLYNELQKDKMAEAYSEIGMKGERRRGKGHDGLYQGLSTATKDTYDALHMQALPPRRAKRSGSGATNFSLLKQAGDVEENPGPTSMDWIWRILFLVGAATGAHSFEEVQLVESGGGLVQPGGSLRLSCAASGYTFTTYWMHWVRQAPGKGLEWVGYIRPSTGYTEYNQKFKDRFTISADTSKNTAYLQMNSLRAEDTAVYYCARSRWLLDYWGQGTLVTVSTRIQNPDPAVYQLRDSKSSDKSVCLFTDFDSQTNVSQSKDSDVYITDKTVLDMRSMDFKSNSAVAWSNKSDFACANAFNNSIIPEDTFFPSPESSCGTQSFGLLDPKLCYLLDGILFIYGVILTALFLRVKFSRSADAPAYQQGQNQLYNELNLGRREEYDVLDKRRGRDPEMGGKPQRRKNPQEGLYNELQKDKMAEAYSEIGMKGERRRGKGHDGLYQGLSTATKDTYDALHMQALPPR

SEQ ID NO: 13033 - protein, 949 aa, Artificial Sequence
  Synthetic Polypeptide
MALPVTALLLPLALLLHAARPEVQLVESGGGLVQPGGSLRLSCAASGFSFSDFWMSWVRQAPGKGLEWVATISQAGSEKDYVDSVKGRFTISRDNAKKSLYLQMNSLRAEDTAVYYCASGVYSFDYRGQGTLVTVSSGTGGGGSGGGGSGGGGSEFDIQMTQSPSSLSASVGDRVTITCRASQDISNYLNWYQQKPGKAPKLLIYYTSRLHSGVPSRFSGSGSGTDFTLTISSLQPEDFATYYCQQGNTLPYTFGQGTKVEIKRLEDLKNVFPPEVAVFEPSEAEISHTQKATLVCLATGFYPDHVELSWWVNGKEVHSGVSTDPQPLKEQPALNDSRYCLSSRLRVSATFWQNPRNHFRCQVQFYGLSENDEWTQDRAKPVTQIVSAEAWGRADCGSQSFGLLDPKLCYLLDGILFIYGVILTALFLRVKFSRSADAPAYQQGQNQLYNELNLGRREEYDVLDKRRGRDPEMGGKPQRRKNPQEGLYNELQKDKMAEAYSEIGMKGERRRGKGHDGLYQGLSTATKDTYDALHMQALPPRRAKRSGSGATNFSLLKQAGDVEENPGPTSMDWIWRILFLVGAATGAHSFEEVQLVESGGGLVQPGGSLRLSCAASGFTFSDYFMSWVRQAPGKGLEWVATISNGGTYTYYPDSVKGRFTISRDNSKNTLYLQMNSLRAEDTAVYYCARFDGYIFDYWGQGTLVTVSSTRIQNPDPAVYQLRDSKSSDKSVCLFTDFDSQTNVSQSKDSDVYITDKTVLDMRSMDFKSNSAVAWSNKSDFACANAFNNSIIPEDTFFPSPESSCGTQSFGLLDPKLCYLLDGILFIYGVILTALFLRVKFSRSADAPAYQQGQNQLYNELNLGRREEYDVLDKRRGRDPEMGGKPQRRKNPQEGLYNELQKDKMAEAYSEIGMKGERRRGKGHDGLYQGLSTATKDTYDALHMQALPPR

SEQ ID NO: 13034 - protein, 891 aa, Artificial Sequence
  Synthetic Polypeptide
MALPVTALLLPLALLLHAARPEVQLVESGGGLVQPGGSLRLSCAASGFSFSDFWMSWVRQAPGKGLEWVATISQAGSEKDYVDSVKGRFTISRDNAKKSLYLQMNSLRAEDTAVYYCASGVYSFDYRGQGTLVTVSSGTGGGGSGGGGSGGGGSEFDIQMTQTTSSLSASLGDRVTISCRASQDISKYLNWYQQKPDGTVKLLIYHTSRLHSGVPSRFSGSGSGTDYSLTISNLEQEDIATYFCQQGNTLPYTFGGGTKLEITLEDLKNVFPPEVAVFEPSEAEISHTQKATLVCLATGFYPDHVELSWWVNGKEVHSGVCTDPQPLKEQPALNDSRYCLSSRLRVSATFWQNPRNHFRCQVQFYGLSENDEWTQDRAKPVTQIVSAEAWGRADCGFTSESYQQGVLSATILYEILLGKATLYAVLVSALVLMAMVKRKDSRGRAKRSGSGATNFSLLKQAGDVEENPGPTSMDWIWRILFLVGAATGAHSGPQLQLQESGPGLVKPSETLSLTCTVSGDSISSGDYYWGWIRQPPGKGLEWIGHIYYSGVTYYNPSLKSRVTISVDTSRNQFSLKLSSVTAADTAVYYCTREDSSNWRSRGQGTLVTVSSGSGGGGSGGGGSGGGGSFEVKLQESGPGLVAPSQSLSVTCTVSGVSLPDYGVSWIRQPPRKGLEWLGVIWGSETTYYNSALKSRLTIIKDNSKSQVFLKMNSLQTDDTAIYYCAKHYYYGGSYAMDYWGQGTSVTVSSTRIQNPDPAVYQLRDSKSSDKSVCLFTDFDSQTNVSQSKDSDVYITDKCVLDMRSMDFKSNSAVAWSNKSDFACANAFNNSIIPEDTFFPSPESSCDVKLVEKSFETDTNLNFQNLSVIGFRILLLKVAGFNLLMTLRLWSS

SEQ ID NO: 13035 - protein, 892 aa, Artificial Sequence
  Synthetic Polypeptide
MALPVTALLLPLALLLHAARPEVQLVESGGGLVQPGGSLRLSCAASGFSFSDFWMSWVRQAPGKGLEWVATISQAGSEKDYVDSVKGRFTISRDNAKKSLYLQMNSLRAEDTAVYYCASGVYSFDYRGQGTLVTVSSGTGGGGSGGGGSGGGGSEFEIVMTQSPATLSLSPGERATLSCRASQDISKYLNWYQQKPGQAPRLLIYHTSRLHSGIPARFSGSGSGTDYTLTISSLQPEDFAVYFCQQGNTLPYTFGQGTKLEIKLEDLKNVFPPEVAVFEPSEAEISHTQKATLVCLATGFYPDHVELSWWVNGKEVHSGVCTDPQPLKEQPALNDSRYCLSSRLRVSATFWQNPRNHFRCQVQFYGLSENDEWTQDRAKPVTQIVSAEAWGRADCGFTSESYQQGVLSATILYEILLGKATLYAVLVSALVLMAMVKRKDSRGRAKRSGSGATNFSLLKQAGDVEENPGPTSMDWIWRILFLVGAATGAHSGPQLQLQESGPGLVKPSETLSLTCTVSGDSISSGDYYWGWIRQPPGKGLEWIGHIYYSGVTYYNPSLKSRVTISVDTSRNQFSLKLSSVTAADTAVYYCTREDSSNWRSRGQGTLVTVSSGSGGGGSGGGGSGGGGSFEQVQLQESGPGLVKPSETLSLTCTVSGVSLPDYGVSWIRQPPGKGLEWIGVIWGSETTYYNSSLKSRVTISKDNSKNQVSLKLSSVTAADTAVYYCAKHYYYGGSYAMDYWGQGTLVTVSSTRIQNPDPAVYQLRDSKSSDKSVCLFTDFDSQTNVSQSKDSDVYITDKCVLDMRSMDFKSNSAVAWSNKSDFACANAFNNSIIPEDTFFPSPESSCDVKLVEKSFETDTNLNFQNLSVIGFRILLLKVAGFNLLMTLRLWSS

SEQ ID NO: 13036 - protein, 893 aa, Artificial Sequence
  Synthetic Polypeptide
MALPVTALLLPLALLLHAARPEVQLVESGGGLVQPGGSLRLSCAASGFSFSDFWMSWVRQAPGKGLEWVATISQAGSEKDYVDSVKGRFTISRDNAKKSLYLQMNSLRAEDTAVYYCASGVYSFDYRGQGTLVTVSSGTGGGGSGGGGSGGGGSEFDEIVLTQSPATLSLSPGERATLSCSASSSVSYMHWYQQKPGQAPRLLIYDTSKLASGIPARFSGSGSGTDFTLTISSLEPEDVAVYYCFQGSVYPFTFGQGTKLEIKRLEDLKNVFPPEVAVFEPSEAEISHTQKATLVCLATGFYPDHVELSWWVNGKEVHSGVCTDPQPLKEQPALNDSRYCLSSRLRVSATFWQNPRNHFRCQVQFYGLSENDEWTQDRAKPVTQIVSAEAWGRADCGFTSESYQQGVLSATILYEILLGKATLYAVLVSALVLMAMVKRKDSRGRAKRSGSGATNFSLLKQAGDVEENPGPTSMDWIWRILFLVGAATGAHSGPQLQLQESGPGLVKPSETLSLTCTVSGDSISSGDYYWGWIRQPPGKGLEWIGHIYYSGVTYYNPSLKSRVTISVDTSRNQFSLKLSSVTAADTAVYYCTREDSSNWRSRGQGTLVTVSSGSGGGGSGGGGSGGGGSFEQVQLQESGPGLVKPSQTLSLTCTVSGGSISTSGMGVGWIRQHPGKGLEWIGHIWWDDDKRYNPALKSRVTISVDTSKNQFSLKLSSVTAADTAVYYCARMELWSYYFDYWGQGTLVTVSSTRIQNPDPAVYQLRDSKSSDKSVCLFTDFDSQTNVSQSKDSDVYITDKCVLDMRSMDFKSNSAVAWSNKSDFACANAFNNSIIPEDTFFPSPESSCDVKLVEKSFETDTNLNFQNLSVIGFRILLLKVAGFNLLMTLRLWSS

SEQ ID NO: 13037 - protein, 891 aa, Artificial Sequence
  Synthetic Polypeptide
MALPVTALLLPLALLLHAARPEVQLVESGGGLVQPGGSLRLSCAASGFSFSDFWMSWVRQAPGKGLEWVATISQAGSEKDYVDSVKGRFTISRDNAKKSLYLQMNSLRAEDTAVYYCASGVYSFDYRGQGTLVTVSSGTGGGGSGGGGSGGGGSEFDYIHVTQSPSSLSVSIGDRVTINCQTSQGVGSDLHWYQHKPGRAPKLLIHHASSVEDGVPSRFSGTGFHTSFNLTINDLQADDIGTYYCQVLQSFGRGSRLDTKLEDLKNVFPPEVAVFEPSEAEISHTQKATLVCLATGFYPDHVELSWWVNGKEVHSGVCTDPQPLKEQPALNDSRYCLSSRLRVSATFWQNPRNHFRCQVQFYGLSENDEWTQDRAKPVTQIVSAEAWGRADCGFTSESYQQGVLSATILYEILLGKATLYAVLVSALVLMAMVKRKDSRGRAKRSGSGATNFSLLKQAGDVEENPGPTSMDWIWRILFLVGAATGAHSGPQLQLQESGPGLVKPSETLSLTCTVSGDSISSGDYYWGWIRQPPGKGLEWIGHIYYSGVTYYNPSLKSRVTISVDTSRNQFSLKLSSVTAADTAVYYCTREDSSNWRSRGQGTLVTVSSGSGGGGSGGGGSGGGGSFERAHLVQSGTAMKKPGASVRVSCQTSGYTFTAHILFWFRQAPGRGLEWVGWIKPQYGAVNFGGGFRDRVTLTRDVYREIAYMDIRGLKPDDTAVYYCARDRSYGDSSWALDAWGQGTTVVVSATRIQNPDPAVYQLRDSKSSDKSVCLFTDFDSQTNVSQSKDSDVYITDKCVLDMRSMDFKSNSAVAWSNKSDFACANAFNNSIIPEDTFFPSPESSCDVKLVEKSFETDTNLNFQNLSVIGFRILLLKVAGFNLLMTLRLWSS

SEQ ID NO: 13038 - protein, 901 aa, Artificial Sequence
  Synthetic Polypeptide
MALPVTALLLPLALLLHAARPEVQLVESGGGLVQPGGSLRLSCAASGFSFSDFWMSWVRQAPGKGLEWVATISQAGSEKDYVDSVKGRFTISRDNAKKSLYLQMNSLRAEDTAVYYCASGVYSFDYRGQGTLVTVSSGTGGGGSGGGGSGGGGSEFDVQMIQTPDSLAVSLGQRATISCRASESVDNYGISFMHWYQQKPGQSPKLLIYRASNLESGIPARFSGSGSRTDFTLTINPVETDDVATYYCQQNNKDPPTFGGGTKLEIKLEDLKNVFPPEVAVFEPSEAEISHTQKATLVCLATGFYPDHVELSWWVNGKEVHSGVCTDPQPLKEQPALNDSRYCLSSRLRVSATFWQNPRNHFRCQVQFYGLSENDEWTQDRAKPVTQIVSAEAWGRADCGFTSESYQQGVLSATILYEILLGKATLYAVLVSALVLMAMVKRKDSRGRAKRSGSGATNFSLLKQAGDVEENPGPTSMDWIWRILFLVGAATGAHSGPQLQLQESGPGLVKPSETLSLTCTVSGDSISSGDYYWGWIRQPPGKGLEWIGHIYYSGVTYYNPSLKSRVTISVDTSRNQFSLKLSSVTAADTAVYYCTREDSSNWRSRGQGTLVTVSSGSGGGGSGGGGSGGGGSFEGGGGSQVQLQQSGAELVKPGASVKISCKASGYAFSSYWMNWVKQRPGKGLEWIGQIYPGDGDTTYNGKFKGKATLTADKSSSTVYMQLNSLTSEDSAVYFCVRYYYGSSGYFDYWGQGTTLTVSSTRIQNPDPAVYQLRDSKSSDKSVCLFTDFDSQTNVSQSKDSDVYITDKCVLDMRSMDFKSNSAVAWSNKSDFACANAFNNSIIPEDTFFPSPESSCDVKLVEKSFETDTNLNFQNLSVIGFRILLLKVAGFNLLMTLRLWSS

SEQ ID NO: 13039 - protein, 892 aa, Artificial Sequence
  Synthetic Polypeptide
MALPVTALLLPLALLLHAARPEVQLVESGGGLVQPGGSLRLSCAASGFSFSDFWMSWVRQAPGKGLEWVATISQAGSEKDYVDSVKGRFTISRDNAKKSLYLQMNSLRAEDTAVYYCASGVYSFDYRGQGTLVTVSSGTGGGGSGGGGSGGGGSEFDVQMIQTPSSLSASLGDRVTISCRASQDIGNYLNWYQQKPDGTVKLLIYYTSRLHSGVPSRFSGSGSGTEYSLTISNLEQEDIATYFCQQGSALPPTFGGGTKLEINLEDLKNVFPPEVAVFEPSEAEISHTQKATLVCLATGFYPDHVELSWWVNGKEVHSGVCTDPQPLKEQPALNDSRYCLSSRLRVSATFWQNPRNHFRCQVQFYGLSENDEWTQDRAKPVTQIVSAEAWGRADCGFTSESYQQGVLSATILYEILLGKATLYAVLVSALVLMAMVKRKDSRGRAKRSGSGATNFSLLKQAGDVEENPGPTSMDWIWRILFLVGAATGAHSGPQLQLQESGPGLVKPSETLSLTCTVSGDSISSGDYYWGWIRQPPGKGLEWIGHIYYSGVTYYNPSLKSRVTISVDTSRNQFSLKLSSVTAADTAVYYCTREDSSNWRSRGQGTLVTVSSGSGGGGSGGGGSGGGGSFEALQLQQSGAELVRPGASVTLSCKASGYTFTDYEMHWVKQTPVHGLEWIGAIDPETGGTAYNQKFEGKAILTADKSSSTAYMELRSLTSEDSPVYYCARRRYYGSSSFDYWGQGTTLTVSSTRIQNPDPAVYQLRDSKSSDKSVCLFTDFDSQTNVSQSKDSDVYITDKCVLDMRSMDFKSNSAVAWSNKSDFACANAFNNSIIPEDTFFPSPESSCDVKLVEKSFETDTNLNFQNLSVIGFRILLLKVAGFNLLMTLRLWSS

SEQ ID NO: 13040 - protein, 896 aa, Artificial Sequence
  Synthetic Polypeptide
MALPVTALLLPLALLLHAARPEVQLVESGGGLVQPGGSLRLSCAASGFSFSDFWMSWVRQAPGKGLEWVATISQAGSEKDYVDSVKGRFTISRDNAKKSLYLQMNSLRAEDTAVYYCASGVYSFDYRGQGTLVTVSSGTGGGGSGGGGSGGGGSEFDIVLTQSPASLAVSLGQRATISCRASKSVSTSGYSYLHWYQQKPGQPPKLLIYLASNLESGVPARFSGSGSGTDFTLNIHPVEEEDAATYYCQHSRELPFTFGSGTKLEIKLEDLKNVFPPEVAVFEPSEAEISHTQKATLVCLATGFYPDHVELSWWVNGKEVHSGVCTDPQPLKEQPALNDSRYCLSSRLRVSATFWQNPRNHFRCQVQFYGLSENDEWTQDRAKPVTQIVSAEAWGRADCGFTSESYQQGVLSATILYEILLGKATLYAVLVSALVLMAMVKRKDSRGRAKRSGSGATNFSLLKQAGDVEENPGPTSMDWIWRILFLVGAATGAHSGPQLQLQESGPGLVKPSETLSLTCTVSGDSISSGDYYWGWIRQPPGKGLEWIGHIYYSGVTYYNPSLKSRVTISVDTSRNQFSLKLSSVTAADTAVYYCTREDSSNWRSRGQGTLVTVSSGSGGGGSGGGGSGGGGSFEQVQLVESGGGLVQPGGSLKLSCAASGFDFSRYWMSWVRQAPGKGLEWIGEINPTSSTINFTPSLKDKVFISRDNAKNTLYLQMSKVRSEDTALYYCARGNYYRYGDAMDYWGQGTSVTVSTRIQNPDPAVYQLRDSKSSDKSVCLFTDFDSQTNVSQSKDSDVYITDKCVLDMRSMDFKSNSAVAWSNKSDFACANAFNNSIIPEDTFFPSPESSCDVKLVEKSFETDTNLNFQNLSVIGFRILLLKVAGFNLLMTLRLWSS

SEQ ID NO: 13041 - protein, 894 aa, Artificial Sequence
  Synthetic Polypeptide
MALPVTALLLPLALLLHAARPEVQLVESGGGLVQPGGSLRLSCAASGFSFSDFWMSWVRQAPGKGLEWVATISQAGSEKDYVDSVKGRFTISRDNAKKSLYLQMNSLRAEDTAVYYCASGVYSFDYRGQGTLVTVSSGTGGGGSGGGGSGGGGSEFDIQMTQSPSSLSASVGDRVTITCSASQDISNYLNWYQQKPGKAPKLLIYYTSNLHSGVPSRFSGSGSGTDFTLTISSLQPEDFATYYCQQYRKLPWTFGQGTKLEIKRLEDLKNVFPPEVAVFEPSEAEISHTQKATLVCLATGFYPDHVELSWWVNGKEVHSGVCTDPQPLKEQPALNDSRYCLSSRLRVSATFWQNPRNHFRCQVQFYGLSENDEWTQDRAKPVTQIVSAEAWGRADCGFTSESYQQGVLSATILYEILLGKATLYAVLVSALVLMAMVKRKDSRGRAKRSGSGATNFSLLKQAGDVEENPGPTSMDWIWRILFLVGAATGAHSGPQLQLQESGPGLVKPSETLSLTCTVSGDSISSGDYYWGWIRQPPGKGLEWIGHIYYSGVTYYNPSLKSRVTISVDTSRNQFSLKLSSVTAADTAVYYCTREDSSNWRSRGQGTLVTVSSGSGGGGSGGGGSGGGGSFEQVQLVQSGAEVKKPGSSVKVSCKASGGTFSNYWMHWVRQAPGQGLEWMGATYRGHSDTYYNQKFKGRVTITADKSTSTAYMELSSLRSEDTAVYYCARGAIYDGYDVLDNWGQGTLVTVSSTRIQNPDPAVYQLRDSKSSDKSVCLFTDFDSQTNVSQSKDSDVYITDKCVLDMRSMDFKSNSAVAWSNKSDFACANAFNNSIIPEDTFFPSPESSCDVKLVEKSFETDTNLNFQNLSVIGFRILLLKVAGFNLLMTLRLWSS

SEQ ID NO: 13042 - protein, 894 aa, Artificial Sequence
  Synthetic Polypeptide
MALPVTALLLPLALLLHAARPEVQLVESGGGLVQPGGSLRLSCAASGFSFSDFWMSWVRQAPGKGLEWVATISQAGSEKDYVDSVKGRFTISRDNAKKSLYLQMNSLRAEDTAVYYCASGVYSFDYRGQGTLVTVSSGTGGGGSGGGGSGGGGSEFDIVLTQSPATLSLSPGDRATISCRASESVTILGSHLIYWYQQKPGQPPRLLIQLASNVQTGVPARFSGSGSRTDFTLTISSVEPEDFAVYYCLQSRTIPRTFGQGTKLEIKRLEDLKNVFPPEVAVFEPSEAEISHTQKATLVCLATGFYPDHVELSWWVNGKEVHSGVCTDPQPLKEQPALNDSRYCLSSRLRVSATFWQNPRNHFRCQVQFYGLSENDEWTQDRAKPVTQIVSAEAWGRADCGFTSESYQQGVLSATILYEILLGKATLYAVLVSALVLMAMVKRKDSRGRAKRSGSGATNFSLLKQAGDVEENPGPTSMDWIWRILFLVGAATGAHSGPQLQLQESGPGLVKPSETLSLTCTVSGDSISSGDYYWGWIRQPPGKGLEWIGHIYYSGVTYYNPSLKSRVTISVDTSRNQFSLKLSSVTAADTAVYYCTREDSSNWRSRGQGTLVTVSSGSGGGGSGGGGSGGGGSFEQVQLVQSGPEVKKPGESVKISCKASGYTFRHYSMNWVKQAPGQGLKWMGRINTESGVPIYADDFKGRFSFTVDTSASTAYLEISSLTSEDTAVYFCSNDYLYSLDFWGQGTTLTVSSTRIQNPDPAVYQLRDSKSSDKSVCLFTDFDSQTNVSQSKDSDVYITDKCVLDMRSMDFKSNSAVAWSNKSDFACANAFNNSIIPEDTFFPSPESSCDVKLVEKSFETDTNLNFQNLSVIGFRILLLKVAGFNLLMTLRLWSS

SEQ ID NO: 13043 - protein, 895 aa, Artificial Sequence
  Synthetic Polypeptide
MALPVTALLLPLALLLHAARPEVQLVESGGGLVQPGGSLRLSCAASGFSFSDFWMSWVRQAPGKGLEWVATISQAGSEKDYVDSVKGRFTISRDNAKKSLYLQMNSLRAEDTAVYYCASGVYSFDYRGQGTLVTVSSGTGGGGSGGGGSGGGGSEFQSVLTQPPSVSGAPGQRVTISCTGSSSNIGAGFDVHWYQQLPGTAPKLLIYGNSNRPSGVPDRFSGSKSGTSASLAITGLQAEDEADYYCQSYDSSLSGYVFGTGTKVTVLGLEDLKNVFPPEVAVFEPSEAEISHTQKATLVCLATGFYPDHVELSWWVNGKEVHSGVCTDPQPLKEQPALNDSRYCLSSRLRVSATFWQNPRNHFRCQVQFYGLSENDEWTQDRAKPVTQIVSAEAWGRADCGFTSESYQQGVLSATILYEILLGKATLYAVLVSALVLMAMVKRKDSRGRAKRSGSGATNFSLLKQAGDVEENPGPTSMDWIWRILFLVGAATGAHSGPQLQLQESGPGLVKPSETLSLTCTVSGDSISSGDYYWGWIRQPPGKGLEWIGHIYYSGVTYYNPSLKSRVTISVDTSRNQFSLKLSSVTAADTAVYYCTREDSSNWRSRGQGTLVTVSSGSGGGGSGGGGSGGGGSFEQVQLVQSGAEVKKPGASVKVSCKASGYTFTDYYMHWVRQAPGQRLEWMGWINPNSGGTNYAQKFQDRITVTRDTSSNTGYMELTRLRSDDTAVYYCARSPYSGVLDKWGQGTLVTVSSTRIQNPDPAVYQLRDSKSSDKSVCLFTDFDSQTNVSQSKDSDVYITDKCVLDMRSMDFKSNSAVAWSNKSDFACANAFNNSIIPEDTFFPSPESSCDVKLVEKSFETDTNLNFQNLSVIGFRILLLKVAGFNLLMTLRLWSS

SEQ ID NO: 13044 - protein, 892 aa, Artificial Sequence
  Synthetic Polypeptide
MALPVTALLLPLALLLHAARPEVQLVESGGGLVQPGGSLRLSCAASGFSFSDFWMSWVRQAPGKGLEWVATISQAGSEKDYVDSVKGRFTISRDNAKKSLYLQMNSLRAEDTAVYYCASGVYSFDYRGQGTLVTVSSGTGGGGSGGGGSGGGGSEFQAVLTQPPSASGTPGQRVTISCSGSSSNIGSYTVSWYQQLPGTAPKFLIYSNNQRPSGVPDRFSGSKSGTSASLAISGLQSEDEADYYCAAWDDSLNGYVFGTGTKVTVLGLEDLKNVFPPEVAVFEPSEAEISHTQKATLVCLATGFYPDHVELSWWVNGKEVHSGVCTDPQPLKEQPALNDSRYCLSSRLRVSATFWQNPRNHFRCQVQFYGLSENDEWTQDRAKPVTQIVSAEAWGRADCGFTSESYQQGVLSATILYEILLGKATLYAVLVSALVLMAMVKRKDSRGRAKRSGSGATNFSLLKQAGDVEENPGPTSMDWIWRILFLVGAATGAHSGPQLQLQESGPGLVKPSETLSLTCTVSGDSISSGDYYWGWIRQPPGKGLEWIGHIYYSGVTYYNPSLKSRVTISVDTSRNQFSLKLSSVTAADTAVYYCTREDSSNWRSRGQGTLVTVSSGSGGGGSGGGGSGGGGSFEVQLVQSGAEVKKPGESLKISCKGSGYDFTTYWIGWVRQMPGKGLEWMGIIYPGDSDTRYSPSVRGRVTISADKSINTAYLQWSSLEASDTAMYYCARMWTFSQDGWGQGTLVTVSSTRIQNPDPAVYQLRDSKSSDKSVCLFTDFDSQTNVSQSKDSDVYITDKCVLDMRSMDFKSNSAVAWSNKSDFACANAFNNSIIPEDTFFPSPESSCDVKLVEKSFETDTNLNFQNLSVIGFRILLLKVAGFNLLMTLRLWSS

SEQ ID NO: 13045 - protein, 895 aa, Artificial Sequence
  Synthetic Polypeptide
MALPVTALLLPLALLLHAARPEVQLVESGGGLVQPGGSLRLSCAASGFSFSDFWMSWVRQAPGKGLEWVATISQAGSEKDYVDSVKGRFTISRDNAKKSLYLQMNSLRAEDTAVYYCASGVYSFDYRGQGTLVTVSSGTGGGGSGGGGSGGGGSEFDIVMTQSPDSLAVSLGERATINCKSSQSILYSSNQKNYLAWYQQKPGQSPKLLIYWASTRESGVPDRFSGSGSGTDFTLTISSLQAEDVAVYYCHQYISSYTFGQGTKLEIKLEDLKNVFPPEVAVFEPSEAEISHTQKATLVCLATGFYPDHVELSWWVNGKEVHSGVCTDPQPLKEQPALNDSRYCLSSRLRVSATFWQNPRNHFRCQVQFYGLSENDEWTQDRAKPVTQIVSAEAWGRADCGFTSESYQQGVLSATILYEILLGKATLYAVLVSALVLMAMVKRKDSRGRAKRSGSGATNFSLLKQAGDVEENPGPTSMDWIWRILFLVGAATGAHSGPQLQLQESGPGLVKPSETLSLTCTVSGDSISSGDYYWGWIRQPPGKGLEWIGHIYYSGVTYYNPSLKSRVTISVDTSRNQFSLKLSSVTAADTAVYYCTREDSSNWRSRGQGTLVTVSSGSGGGGSGGGGSGGGGSFEQVQLVQSGAEVKKPGASVKVSCKASGYTFASQWMHWMRQAPGQGLEWIGWINPGNVNTKYNEKFKGRATLTVDTSTNTAYMELSSLRSEDTAVYYCARSTWYRPLDYWGQGTLVTVSSTRIQNPDPAVYQLRDSKSSDKSVCLFTDFDSQTNVSQSKDSDVYITDKCVLDMRSMDFKSNSAVAWSNKSDFACANAFNNSIIPEDTFFPSPESSCDVKLVEKSFETDTNLNFQNLSVIGFRILLLKVAGFNLLMTLRLWSS

SEQ ID NO: 13046 - protein, 895 aa, Artificial Sequence
  Synthetic Polypeptide
MALPVTALLLPLALLLHAARPEVQLVESGGGLVQPGGSLRLSCAASGFSFSDFWMSWVRQAPGKGLEWVATISQAGSEKDYVDSVKGRFTISRDNAKKSLYLQMNSLRAEDTAVYYCASGVYSFDYRGQGTLVTVSSGTGGGGSGGGGSGGGGSEFDHIVLTQSPSSLSASLGDRVTISCRASQDISTYLNWYQQKPDGTVKLLIFYTSRLHAGVPSRFSGSGSGTHHSLTISNLEQEDIATYFCQQGNSLPFTFGSGTKLEIKRLEDLKNVFPPEVAVFEPSEAEISHTQKATLVCLATGFYPDHVELSWWVNGKEVHSGVCTDPQPLKEQPALNDSRYCLSSRLRVSATFWQNPRNHFRCQVQFYGLSENDEWTQDRAKPVTQIVSAEAWGRADCGFTSESYQQGVLSATILYEILLGKATLYAVLVSALVLMAMVKRKDSRGRAKRSGSGATNFSLLKQAGDVEENPGPTSMDWIWRILFLVGAATGAHSGPQLQLQESGPGLVKPSETLSLTCTVSGDSISSGDYYWGWIRQPPGKGLEWIGHIYYSGVTYYNPSLKSRVTISVDTSRNQFSLKLSSVTAADTAVYYCTREDSSNWRSRGQGTLVTVSSGSGGGGSGGGGSGGGGSFEQVQLKESGPELEKPGASVKISCKASGYSFTAYSMNWVKQNNGMSLEWIGSIDPYYGDTKYAQKFKGKATLTVDKASSTAYLQLKSLTSEDSAVYYCARRMITTGDWYFDVWGAGTTVTVSSTRIQNPDPAVYQLRDSKSSDKSVCLFTDFDSQTNVSQSKDSDVYITDKCVLDMRSMDFKSNSAVAWSNKSDFACANAFNNSIIPEDTFFPSPESSCDVKLVEKSFETDTNLNFQNLSVIGFRILLLKVAGFNLLMTLRLWSS

SEQ ID NO: 13047 - protein, 895 aa, Artificial Sequence; identical to SEQ ID NO: 13046
  Synthetic Polypeptide

SEQ ID NO: 13048 - protein, 895 aa, Artificial Sequence
  Synthetic Polypeptide
MALPVTALLLPLALLLHAARPEVQLVESGGGLVQPGGSLRLSCAASGFSFSDFWMSWVRQAPGKGLEWVATISQAGSEKDYVDSVKGRFTISRDNAKKSLYLQMNSLRAEDTAVYYCASGVYSFDYRGQGTLVTVSSGTGGGGSGGGGSGGGGSEFDEIVLTQSPATLSLSPGERATLSCRASQSVSSYLAWYQQKPGQAPRLLIYDASNRATGIPARFSGSGSGTDFTLTISSLEPEDFAVYYCQQRSNWPITFGQGTRLEIKLEDLKNVFPPEVAVFEPSEAEISHTQKATLVCLATGFYPDHVELSWWVNGKEVHSGVCTDPQPLKEQPALNDSRYCLSSRLRVSATFWQNPRNHFRCQVQFYGLSENDEWTQDRAKPVTQIVSAEAWGRADCGFTSESYQQGVLSATILYEILLGKATLYAVLVSALVLMAMVKRKDSRGRAKRSGSGATNFSLLKQAGDVEENPGPTSMDWIWRILFLVGAATGAHSGPQLQLQESGPGLVKPSETLSLTCTVSGDSISSGDYYWGWIRQPPGKGLEWIGHIYYSGVTYYNPSLKSRVTISVDTSRNQFSLKLSSVTAADTAVYYCTREDSSNWRSRGQGTLVTVSSGSGGGGSGGGGSGGGGSFEEVQLVESGGGLVQPGRSLRLSCAASGFTFNDYAMHWVRQAPGKGLEWVSTISWNSGSIGYADSVKGRFTISRDNAKKSLYLQMNSLRAEDTALYYCAKDIQYGNYYYGMDVWGQGTTVTVSSTRIQNPDPAVYQLRDSKSSDKSVCLFTDFDSQTNVSQSKDSDVYITDKCVLDMRSMDFKSNSAVAWSNKSDFACANAFNNSIIPEDTFFPSPESSCDVKLVEKSFETDTNLNFQNLSVIGFRILLLKVAGFNLLMTLRLWSS

SEQ ID NO: 13049 - protein, 897 aa, Artificial Sequence
  Synthetic Polypeptide
MALPVTALLLPLALLLHAARPEVQLVESGGGLVQPGGSLRLSCAASGFSFSDFWMSWVRQAPGKGLEWVATISQAGSEKDYVDSVKGRFTISRDNAKKSLYLQMNSLRAEDTAVYYCASGVYSFDYRGQGTLVTVSSGTGGGGSGGGGSGGGGSEFDIVMTQTPLSLPVTPGEPASISCRSSKSLLHSNGITYLYWYLQKPGQSPQLLIYQMSNLVSGVPDRFSGSGSGTDFTLKISRVEAEDVGVYYCAQNLELPYTFGGGTKVEIKRLEDLKNVFPPEVAVFEPSEAEISHTQKATLVCLATGFYPDHVELSWWVNGKEVHSGVCTDPQPLKEQPALNDSRYCLSSRLRVSATFWQNPRNHFRCQVQFYGLSENDEWTQDRAKPVTQIVSAEAWGRADCGFTSESYQQGVLSATILYEILLGKATLYAVLVSALVLMAMVKRKDSRGRAKRSGSGATNFSLLKQAGDVEENPGPTSMDWIWRILFLVGAATGAHSGPQLQLQESGPGLVKPSETLSLTCTVSGDSISSGDYYWGWIRQPPGKGLEWIGHIYYSGVTYYNPSLKSRVTISVDTSRNQFSLKLSSVTAADTAVYYCTREDSSNWRSRGQGTLVTVSSGSGGGGSGGGGSGGGGSFEQVQLVQSGAEVKKPGSSVKVSCKASGYAFSYSWINWVRQAPGQGLEWMGRIFPGDGDTDYNGKFKGRVTITADKSTSTAYMELSSLRSEDTAVYYCARNVFDGYWLVYWGQGTLVTVSSTRIQNPDPAVYQLRDSKSSDKSVCLFTDFDSQTNVSQSKDSDVYITDKCVLDMRSMDFKSNSAVAWSNKSDFACANAFNNSIIPEDTFFPSPESSCDVKLVEKSFETDTNLNFQNLSVIGFRILLLKVAGFNLLMTLRLWSS

SEQ ID NO: 13050 - protein, 898 aa, Artificial Sequence
  Synthetic Polypeptide
MALPVTALLLPLALLLHAARPEVQLVESGGGLVQPGGSLRLSCAASGFSFSDFWMSWVRQAPGKGLEWVATISQAGSEKDYVDSVKGRFTISRDNAKKSLYLQMNSLRAEDTAVYYCASGVYSFDYRGQGTLVTVSSGTGGGGSGGGGSGGGGSEFDIQMTQSPSSLSASVGDRVTITCRSSQSIVHSVGNTFLEWYQQKPGKAPKLLIYKVSNRFSGVPSRFSGSGSGTDFTLTISSLQPEDFATYYCFQGSQFPYTFGQGTKVEIKRLEDLKNVFPPEVAVFEPSEAEISHTQKATLVCLATGFYPDHVELSWWVNGKEVHSGVCTDPQPLKEQPALNDSRYCLSSRLRVSATFWQNPRNHFRCQVQFYGLSENDEWTQDRAKPVTQIVSAEAWGRADCGFTSESYQQGVLSATILYEILLGKATLYAVLVSALVLMAMVKRKDSRGRAKRSGSGATNFSLLKQAGDVEENPGPTSMDWIWRILFLVGAATGAHSGPQLQLQESGPGLVKPSETLSLTCTVSGDSISSGDYYWGWIRQPPGKGLEWIGHIYYSGVTYYNPSLKSRVTISVDTSRNQFSLKLSSVTAADTAVYYCTREDSSNWRSRGQGTLVTVSSGSGGGGSGGGGSGGGGSFEEVQLVESGGGLVQPGGSLRLSCAASGYEFSRSWMNWVRQAPGKGLEWVGRIYPGDGDTNYSGKFKGRFTISADTSKNTAYLQMNSLRAEDTAVYYCARDGSSWDWYFDVWGQGTLVTVSSTRIQNPDPAVYQLRDSKSSDKSVCLFTDFDSQTNVSQSKDSDVYITDKCVLDMRSMDFKSNSAVAWSNKSDFACANAFNNSIIPEDTFFPSPESSCDVKLVEKSFETDTNLNFQNLSVIGFRILLLKVAGFNLLMTLRLWSS

SEQ ID NO: 13051 - protein, 896 aa, Artificial Sequence
  Synthetic Polypeptide
MALPVTALLLPLALLLHAARPEVQLVESGGGLVQPGGSLRLSCAASGFSFSDFWMSWVRQAPGKGLEWVATISQAGSEKDYVDSVKGRFTISRDNAKKSLYLQMNSLRAEDTAVYYCASGVYSFDYRGQGTLVTVSSGTGGGGSGGGGSGGGGSEFDIQMTQSPSSLSASVGDRVTITCRASQTIWSYLNWYQQRPGKAPNLLIYAASSLQSGVPSRFSGRGSGTDFTLTISSLQAEDFATYYCQQSYSIPQIFGQGTKLEIKLEDLKNVFPPEVAVFEPSEAEISHTQKATLVCLATGFYPDHVELSWWVNGKEVHSGVCTDPQPLKEQPALNDSRYCLSSRLRVSATFWQNPRNHFRCQVQFYGLSENDEWTQDRAKPVTQIVSAEAWGRADCGFTSESYQQGVLSATILYEILLGKATLYAVLVSALVLMAMVKRKDSRGRAKRSGSGATNFSLLKQAGDVEENPGPTSMDWIWRILFLVGAATGAHSGPQLQLQESGPGLVKPSETLSLTCTVSGDSISSGDYYWGWIRQPPGKGLEWIGHIYYSGVTYYNPSLKSRVTISVDTSRNQFSLKLSSVTAADTAVYYCTREDSSNWRSRGQGTLVTVSSGSGGGGSGGGGSGGGGSFEQVQLQQSGPGLVKPSQTLSLTCAISGDSVSSNSAAWNWIRQSPSRGLEWLGRTYYRSKWYNDYAVSVKSRITINPDTSKNQFSLQLNSVTPEDTAVYYCAREVTGDLEDAFDIWGQGTMVTVSSTRIQNPDPAVYQLRDSKSSDKSVCLFTDFDSQTNVSQSKDSDVYITDKCVLDMRSMDFKSNSAVAWSNKSDFACANAFNNSIIPEDTFFPSPESSCDVKLVEKSFETDTNLNFQNLSVIGFRILLLKVAGFNLLMTLRLWSS

SEQ ID NO: 13052 - protein, 889 aa, Artificial Sequence
  Synthetic Polypeptide
MALPVTALLLPLALLLHAARPEVQLVESGGGLVQPGGSLRLSCAASGFSFSDFWMSWVRQAPGKGLEWVATISQAGSEKDYVDSVKGRFTISRDNAKKSLYLQMNSLRAEDTAVYYCASGVYSFDYRGQGTLVTVSSGTGGGGSGGGGSGGGGSEFDIQMTQSPATIENTSLSASVGDRVTITCRASQGISSWLTWYQQKPEKAPKSLIYAASSLQSGVPSRFSGSGSGTDFTLTISSLQPEDFATYYCQQYDSYPITFGQGTRLEIKLEDLKNVFPPEVAVFEPSEAEISHTQKATLVCLATGFYPDHVELSWWVNGKEVHSGVCTDPQPLKEQPALNDSRYCLSSRLRVSATFWQNPRNHFRCQVQFYGLSENDEWTQDRAKPVTQIVSAEAWGRADCGFTSESYQQGVLSATILYEILLGKATLYAVLVSALVLMAMVKRKDSRGRAKRSGSGATNFSLLKQAGDVEENPGPTSMDWIWRILFLVGAATGAHSGPQLQLQESGPGLVKPSETLSLTCTVSGDSISSGDYYWGWIRQPPGKGLEWIGHIYYSGVTYYNPSLKSRVTISVDTSRNQFSLKLSSVTAADTAVYYCTREDSSNWRSRGQGTLVTVSSGSGGGGSGGGGSGGGGSFEQVQLQQWGAGLLKPSETLSLTCAVYGGSFSAYYWSWIRQPPGKGLEWIGDINHGGGTNYNPSLKSRVTISVDTSKNQFSLKLNSVTAADTAVYYCASLTAYWGQGSLVTVSSTRIQNPDPAVYQLRDSKSSDKSVCLFTDFDSQTNVSQSKDSDVYITDKCVLDMRSMDFKSNSAVAWSNKSDFACANAFNNSIIPEDTFFPSPESSCDVKLVEKSFETDTNLNFQNLSVIGFRILLLKVAGFNLLMTLRLWSS

SEQ ID NO: 13053 - protein, 894 aa, Artificial Sequence
  Synthetic Polypeptide
MALPVTALLLPLALLLHAARPEVQLVESGGGLVQPGGSLRLSCAASGFSFSDFWMSWVRQAPGKGLEWVATISQAGSEKDYVDSVKGRFTISRDNAKKSLYLQMNSLRAEDTAVYYCASGVYSFDYRGQGTLVTVSSGTGGGGSGGGGSGGGGSEFDEIVLTQSPDSLAVSLGERATINCKASQSVDFDGDSYLNWYQQKPGQPPKVLIYAASTLQSGVPSRFSGSGSGTDFTLTINSLEAEDAATYYCQQSNEDPWTFGGGTKVEIKLEDLKNVFPPEVAVFEPSEAEISHTQKATLVCLATGFYPDHVELSWWVNGKEVHSGVCTDPQPLKEQPALNDSRYCLSSRLRVSATFWQNPRNHFRCQVQFYGLSENDEWTQDRAKPVTQIVSAEAWGRADCGFTSESYQQGVLSATILYEILLGKATLYAVLVSALVLMAMVKRKDSRGRAKRSGSGATNFSLLKQAGDVEENPGPTSMDWIWRILFLVGAATGAHSGPQLQLQESGPGLVKPSETLSLTCTVSGDSISSGDYYWGWIRQPPGKGLEWIGHIYYSGVTYYNPSLKSRVTISVDTSRNQFSLKLSSVTAADTAVYYCTREDSSNWRSRGQGTLVTVSSGSGGGGSGGGGSGGGGSFEQVQLVQSGAEVKKPGASVKVSCKVSGYTFTDYYITWVRQAPGQALEWMGWIYPGSGNTKYSQKFQGRFVFSVDTSASTAYLQLSSLKAEDTAVYYCANYGNYWFAYWGQGTLVTVSSTRIQNPDPAVYQLRDSKSSDKSVCLFTDFDSQTNVSQSKDSDVYITDKCVLDMRSMDFKSNSAVAWSNKSDFACANAFNNSIIPEDTFFPSPESSCDVKLVEKSFETDTNLNFQNLSVIGFRILLLKVAGFNLLMTLRLWSS

SEQ ID NO: 13054 - protein, 891 aa, Artificial Sequence
  Synthetic Polypeptide
MALPVTALLLPLALLLHAARPEVQLVESGGGLVQPGGSLRLSCAASGFSFSDFWMSWVRQAPGKGLEWVATISQAGSEKDYVDSVKGRFTISRDNAKKSLYLQMNSLRAEDTAVYYCASGVYSFDYRGQGTLVTVSSGTGGGGSGGGGSGGGGSEFDIQMTQSPSSLSASVGDRVTITCRASQGISSWLAWYQQKPEKAPKSLIYAASSLQSGVPSRFSGSGSGTDFTLTISSLQPEDFATYYCQQYNSYPPTFGGGTKVEIKLEDLKNVFPPEVAVFEPSEAEISHTQKATLVCLATGFYPDHVELSWWVNGKEVHSGVCTDPQPLKEQPALNDSRYCLSSRLRVSATFWQNPRNHFRCQVQFYGLSENDEWTQDRAKPVTQIVSAEAWGRADCGFTSESYQQGVLSATILYEILLGKATLYAVLVSALVLMAMVKRKDSRGRAKRSGSGATNFSLLKQAGDVEENPGPTSMDWIWRILFLVGAATGAHSGPQLQLQESGPGLVKPSETLSLTCTVSGDSISSGDYYWGWIRQPPGKGLEWIGHIYYSGVTYYNPSLKSRVTISVDTSRNQFSLKLSSVTAADTAVYYCTREDSSNWRSRGQGTLVTVSSGSGGGGSGGGGSGGGGSFEEVQLVQSGGGLVHPGGSLRLSCAGSGFAFSSSTMHWIRQAPGKGLEWISLIGSGGGIYYGDSVKGRFTISRDNAKNSLYLQMNSLRAEDMAVYYCVRGYFDWVDYFDYWGQGTLVTVSSTRIQNPDPAVYQLRDSKSSDKSVCLFTDFDSQTNVSQSKDSDVYITDKCVLDMRSMDFKSNSAVAWSNKSDFACANAFNNSIIPEDTFFPSPESSCDVKLVEKSFETDTNLNFQNLSVIGFRILLLKVAGFNLLMTLRLWSS

SEQ ID NO: 13055 - protein, 901 aa, Artificial Sequence
  Synthetic Polypeptide
MALPVTALLLPLALLLHAARPEVQLVESGGGLVQPGGSLRLSCAASGFSFSDFWMSWVRQAPGKGLEWVATISQAGSEKDYVDSVKGRFTISRDNAKKSLYLQMNSLRAEDTAVYYCASGVYSFDYRGQGTLVTVSSGTGGGGSGGGGSGGGGSEFDDIVMTQSPDSLTVSLGERTTINCKSSQSVLDSSKNKNSLAWYQQKPGQPPKLLLSWASTRESGIPDRFSGSGSGTDFTLTIDSLQPEDSATYYCQQSAHFPITFGQGTRLEIKLEDLKNVFPPEVAVFEPSEAEISHTQKATLVCLATGFYPDHVELSWWVNGKEVHSGVCTDPQPLKEQPALNDSRYCLSSRLRVSATFWQNPRNHFRCQVQFYGLSENDEWTQDRAKPVTQIVSAEAWGRADCGFTSESYQQGVLSATILYEILLGKATLYAVLVSALVLMAMVKRKDSRGRAKRSGSGATNFSLLKQAGDVEENPGPTSMDWIWRILFLVGAATGAHSGPQLQLQESGPGLVKPSETLSLTCTVSGDSISSGDYYWGWIRQPPGKGLEWIGHIYYSGVTYYNPSLKSRVTISVDTSRNQFSLKLSSVTAADTAVYYCTREDSSNWRSRGQGTLVTVSSGSGGGGSGGGGSGGGGSFEQVQLVQSGAEVKKPGASVKVSCKASGYTFTNYGMNWVKQAPGQGLKWMGWINTYTGEPTYADDFKGRVTMTSDTSTSTAYLELHNLRSDDTAVYYCARWSWSDGYYVYFDYWGQGTTVTVSSTRIQNPDPAVYQLRDSKSSDKSVCLFTDFDSQTNVSQSKDSDVYITDKCVLDMRSMDFKSNSAVAWSNKSDFACANAFNNSIIPEDTFFPSPESSCDVKLVEKSFETDTNLNFQNLSVIGFRILLLKVAGFNLLMTLRLWSS

SEQ ID NO: 13056 - protein, 897 aa, Artificial Sequence
  Synthetic Polypeptide
MALPVTALLLPLALLLHAARPEVQLVESGGGLVQPGGSLRLSCAASGFSFSDFWMSWVRQAPGKGLEWVATISQAGSEKDYVDSVKGRFTISRDNAKKSLYLQMNSLRAEDTAVYYCASGVYSFDYRGQGTLVTVSSGTGGGGSGGGGSGGGGSEFDEIVLTQSPGSLAVSPGERVTMSCKSSQSVFFSSSQKNYLAWYQQIPGQSPRLLIYWASTRESGVPDRFTGSGSGTDFTLTISSVQPEDLAIYYCHQYLSSRTFGQGTKLEIKRLEDLKNVFPPEVAVFEPSEAEISHTQKATLVCLATGFYPDHVELSWWVNGKEVHSGVCTDPQPLKEQPALNDSRYCLSSRLRVSATFWQNPRNHFRCQVQFYGLSENDEWTQDRAKPVTQIVSAEAWGRADCGFTSESYQQGVLSATILYEILLGKATLYAVLVSALVLMAMVKRKDSRGRAKRSGSGATNFSLLKQAGDVEENPGPTSMDWIWRILFLVGAATGAHSGPQLQLQESGPGLVKPSETLSLTCTVSGDSISSGDYYWGWIRQPPGKGLEWIGHIYYSGVTYYNPSLKSRVTISVDTSRNQFSLKLSSVTAADTAVYYCTREDSSNWRSRGQGTLVTVSSGSGGGGSGGGGSGGGGSFEQVQLQQPGAEVVKPGASVKMSCKASGYTFTSYYIHWIKQTPGQGLEWVGVIYPGNDDISYNQKFQGKATLTADKSSTTAYMQLSSLTSEDSAVYYCAREVRLRYFDVWGQGTTVTVSSTRIQNPDPAVYQLRDSKSSDKSVCLFTDFDSQTNVSQSKDSDVYITDKCVLDMRSMDFKSNSAVAWSNKSDFACANAFNNSIIPEDTFFPSPESSCDVKLVEKSFETDTNLNFQNLSVIGFRILLLKVAGFNLLMTLRLWSS

SEQ ID NO: 13057 - protein, 901 aa, Artificial Sequence
  Synthetic Polypeptide
MALPVTALLLPLALLLHAARPEVQLVESGGGLVQPGGSLRLSCAASGFSFSDFWMSWVRQAPGKGLEWVATISQAGSEKDYVDSVKGRFTISRDNAKKSLYLQMNSLRAEDTAVYYCASGVYSFDYRGQGTLVTVSSGTGGGGSGGGGSGGGGSEFDVLLTQSPLSLPVTLGQPASISCRSSQTIVHSNGNTYLEWFQQRPGQSPRLLIYQVSNRFSGVPDRFSGSGSGTDFTLKISRVEAEDVGVYYCFQGSHVPRTFGGGTKVEIKRALEDLKNVFPPEVAVFEPSEAEISHTQKATLVCLATGFYPDHVELSWWVNGKEVHSGVCTDPQPLKEQPALNDSRYCLSSRLRVSATFWQNPRNHFRCQVQFYGLSENDEWTQDRAKPVTQIVSAEAWGRADCGFTSESYQQGVLSATILYEILLGKATLYAVLVSALVLMAMVKRKDSRGRAKRSGSGATNFSLLKQAGDVEENPGPTSMDWIWRILFLVGAATGAHSGPQLQLQESGPGLVKPSETLSLTCTVSGDSISSGDYYWGWIRQPPGKGLEWIGHIYYSGVTYYNPSLKSRVTISVDTSRNQFSLKLSSVTAADTAVYYCTREDSSNWRSRGQGTLVTVSSGSGGGGSGGGGSGGGGSFEQIQLVQSGSELKKPGASVKVSCKASGYTFTNYGMNWVRQAPGQGLKWMGWINTNTGEPKYAEEFKGRFALSLDTSVSTAYLQINSLKAEDTAVYFCARGYGNYARGAWLAYWGQGTLVTVSSTRIQNPDPAVYQLRDSKSSDKSVCLFTDFDSQTNVSQSKDSDVYITDKCVLDMRSMDFKSNSAVAWSNKSDFACANAFNNSIIPEDTFFPSPESSCDVKLVEKSFETDTNLNFQNLSVIGFRILLLKVAGFNLLMTLRLWSS

SEQ ID NO: 13058 - protein, 886 aa, Artificial Sequence
  Synthetic Polypeptide
MALPVTALLLPLALLLHAARPEVQLVESGGGLVQPGGSLRLSCAASGFSFSDFWMSWVRQAPGKGLEWVATISQAGSEKDYVDSVKGRFTISRDNAKKSLYLQMNSLRAEDTAVYYCASGVYSFDYRGQGTLVTVSSGTGGGGSGGGGSGGGGSEFDEIVLTQSPATLSLSPGERATLSCSASSSINYIYWLQQKPGQAPRILIYLTSNLASGVPARFSGSGSGTDFTLTISSLEPEDFAVYYCLQWSSNPLTFGGGTKVEIKLEDLKNVFPPEVAVFEPSEAEISHTQKATLVCLATGFYPDHVELSWWVNGKEVHSGVCTDPQPLKEQPALNDSRYCLSSRLRVSATFWQNPRNHFRCQVQFYGLSENDEWTQDRAKPVTQIVSAEAWGRADCGFTSESYQQGVLSATILYEILLGKATLYAVLVSALVLMAMVKRKDSRGRAKRSGSGATNFSLLKQAGDVEENPGPTSMDWIWRILFLVGAATGAHSGPQLQLQESGPGLVKPSETLSLTCTVSGDSISSGDYYWGWIRQPPGKGLEWIGHIYYSGVTYYNPSLKSRVTISVDTSRNQFSLKLSSVTAADTAVYYCTREDSSNWRSRGQGTLVTVSSGSGGGGSGGGGSGGGGSFEEVQLVESGGGLVKPGGSLRLSCAASGFTFSSYDMSWVRQAPGKGLEWVSTISSGGSYTYYLDSIKGRFTISRDNAKNSLYLQMNSLRAEDTAVYYCARQGLDYWGRGTLVTVSSTRIQNPDPAVYQLRDSKSSDKSVCLFTDFDSQTNVSQSKDSDVYITDKCVLDMRSMDFKSNSAVAWSNKSDFACANAFNNSIIPEDTFFPSPESSCDVKLVEKSFETDTNLNFQNLSVIGFRILLLKVAGFNLLMTLRLWSS

SEQ ID NO: 13059 - protein, 895 aa, Artificial Sequence
  Synthetic Polypeptide
MALPVTALLLPLALLLHAARPEVQLVESGGGLVQPGGSLRLSCAASGFSFSDFWMSWVRQAPGKGLEWVATISQAGSEKDYVDSVKGRFTISRDNAKKSLYLQMNSLRAEDTAVYYCASGVYSFDYRGQGTLVTVSSGTGGGGSGGGGSGGGGSEFDIVMTQSPDSLAVSLGERATINCRASKSVSTSGYSFMHWYQQKPGQPPKLLIYLASNLESGVPDRFSGSGSGTDFTLTISSLQAEDVAVYYCQHSREVPWTFGQGTKVEIKRLEDLKNVFPPEVAVFEPSEAEISHTQKATLVCLATGFYPDHVELSWWVNGKEVHSGVCTDPQPLKEQPALNDSRYCLSSRLRVSATFWQNPRNHFRCQVQFYGLSENDEWTQDRAKPVTQIVSAEAWGRADCGFTSESYQQGVLSATILYEILLGKATLYAVLVSALVLMAMVKRKDSRGRAKRSGSGATNFSLLKQAGDVEENPGPTSMDWIWRILFLVGAATGAHSGPQLQLQESGPGLVKPSETLSLTCTVSGDSISSGDYYWGWIRQPPGKGLEWIGHIYYSGVTYYNPSLKSRVTISVDTSRNQFSLKLSSVTAADTAVYYCTREDSSNWRSRGQGTLVTVSSGSGGGGSGGGGSGGGGSFEQVQLVQSGAEVKKPGASVKVSCKASGYTFTNYGMNWVRQAPGQGLEWMGWINTYTGEPTYADAFKGRFAFSLDTSTSTAYLQINSLRSDDTAVYYCARDYGDYGMDYWGQGTTVTVSSTRIQNPDPAVYQLRDSKSSDKSVCLFTDFDSQTNVSQSKDSDVYITDKCVLDMRSMDFKSNSAVAWSNKSDFACANAFNNSIIPEDTFFPSPESSCDVKLVEKSFETDTNLNFQNLSVIGFRILLLKVAGFNLLMTLRLWSS

SEQ ID NO: 13060 - protein, 891 aa, Artificial Sequence
  Synthetic Polypeptide
MALPVTALLLPLALLLHAARPEVQLVESGGGLVQPGGSLRLSCAASGFSFSDFWMSWVRQAPGKGLEWVATISQAGSEKDYVDSVKGRFTISRDNAKKSLYLQMNSLRAEDTAVYYCASGVYSFDYRGQGTLVTVSSGTGGGGSGGGGSGGGGSEFDIVMTQTPLTLSVTIGQPASISCKSSQSLLDSDGKTYLNWLLQRPGQSPERLIYLVSKLDSGVPDRFTGSGSGTDFTLKISRVEAEDLGVYCCWQGTHFPYTFGGGTKVEIKGLEDLKNVFPPEVAVFEPSEAEISHTQKATLVCLATGFYPDHVELSWWVNGKEVHSGVCTDPQPLKEQPALNDSRYCLSSRLRVSATFWQNPRNHFRCQVQFYGLSENDEWTQDRAKPVTQIVSAEAWGRADCGFTSESYQQGVLSATILYEILLGKATLYAVLVSALVLMAMVKRKDSRGRAKRSGSGATNFSLLKQAGDVEENPGPTSMDWIWRILFLVGAATGAHSGPQLQLQESGPGLVKPSETLSLTCTVSGDSISSGDYYWGWIRQPPGKGLEWIGHIYYSGVTYYNPSLKSRVTISVDTSRNQFSLKLSSVTAADTAVYYCTREDSSNWRSRGQGTLVTVSSGSGGGGSGGGGSGGGGSFEQVQLQQPGAELVRPGASVKLSCKASGYTFTSYWMNWVKQRPGQGLEWIGMIDPSDSETHYNHIFKDKATLTVDKSSSTAYLQLSSLTSEDSAVYYCARNLYLWGQGTSVTVSSTRIQNPDPAVYQLRDSKSSDKSVCLFTDFDSQTNVSQSKDSDVYITDKCVLDMRSMDFKSNSAVAWSNKSDFACANAFNNSIIPEDTFFPSPESSCDVKLVEKSFETDTNLNFQNLSVIGFRILLLKVAGFNLLMTLRLWSS

SEQ ID NO: 13061 - protein, 899 aa, Artificial Sequence
  Synthetic Polypeptide
MALPVTALLLPLALLLHAARPEVQLVESGGGLVQPGGSLRLSCAASGFSFSDFWMSWVRQAPGKGLEWVATISQAGSEKDYVDSVKGRFTISRDNAKKSLYLQMNSLRAEDTAVYYCASGVYSFDYRGQGTLVTVSSGTGGGGSGGGGSGGGGSEFDIVMTQSPDSLAVSLGERATINCESSQSLLNSGNQKNYLTWYQQKPGQPPKPLIYWASTRESGVPDRFSGSGSGTDFTLTISSLQAEDVAVYYCQNDYSYPYTFGQGTKLEIKRLEDLKNVFPPEVAVFEPSEAEISHTQKATLVCLATGFYPDHVELSWWVNGKEVHSGVCTDPQPLKEQPALNDSRYCLSSRLRVSATFWQNPRNHFRCQVQFYGLSENDEWTQDRAKPVTQIVSAEAWGRADCGFTSESYQQGVLSATILYEILLGKATLYAVLVSALVLMAMVKRKDSRGRAKRSGSGATNFSLLKQAGDVEENPGPTSMDWIWRILFLVGAATGAHSGPQLQLQESGPGLVKPSETLSLTCTVSGDSISSGDYYWGWIRQPPGKGLEWIGHIYYSGVTYYNPSLKSRVTISVDTSRNQFSLKLSSVTAADTAVYYCTREDSSNWRSRGQGTLVTVSSGSGGGGSGGGGSGGGGSFEEVQLVQSGAEVKKPGESLKISCKGSGYSFTDYYMKWARQMPGKGLEWMGDIIPSNGATFYNQKFKGQVTISADKSISTTYLQWSSLKASDTAMYYCARSHLLRASWFAYWGQGTMVTVSSTRIQNPDPAVYQLRDSKSSDKSVCLFTDFDSQTNVSQSKDSDVYITDKCVLDMRSMDFKSNSAVAWSNKSDFACANAFNNSIIPEDTFFPSPESSCDVKLVEKSFETDTNLNFQNLSVIGFRILLLKVAGFNLLMTLRLWSS

SEQ ID NO: 13062 - protein, 894 aa, Artificial Sequence
  Synthetic Polypeptide
MALPVTALLLPLALLLHAARPEVQLVESGGGLVQPGGSLRLSCAASGFSFSDFWMSWVRQAPGKGLEWVATISQAGSEKDYVDSVKGRFTISRDNAKKSLYLQMNSLRAEDTAVYYCASGVYSFDYRGQGTLVTVSSGTGGGGSGGGGSGGGGSEFDIQMTQSTSSLSASLGDRVTISCSASQGINNYLNWYQQKPDGTVELLIYYTSTLQSGVPSRFSGSGSGTDYSLTISNLEPEDIGTYYCQQYSKLPRTFGGGTKLEIKLEDLKNVFPPEVAVFEPSEAEISHTQKATLVCLATGFYPDHVELSWWVNGKEVHSGVCTDPQPLKEQPALNDSRYCLSSRLRVSATFWQNPRNHFRCQVQFYGLSENDEWTQDRAKPVTQIVSAEAWGRADCGFTSESYQQGVLSATILYEILLGKATLYAVLVSALVLMAMVKRKDSRGRAKRSGSGATNFSLLKQAGDVEENPGPTSMDWIWRILFLVGAATGAHSGPQLQLQESGPGLVKPSETLSLTCTVSGDSISSGDYYWGWIRQPPGKGLEWIGHIYYSGVTYYNPSLKSRVTISVDTSRNQFSLKLSSVTAADTAVYYCTREDSSNWRSRGQGTLVTVSSGSGGGGSGGGGSGGGGSFEQVQLQQSGSELMMPGASVKISCKATGYTFSNYWIEWVKQRPGHGLEWIGEILPGTGRTIYNEKFKGKATFTADISSNTVQMQLSSLTSEDSAVYYCARRDYYGNFYYAMDYWGQGTSVTVSSTRIQNPDPAVYQLRDSKSSDKSVCLFTDFDSQTNVSQSKDSDVYITDKCVLDMRSMDFKSNSAVAWSNKSDFACANAFNNSIIPEDTFFPSPESSCDVKLVEKSFETDTNLNFQNLSVIGFRILLLKVAGFNLLMTLRLWSS

SEQ ID NO: 13063 - protein, 889 aa, Artificial Sequence
  Synthetic Polypeptide
MALPVTALLLPLALLLHAARPEVQLVESGGGLVQPGGSLRLSCAASGFSFSDFWMSWVRQAPGKGLEWVATISQAGSEKDYVDSVKGRFTISRDNAKKSLYLQMNSLRAEDTAVYYCASGVYSFDYRGQGTLVTVSSGTGGGGSGGGGSGGGGSEFDIQMTQSPASLSVSVGETVTITCRASENIYSNLAWYQQKQGKSPQLLVYAATNLADGVPSRFSGSGSGTQYSLKINSLQSEDFGSYYCQHFWGTWTFGGGTTLEIKLEDLKNVFPPEVAVFEPSEAEISHTQKATLVCLATGFYPDHVELSWWVNGKEVHSGVCTDPQPLKEQPALNDSRYCLSSRLRVSATFWQNPRNHFRCQVQFYGLSENDEWTQDRAKPVTQIVSAEAWGRADCGFTSESYQQGVLSATILYEILLGKATLYAVLVSALVLMAMVKRKDSRGRAKRSGSGATNFSLLKQAGDVEENPGPTSMDWIWRILFLVGAATGAHSGPQLQLQESGPGLVKPSETLSLTCTVSGDSISSGDYYWGWIRQPPGKGLEWIGHIYYSGVTYYNPSLKSRVTISVDTSRNQFSLKLSSVTAADTAVYYCTREDSSNWRSRGQGTLVTVSSGSGGGGSGGGGSGGGGSFEEVQLQQSGPELVKPGASVKMSCKASGYTFTDYYMKWMKQSHGKSLEWIGDINPNNGGTTYNQKFKGKATLTVDKSSSTAYMQLNSLTSEDSAVYYCARDYGYGYFDYWGQGTTLTVSSTRIQNPDPAVYQLRDSKSSDKSVCLFTDFDSQTNVSQSKDSDVYITDKCVLDMRSMDFKSNSAVAWSNKSDFACANAFNNSIIPEDTFFPSPESSCDVKLVEKSFETDTNLNFQNLSVIGFRILLLKVAGFNLLMTLRLWSS

SEQ ID NO: 13064 - protein, 892 aa, Artificial Sequence
  Synthetic Polypeptide
MALPVTALLLPLALLLHAARPEVQLVESGGGLVQPGGSLRLSCAASGFSFSDFWMSWVRQAPGKGLEWVATISQAGSEKDYVDSVKGRFTISRDNAKKSLYLQMNSLRAEDTAVYYCASGVYSFDYRGQGTLVTVSSGTGGGGSGGGGSGGGGSEFEIVLTQSPGTLSLSPGERATLSCRASQSVGGYLAWYQQKPGQAPRLLIYDASNRATGIPARFSGSGSGTDFTLTISSLEPEDFAVYYCQQRNNWPPMYTFGQGTKLEIKRLEDLKNVFPPEVAVFEPSEAEISHTQKATLVCLATGFYPDHVELSWWVNGKEVHSGVCTDPQPLKEQPALNDSRYCLSSRLRVSATFWQNPRNHFRCQVQFYGLSENDEWTQDRAKPVTQIVSAEAWGRADCGFTSESYQQGVLSATILYEILLGKATLYAVLVSALVLMAMVKRKDSRGRAKRSGSGATNFSLLKQAGDVEENPGPTSMDWIWRILFLVGAATGAHSGPQLQLQESGPGLVKPSETLSLTCTVSGDSISSGDYYWGWIRQPPGKGLEWIGHIYYSGVTYYNPSLKSRVTISVDTSRNQFSLKLSSVTAADTAVYYCTREDSSNWRSRGQGTLVTVSSGSGGGGSGGGGSGGGGSFEQVQLVQSGAEVKKPGSSVKVSCKASGGTFSSYAISWVRQAPGQGLEWMGGIIPILGTANYAQKFQGRVTITADESTSTAYMELSSLRSEDTAVYYCARWGGGAFDIWGQGTMVTVSSTRIQNPDPAVYQLRDSKSSDKSVCLFTDFDSQTNVSQSKDSDVYITDKCVLDMRSMDFKSNSAVAWSNKSDFACANAFNNSIIPEDTFFPSPESSCDVKLVEKSFETDTNLNFQNLSVIGFRILLLKVAGFNLLMTLRLWSS

SEQ ID NO: 13065 - protein, 887 aa, Artificial Sequence
  Synthetic Polypeptide
MALPVTALLLPLALLLHAARPEVQLVESGGGLVQPGGSLRLSCAASGFSFSDFWMSWVRQAPGKGLEWVATISQAGSEKDYVDSVKGRFTISRDNAKKSLYLQMNSLRAEDTAVYYCASGVYSFDYRGQGTLVTVSSGTGGGGSGGGGSGGGGSEFQIVLTQSPALMSASPGEKVTMTCSASSSVRYMYWYQQKPRSSPKPWIHLTSNLASGVPARFSGSGSGTSYSLTISSMEAEDAATYYCQQWSSHPFTFGSGTKLEIKLEDLKNVFPPEVAVFEPSEAEISHTQKATLVCLATGFYPDHVELSWWVNGKEVHSGVCTDPQPLKEQPALNDSRYCLSSRLRVSATFWQNPRNHFRCQVQFYGLSENDEWTQDRAKPVTQIVSAEAWGRADCGFTSESYQQGVLSATILYEILLGKATLYAVLVSALVLMAMVKRKDSRGRAKRSGSGATNFSLLKQAGDVEENPGPTSMDWIWRILFLVGAATGAHSGPQLQLQESGPGLVKPSETLSLTCTVSGDSISSGDYYWGWIRQPPGKGLEWIGHIYYSGVTYYNPSLKSRVTISVDTSRNQFSLKLSSVTAADTAVYYCTREDSSNWRSRGQGTLVTVSSGSGGGGSGGGGSGGGGSFEDVQLQESGPGLVKPSQSLSLTCTVTGFSITSDYSWNWIRQFPGNKLEWMGYISYSGHTSYNPSLESRISITRDTSKNQFFLQLNSVTTEDTATYYCTRGNWDVVYWGQGTLVTVSATRIQNPDPAVYQLRDSKSSDKSVCLFTDFDSQTNVSQSKDSDVYITDKCVLDMRSMDFKSNSAVAWSNKSDFACANAFNNSIIPEDTFFPSPESSCDVKLVEKSFETDTNLNFQNLSVIGFRILLLKVAGFNLLMTLRLWSS

SEQ ID NO: 13066 - protein, 897 aa, Artificial Sequence
  Synthetic Polypeptide
MALPVTALLLPLALLLHAARPEVQLVESGGGLVQPGGSLRLSCAASGFSFSDFWMSWVRQAPGKGLEWVATISQAGSEKDYVDSVKGRFTISRDNAKKSLYLQMNSLRAEDTAVYYCASGVYSFDYRGQGTLVTVSSGTGGGGSGGGGSGGGGSEFDVVMTQSPLSLPVTLGQPASISCRSSQSIVHSDGNTYLEWYQQRPGQSPRRLIYKVSNRFSGVPDRFSGSGSGTDFTLKISRVEAEDVGVYYCFQGSHAPWTFGGGTKVEIKLEDLKNVFPPEVAVFEPSEAEISHTQKATLVCLATGFYPDHVELSWWVNGKEVHSGVCTDPQPLKEQPALNDSRYCLSSRLRVSATFWQNPRNHFRCQVQFYGLSENDEWTQDRAKPVTQIVSAEAWGRADCGFTSESYQQGVLSATILYEILLGKATLYAVLVSALVLMAMVKRKDSRGRAKRSGSGATNFSLLKQAGDVEENPGPTSMDWIWRILFLVGAATGAHSGPQLQLQESGPGLVKPSETLSLTCTVSGDSISSGDYYWGWIRQPPGKGLEWIGHIYYSGVTYYNPSLKSRVTISVDTSRNQFSLKLSSVTAADTAVYYCTREDSSNWRSRGQGTLVTVSSGSGGGGSGGGGSGGGGSFEEVQLVESGGGLVQPGGSLRLSCAASGFTFSSYGMHWVRQAPGKGLEWVAYITTRSSTIYYADSVKGRFTISRDNAKNSLYLQMNSLRAEDTAVYYCTREPLTGYYAMDYWGQGTSVTVSSTRIQNPDPAVYQLRDSKSSDKSVCLFTDFDSQTNVSQSKDSDVYITDKCVLDMRSMDFKSNSAVAWSNKSDFACANAFNNSIIPEDTFFPSPESSCDVKLVEKSFETDTNLNFQNLSVIGFRILLLKVAGFNLLMTLRLWSS

SEQ ID NO: 13067 - protein, 889 aa, Artificial Sequence
  Synthetic Polypeptide
MALPVTALLLPLALLLHAARPEVQLVESGGGLVQPGGSLRLSCAASGFSFSDFWMSWVRQAPGKGLEWVATISQAGSEKDYVDSVKGRFTISRDNAKKSLYLQMNSLRAEDTAVYYCASGVYSFDYRGQGTLVTVSSGTGGGGSGGGGSGGGGSEFDIQMTQSPSSLSASVGDRVTITCRASQSISLWLNWYQQKPGKAPKLLIYAASTLQSGVPSRFSGSGSGTDFTLTISSLQPEDFATYYCQQYYTSPYTFGQGTKVEIKRLEDLKNVFPPEVAVFEPSEAEISHTQKATLVCLATGFYPDHVELSWWVNGKEVHSGVCTDPQPLKEQPALNDSRYCLSSRLRVSATFWQNPRNHFRCQVQFYGLSENDEWTQDRAKPVTQIVSAEAWGRADCGFTSESYQQGVLSATILYEILLGKATLYAVLVSALVLMAMVKRKDSRGRAKRSGSGATNFSLLKQAGDVEENPGPTSMDWIWRILFLVGAATGAHSGPQLQLQESGPGLVKPSETLSLTCTVSGDSISSGDYYWGWIRQPPGKGLEWIGHIYYSGVTYYNPSLKSRVTISVDTSRNQFSLKLSSVTAADTAVYYCTREDSSNWRSRGQGTLVTVSSGSGGGGSGGGGSGGGGSFEQVQLLESGGGLVQPGGSLRLSCAASGFTFSSYAMSWVRQAPGKGLEWVSVIRSSGSSTYYADSVKGRFTISRDNSKNTLYLQMNSLRAEDTAVYYCARGGGYFDYWGQGTLVTVSSTRIQNPDPAVYQLRDSKSSDKSVCLFTDFDSQTNVSQSKDSDVYITDKCVLDMRSMDFKSNSAVAWSNKSDFACANAFNNSIIPEDTFFPSPESSCDVKLVEKSFETDTNLNFQNLSVIGFRILLLKVAGFNLLMTLRLWSS

SEQ ID NO: 13068 - protein, 892 aa, Artificial Sequence
  Synthetic Polypeptide
MALPVTALLLPLALLLHAARPEVQLVESGGGLVQPGGSLRLSCAASGFSFSDFWMSWVRQAPGKGLEWVATISQAGSEKDYVDSVKGRFTISRDNAKKSLYLQMNSLRAEDTAVYYCASGVYSFDYRGQGTLVTVSSGTGGGGSGGGGSGGGGSEFDIQMTQSPSSLSASVGDRVTITCRASQSISSYLNWYQQKPGKAPKLLIYAVSTLQSGVPSRFSGSGSGTDFTLTISSLQPEDFATYYCQQSGTFPPTTFGQGTKVEIKRLEDLKNVFPPEVAVFEPSEAEISHTQKATLVCLATGFYPDHVELSWWVNGKEVHSGVCTDPQPLKEQPALNDSRYCLSSRLRVSATFWQNPRNHFRCQVQFYGLSENDEWTQDRAKPVTQIVSAEAWGRADCGFTSESYQQGVLSATILYEILLGKATLYAVLVSALVLMAMVKRKDSRGRAKRSGSGATNFSLLKQAGDVEENPGPTSMDWIWRILFLVGAATGAHSGPQLQLQESGPGLVKPSETLSLTCTVSGDSISSGDYYWGWIRQPPGKGLEWIGHIYYSGVTYYNPSLKSRVTISVDTSRNQFSLKLSSVTAADTAVYYCTREDSSNWRSRGQGTLVTVSSGSGGGGSGGGGSGGGGSFEQVQLLESGGGLVQPGGSLRLSCAASGFTFSSHGMHWVRQAPGKGLEWVSVISGSGSNTGYADSVKGRFTISRDNSKNTLYLQMNSLRAEDTAVYYCARQWGSYAFDSWGQGTLVTVSSTRIQNPDPAVYQLRDSKSSDKSVCLFTDFDSQTNVSQSKDSDVYITDKCVLDMRSMDFKSNSAVAWSNKSDFACANAFNNSIIPEDTFFPSPESSCDVKLVEKSFETDTNLNFQNLSVIGFRILLLKVAGFNLLMTLRLWSS

SEQ ID NO: 13069 - protein, 902 aa, Artificial Sequence
  Synthetic Polypeptide
MALPVTALLLPLALLLHAARPEVQLVESGGGLVQPGGSLRLSCAASGFSFSDFWMSWVRQAPGKGLEWVATISQAGSEKDYVDSVKGRFTISRDNAKKSLYLQMNSLRAEDTAVYYCASGVYSFDYRGQGTLVTVSSGTGGGGSGGGGSGGGGSEFDIVMSQSPSSLAVSVGEKVTMSCKSSQSLLHSSNQKNYLAWYQQKPGQSPKVLIYWASTRESGVPDRFTGSGSGTDFTLTITSVKSEDLAVYYCQQYYSYPWTFGGGTRLEIKRLEDLKNVFPPEVAVFEPSEAEISHTQKATLVCLATGFYPDHVELSWWVNGKEVHSGVCTDPQPLKEQPALNDSRYCLSSRLRVSATFWQNPRNHFRCQVQFYGLSENDEWTQDRAKPVTQIVSAEAWGRADCGFTSESYQQGVLSATILYEILLGKATLYAVLVSALVLMAMVKRKDSRGRAKRSGSGATNFSLLKQAGDVEENPGPTSMDWIWRILFLVGAATGAHSGPQLQLQESGPGLVKPSETLSLTCTVSGDSISSGDYYWGWIRQPPGKGLEWIGHIYYSGVTYYNPSLKSRVTISVDTSRNQFSLKLSSVTAADTAVYYCTREDSSNWRSRGQGTLVTVSSGSGGGGSGGGGSGGGGSFEEVQLQQSVAELVKPGASVKMSCKVSGYTLTDHTIHWMKQRPEQGLEWIGYIYPRDGITGYNEKFKGKATLTADTSSSTAYMQLNSLTSEDSAVYFCARWGYSYRNYAYYYDYWGQGTTLTVSSTRIQNPDPAVYQLRDSKSSDKSVCLFTDFDSQTNVSQSKDSDVYITDKCVLDMRSMDFKSNSAVAWSNKSDFACANAFNNSIIPEDTFFPSPESSCDVKLVEKSFETDTNLNFQNLSVIGFRILLLKVAGFNLLMTLRLWSS

SEQ ID NO: 13070 - protein, 899 aa, Artificial Sequence
  Synthetic Polypeptide
MALPVTALLLPLALLLHAARPEVQLVESGGGLVQPGGSLRLSCAASGFSFSDFWMSWVRQAPGKGLEWVATISQAGSEKDYVDSVKGRFTISRDNAKKSLYLQMNSLRAEDTAVYYCASGVYSFDYRGQGTLVTVSSGTGGGGSGGGGSGGGGSEFEIVLTQSPGTLSLSPGERATLSCRASQSVSSSYLAWYQQKPGQAPRLLIYGTSSRATGIPDRFSGSGSGTDFTLTISRLEPEDFAVYYCQQYGSSPFTFGGGTKVEIKRLEDLKNVFPPEVAVFEPSEAEISHTQKATLVCLATGFYPDHVELSWWVNGKEVHSGVCTDPQPLKEQPALNDSRYCLSSRLRVSATFWQNPRNHFRCQVQFYGLSENDEWTQDRAKPVTQIVSAEAWGRADCGFTSESYQQGVLSATILYEILLGKATLYAVLVSALVLMAMVKRKDSRGRAKRSGSGATNFSLLKQAGDVEENPGPTSMDWIWRILFLVGAATGAHSGPQLQLQESGPGLVKPSETLSLTCTVSGDSISSGDYYWGWIRQPPGKGLEWIGHIYYSGVTYYNPSLKSRVTISVDTSRNQFSLKLSSVTAADTAVYYCTREDSSNWRSRGQGTLVTVSSGSGGGGSGGGGSGGGGSFEQVQLQESGPGLAKPSETLSLTCTVSGDSITSYYWSWIRQPPGKGLEWIGYIYYSGSTNYNPSLKSRVTISVDTSKNQFSLKLSSVTAADTAVYYCARDQRRIAAAGTHFYGMDVWGQGTTVTVSSTRIQNPDPAVYQLRDSKSSDKSVCLFTDFDSQTNVSQSKDSDVYITDKCVLDMRSMDFKSNSAVAWSNKSDFACANAFNNSIIPEDTFFPSPESSCDVKLVEKSFETDTNLNFQNLSVIGFRILLLKVAGFNLLMTLRLWSS

SEQ ID NO: 13071 - protein, 891 aa, Artificial Sequence
  Synthetic Polypeptide
MALPVTALLLPLALLLHAARPEVQLVESGGGLVQPGGSLRLSCAASGFSFSDFWMSWVRQAPGKGLEWVATISQAGSEKDYVDSVKGRFTISRDNAKKSLYLQMNSLRAEDTAVYYCASGVYSFDYRGQGTLVTVSSGTGGGGSGGGGSGGGGSEFDILLTQSPVILSVSPGERVSFSCRASQSIGTNIHWYQQRTNGSPRLLIKYASESISGIPSRFSGSGSGTDFTLSINSVESEDIADYYCQQNNNWPTTFGAGTKLELKLEDLKNVFPPEVAVFEPSEAEISHTQKATLVCLATGFYPDHVELSWWVNGKEVHSGVCTDPQPLKEQPALNDSRYCLSSRLRVSATFWQNPRNHFRCQVQFYGLSENDEWTQDRAKPVTQIVSAEAWGRADCGFTSESYQQGVLSATILYEILLGKATLYAVLVSALVLMAMVKRKDSRGRAKRSGSGATNFSLLKQAGDVEENPGPTSMDWIWRILFLVGAATGAHSGPQLQLQESGPGLVKPSETLSLTCTVSGDSISSGDYYWGWIRQPPGKGLEWIGHIYYSGVTYYNPSLKSRVTISVDTSRNQFSLKLSSVTAADTAVYYCTREDSSNWRSRGQGTLVTVSSGSGGGGSGGGGSGGGGSFEQVQLKQSGPGLVQPSQSLSITCTVSGFSLTNYGVHWVRQSPGKGLEWLGVIWSGGNTDYNTPFTSRLSINKDNSKSQVFFKMNSLQSNDTAIYYCARALTYYDYEFAYWGQGTLVTVSATRIQNPDPAVYQLRDSKSSDKSVCLFTDFDSQTNVSQSKDSDVYITDKCVLDMRSMDFKSNSAVAWSNKSDFACANAFNNSIIPEDTFFPSPESSCDVKLVEKSFETDTNLNFQNLSVIGFRILLLKVAGFNLLMTLRLWSS

SEQ ID NO: 13072 - protein, 884 aa, Artificial Sequence
  Synthetic Polypeptide
MALPVTALLLPLALLLHAARPEVQLVESGGGLVQPGGSLRLSCAASGFSFSDFWMSWVRQAPGKGLEWVATISQAGSEKDYVDSVKGRFTISRDNAKKSLYLQMNSLRAEDTAVYYCASGVYSFDYRGQGTLVTVSSGTGGGGSGGGGSGGGGSEFMTQSPKFLLVSAGDRVTLTCKASQSVNNDVYWYQQEPGQSPKLLIYWASTRESGVPDRFTGSGSGTDFTLTISSVQAEDLAVYYCKQSYNLYTFGGGTKLEIKRLEDLKNVFPPEVAVFEPSEAEISHTQKATLVCLATGFYPDHVELSWWVNGKEVHSGVCTDPQPLKEQPALNDSRYCLSSRLRVSATFWQNPRNHFRCQVQFYGLSENDEWTQDRAKPVTQIVSAEAWGRADCGFTSESYQQGVLSATILYEILLGKATLYAVLVSALVLMAMVKRKDSRGRAKRSGSGATNFSLLKQAGDVEENPGPTSMDWIWRILFLVGAATGAHSGPQLQLQESGPGLVKPSETLSLTCTVSGDSISSGDYYWGWIRQPPGKGLEWIGHIYYSGVTYYNPSLKSRVTISVDTSRNQFSLKLSSVTAADTAVYYCTREDSSNWRSRGQGTLVTVSSGSGGGGSGGGGSGGGGSFEESGRGLVQPGGSRKLSCAASGFTFSTSGMHWVRQAPEKGLEWVAYISSGSTTIYHADTVKGRFTISRDNPKNTLFLQMTSLRSEDTAMYYCCARSGQFGNYFDYWGQGTTLTVSSTRIQNPDPAVYQLRDSKSSDKSVCLFTDFDSQTNVSQSKDSDVYITDKCVLDMRSMDFKSNSAVAWSNKSDFACANAFNNSIIPEDTFFPSPESSCDVKLVEKSFETDTNLNFQNLSVIGFRILLLKVAGFNLLMTLRLWSS

SEQ ID NO: 13073 - protein, 889 aa, Artificial Sequence
  Synthetic Polypeptide
MALPVTALLLPLALLLHAARPEVQLVESGGGLVQPGGSLRLSCAASGFSFSDFWMSWVRQAPGKGLEWVATISQAGSEKDYVDSVKGRFTISRDNAKKSLYLQMNSLRAEDTAVYYCASGVYSFDYRGQGTLVTVSSGTGGGGSGGGGSGGGGSEFQSPSSLAVSAGEKVTMSCKSSQSLLNSRTRKNYLAWYQQKPGQSPKLLIYWASTRESGVPDRFTGSGSGTDFTLTISSVQAEDLAVYYCKQSNLYTFGGGTKLEIKLEDLKNVFPPEVAVFEPSEAEISHTQKATLVCLATGFYPDHVELSWWVNGKEVHSGVCTDPQPLKEQPALNDSRYCLSSRLRVSATFWQNPRNHFRCQVQFYGLSENDEWTQDRAKPVTQIVSAEAWGRADCGFTSESYQQGVLSATILYEILLGKATLYAVLVSALVLMAMVKRKDSRGRAKRSGSGATNFSLLKQAGDVEENPGPTSMDWIWRILFLVGAATGAHSGPQLQLQESGPGLVKPSETLSLTCTVSGDSISSGDYYWGWIRQPPGKGLEWIGHIYYSGVTYYNPSLKSRVTISVDTSRNQFSLKLSSVTAADTAVYYCTREDSSNWRSRGQGTLVTVSSGSGGGGSGGGGSGGGGSFEQVQLEESGPELVKPGASVKLSCKASGYTFTEYIIHWVKQRSGQGLEWIGWFYPGSGSIKYNEKFKDKATLTADKSSSTVYMELSGLTSEDSAVYFCARHDGYSYFDYWGQGTTLTVSSTRIQNPDPAVYQLRDSKSSDKSVCLFTDFDSQTNVSQSKDSDVYITDKCVLDMRSMDFKSNSAVAWSNKSDFACANAFNNSIIPEDTFFPSPESSCDVKLVEKSFETDTNLNFQNLSVIGFRILLLKVAGFNLLMTLRLWSS

SEQ ID NO: 13074 - protein, 892 aa, Artificial Sequence
  Synthetic Polypeptide
MALPVTALLLPLALLLHAARPEVQLVESGGGLVQPGGSLRLSCAASGFSFSDFWMSWVRQAPGKGLEWVATISQAGSEKDYVDSVKGRFTISRDNAKKSLYLQMNSLRAEDTAVYYCASGVYSFDYRGQGTLVTVSSGTGGGGSGGGGSGGGGSEFDIQMTQSPSSLSASLGERVSLTCRATQELSGYLSWLQQKPDGTIKRLIYAASTLDSGVPKRFSGNRSGSDYSLTISSLESEDFADYYCLQYAIYPYTFGGGTKLEIKLEDLKNVFPPEVAVFEPSEAEISHTQKATLVCLATGFYPDHVELSWWVNGKEVHSGVCTDPQPLKEQPALNDSRYCLSSRLRVSATFWQNPRNHFRCQVQFYGLSENDEWTQDRAKPVTQIVSAEAWGRADCGFTSESYQQGVLSATILYEILLGKATLYAVLVSALVLMAMVKRKDSRGRAKRSGSGATNFSLLKQAGDVEENPGPTSMDWIWRILFLVGAATGAHSGPQLQLQESGPGLVKPSETLSLTCTVSGDSISSGDYYWGWIRQPPGKGLEWIGHIYYSGVTYYNPSLKSRVTISVDTSRNQFSLKLSSVTAADTAVYYCTREDSSNWRSRGQGTLVTVSSGSGGGGSGGGGSGGGGSFEEVQLQQSGPELVKPGASVKMSCKASGYTFTSYFIHWVKQKPGQGLEWIGFINPYNDGSKYNEKFKGKATLTSDKSSSTAYMELSSLTSEDSAVYYCTRDDGYYGYAMDYWGQGTSVTVSSTRIQNPDPAVYQLRDSKSSDKSVCLFTDFDSQTNVSQSKDSDVYITDKCVLDMRSMDFKSNSAVAWSNKSDFACANAFNNSIIPEDTFFPSPESSCDVKLVEKSFETDTNLNFQNLSVIGFRILLLKVAGFNLLMTLRLWSS

SEQ ID NO: 13075 - protein, 897 aa, Artificial Sequence
  Synthetic Polypeptide
MALPVTALLLPLALLLHAARPEVQLVESGGGLVQPGGSLRLSCAASGFSFSDFWMSWVRQAPGKGLEWVATISQAGSEKDYVDSVKGRFTISRDNAKKSLYLQMNSLRAEDTAVYYCASGVYSFDYRGQGTLVTVSSGTGGGGSGGGGSGGGGSEFDTIVLTQSPASLAVSLGQRATISCRASESVDSYGNSFMHWYQQKPGQPPKLLIYLASNLESGVPARFSGSGSRTDFTLTIDPVEADDAATYYCQQNNYDPWTFGGGTKLEIKLEDLKNVFPPEVAVFEPSEAEISHTQKATLVCLATGFYPDHVELSWWVNGKEVHSGVCTDPQPLKEQPALNDSRYCLSSRLRVSATFWQNPRNHFRCQVQFYGLSENDEWTQDRAKPVTQIVSAEAWGRADCGFTSESYQQGVLSATILYEILLGKATLYAVLVSALVLMAMVKRKDSRGRAKRSGSGATNFSLLKQAGDVEENPGPTSMDWIWRILFLVGAATGAHSGPQLQLQESGPGLVKPSETLSLTCTVSGDSISSGDYYWGWIRQPPGKGLEWIGHIYYSGVTYYNPSLKSRVTISVDTSRNQFSLKLSSVTAADTAVYYCTREDSSNWRSRGQGTLVTVSSGSGGGGSGGGGSGGGGSFEEVQLQQSGPELVKPGASVKMSCKASGYTFTSYVMHWVKQKPGQGLEWIGYINPYNDGTKYNEKFKGKATLTSDTSSSTAYMELNSLTSEDSAVYFCARPIYFDNDYFDYWGQGTTLKVSSTRIQNPDPAVYQLRDSKSSDKSVCLFTDFDSQTNVSQSKDSDVYITDKCVLDMRSMDFKSNSAVAWSNKSDFACANAFNNSIIPEDTFFPSPESSCDVKLVEKSFETDTNLNFQNLSVIGFRILLLKVAGFNLLMTLRLWSS

SEQ ID NO: 13076 - protein, 892 aa, Artificial Sequence
  Synthetic Polypeptide
MALPVTALLLPLALLLHAARPEVQLVESGGGLVQPGGSLRLSCAASGFSFSDFWMSWVRQAPGKGLEWVATISQAGSEKDYVDSVKGRFTISRDNAKKSLYLQMNSLRAEDTAVYYCASGVYSFDYRGQGTLVTVSSGTGGGGSGGGGSGGGGSEFDIQMTQSPSSLSASVGDRVTITCKASQDVGIAVAWYQQKPGKVPKLLIYWASTRHTGVPDRFSGSGSGTDFTLTISSLQPEDVATYYCQQYSSYPYTFGQGTKVEIKRLEDLKNVFPPEVAVFEPSEAEISHTQKATLVCLATGFYPDHVELSWWVNGKEVHSGVCTDPQPLKEQPALNDSRYCLSSRLRVSATFWQNPRNHFRCQVQFYGLSENDEWTQDRAKPVTQIVSAEAWGRADCGFTSESYQQGVLSATILYEILLGKATLYAVLVSALVLMAMVKRKDSRGRAKRSGSGATNFSLLKQAGDVEENPGPTSMDWIWRILFLVGAATGAHSGPQLQLQESGPGLVKPSETLSLTCTVSGDSISSGDYYWGWIRQPPGKGLEWIGHIYYSGVTYYNPSLKSRVTISVDTSRNQFSLKLSSVTAADTAVYYCTREDSSNWRSRGQGTLVTVSSGSGGGGSGGGGSGGGGSFEEVQLVESGGGLVQPGGSLRLSCAASGFDFSRYWMSWVRQAPGKGLEWIGEINPDSSTINYAPSLKDKFIISRDNAKNSLYLQMNSLRAEDTAVYYCARPDGNYWYFDVWGQGTLVTVSSTRIQNPDPAVYQLRDSKSSDKSVCLFTDFDSQTNVSQSKDSDVYITDKCVLDMRSMDFKSNSAVAWSNKSDFACANAFNNSIIPEDTFFPSPESSCDVKLVEKSFETDTNLNFQNLSVIGFRILLLKVAGFNLLMTLRLWSS

SEQ ID NO: 13077 - protein, 892 aa, Artificial Sequence
  Synthetic Polypeptide
MALPVTALLLPLALLLHAARPEVQLVESGGGLVQPGGSLRLSCAASGFSFSDFWMSWVRQAPGKGLEWVATISQAGSEKDYVDSVKGRFTISRDNAKKSLYLQMNSLRAEDTAVYYCASGVYSFDYRGQGTLVTVSSGTGGGGSGGGGSGGGGSEFDIVMTQSQKSMSTSVGDRVSITCKASQDVITGVAWYQQKPGQSPKLLIYSASYRYTGVPDRFTGSGSGTDFTFTISNVQAEDLAVYYCQQHYSTPLTFGAGTKLELKLEDLKNVFPPEVAVFEPSEAEISHTQKATLVCLATGFYPDHVELSWWVNGKEVHSGVCTDPQPLKEQPALNDSRYCLSSRLRVSATFWQNPRNHFRCQVQFYGLSENDEWTQDRAKPVTQIVSAEAWGRADCGFTSESYQQGVLSATILYEILLGKATLYAVLVSALVLMAMVKRKDSRGRAKRSGSGATNFSLLKQAGDVEENPGPTSMDWIWRILFLVGAATGAHSGPQLQLQESGPGLVKPSETLSLTCTVSGDSISSGDYYWGWIRQPPGKGLEWIGHIYYSGVTYYNPSLKSRVTISVDTSRNQFSLKLSSVTAADTAVYYCTREDSSNWRSRGQGTLVTVSSGSGGGGSGGGGSGGGGSFEQVQLQQPGAELVRPGASVKLSCKASGYSFTTYWMNWVKQRPGQGLEWIGMIHPSDSETRLNQKFKDKATLTVDKSSSTAYMQLSSPTSEDSAVYYCARSTMIATRAMDYWGQGTSVTVSSTRIQNPDPAVYQLRDSKSSDKSVCLFTDFDSQTNVSQSKDSDVYITDKCVLDMRSMDFKSNSAVAWSNKSDFACANAFNNSIIPEDTFFPSPESSCDVKLVEKSFETDTNLNFQNLSVIGFRILLLKVAGFNLLMTLRLWSS

SEQ ID NO: 13078 - protein, 898 aa, Artificial Sequence
  Synthetic Polypeptide
MALPVTALLLPLALLLHAARPEVQLVESGGGLVQPGGSLRLSCAASGFSFSDFWMSWVRQAPGKGLEWVATISQAGSEKDYVDSVKGRFTISRDNAKKSLYLQMNSLRAEDTAVYYCASGVYSFDYRGQGTLVTVSSGTGGGGSGGGGSGGGGSEFQSVLTQPPSVSGAPGQRVTISCTGSGSNIGAPYDVSWYQQLPGTAPKLLIYHNNKRPSGVPDRFSGSKSGTSASLAITGLQAEDEADYYCATVEAGLSGSVFGGGTKLTVLGALEDLKNVFPPEVAVFEPSEAEISHTQKATLVCLATGFYPDHVELSWWVNGKEVHSGVCTDPQPLKEQPALNDSRYCLSSRLRVSATFWQNPRNHFRCQVQFYGLSENDEWTQDRAKPVTQIVSAEAWGRADCGFTSESYQQGVLSATILYEILLGKATLYAVLVSALVLMAMVKRKDSRGRAKRSGSGATNFSLLKQAGDVEENPGPTSMDWIWRILFLVGAATGAHSGPQLQLQESGPGLVKPSETLSLTCTVSGDSISSGDYYWGWIRQPPGKGLEWIGHIYYSGVTYYNPSLKSRVTISVDTSRNQFSLKLSSVTAADTAVYYCTREDSSNWRSRGQGTLVTVSSGSGGGGSGGGGSGGGGSFEQVQLVQSGAEVKKPGASVKVSCKVSGYTLTELSIHWVRQAPGKGLEWMGGFDPEENEIVYAQRFQGRVTMTEDTSTDTAYMELSSLRSEDTAVYYCAIVGSFSPLTLGLWGQGTMVTVSSTRIQNPDPAVYQLRDSKSSDKSVCLFTDFDSQTNVSQSKDSDVYITDKCVLDMRSMDFKSNSAVAWSNKSDFACANAFNNSIIPEDTFFPSPESSCDVKLVEKSFETDTNLNFQNLSVIGFRILLLKVAGFNLLMTLRLWSS

SEQ ID NO: 13079 - protein, 898 aa, Artificial Sequence
  Synthetic Polypeptide
MALPVTALLLPLALLLHAARPEVQLVESGGGLVQPGGSLRLSCAASGFSFSDFWMSWVRQAPGKGLEWVATISQAGSEKDYVDSVKGRFTISRDNAKKSLYLQMNSLRAEDTAVYYCASGVYSFDYRGQGTLVTVSSGTGGGGSGGGGSGGGGSEFQSVLTQPPSVSGAPGQRVTISCTGSGSNIGAPYDVSWYQQLPGTAPKLLIYHNNKRPSGVPDRFSGSKSGTSASLAITGLQAEDEADYYCQSYDSSSISTIFGGGTKLTVLGALEDLKNVFPPEVAVFEPSEAEISHTQKATLVCLATGFYPDHVELSWWVNGKEVHSGVCTDPQPLKEQPALNDSRYCLSSRLRVSATFWQNPRNHFRCQVQFYGLSENDEWTQDRAKPVTQIVSAEAWGRADCGFTSESYQQGVLSATILYEILLGKATLYAVLVSALVLMAMVKRKDSRGRAKRSGSGATNFSLLKQAGDVEENPGPTSMDWIWRILFLVGAATGAHSGPQLQLQESGPGLVKPSETLSLTCTVSGDSISSGDYYWGWIRQPPGKGLEWIGHIYYSGVTYYNPSLKSRVTISVDTSRNQFSLKLSSVTAADTAVYYCTREDSSNWRSRGQGTLVTVSSGSGGGGSGGGGSGGGGSFEQVQLVQSGAEVKKPGASVKVSCKVSGYTLTELSIHWVRQAPGKGLEWMGGFDPEENEIVYAQRFQGRVTMTEDTSTDTAYMELSSLRSEDTAVYYCAIVGSFSGIAYRPWGQGTMVTVSSTRIQNPDPAVYQLRDSKSSDKSVCLFTDFDSQTNVSQSKDSDVYITDKCVLDMRSMDFKSNSAVAWSNKSDFACANAFNNSIIPEDTFFPSPESSCDVKLVEKSFETDTNLNFQNLSVIGFRILLLKVAGFNLLMTLRLWSS

SEQ ID NO: 13080 - protein, 886 aa, Artificial Sequence
  Synthetic Polypeptide
MALPVTALLLPLALLLHAARPEVQLVESGGGLVQPGGSLRLSCAASGFSFSDFWMSWVRQAPGKGLEWVATISQAGSEKDYVDSVKGRFTISRDNAKKSLYLQMNSLRAEDTAVYYCASGVYSFDYRGQGTLVTVSSGTGGGGSGGGGSGGGGSEFDIQMTQSPSSLSASVGDRVTITCRASQGIRNNLAWYQQKPGKAPKRLIYAASNLQSGVPSRFTGSGSGTEFTLIVSSLQPEDFATYYCLQHHSYPLTSGGGTKVELEDLKNVFPPEVAVFEPSEAEISHTQKATLVCLATGFYPDHVELSWWVNGKEVHSGVCTDPQPLKEQPALNDSRYCLSSRLRVSATFWQNPRNHFRCQVQFYGLSENDEWTQDRAKPVTQIVSAEAWGRADCGFTSESYQQGVLSATILYEILLGKATLYAVLVSALVLMAMVKRKDSRGRAKRSGSGATNFSLLKQAGDVEENPGPTSMDWIWRILFLVGAATGAHSGPQLQLQESGPGLVKPSETLSLTCTVSGDSISSGDYYWGWIRQPPGKGLEWIGHIYYSGVTYYNPSLKSRVTISVDTSRNQFSLKLSSVTAADTAVYYCTREDSSNWRSRGQGTLVTVSSGSGGGGSGGGGSGGGGSFEEVQVLESGGGLVQPGGSLRLSCAASGFTFSSYAMSWVRQAPGKGLEWVSAISGSGGSTNYADSVKGRFTISRDNSKNTLYLQMNSLRAEDTAVYYCAGSSGWSEYWGQGTLVTVSSTRIQNPDPAVYQLRDSKSSDKSVCLFTDFDSQTNVSQSKDSDVYITDKCVLDMRSMDFKSNSAVAWSNKSDFACANAFNNSIIPEDTFFPSPESSCDVKLVEKSFETDTNLNFQNLSVIGFRILLLKVAGFNLLMTLRLWSS

SEQ ID NO: 13081 - protein, 892 aa, Artificial Sequence
  Synthetic Polypeptide
MALPVTALLLPLALLLHAARPEVQLVESGGGLVQPGGSLRLSCAASGFSFSDFWMSWVRQAPGKGLEWVATISQAGSEKDYVDSVKGRFTISRDNAKKSLYLQMNSLRAEDTAVYYCASGVYSFDYRGQGTLVTVSSGTGGGGSGGGGSGGGGSEFDEIQLVQSGAEVKKPGESLRISCKGSGFNIEDYYIHWVRQMPGKGLEWMGRIDPENDETKYGPIFQGHVTISADTSINTVYLQWSSLKASDTAMYYCAFRGGVYWGQGTTVTVSSLEDLKNVFPPEVAVFEPSEAEISHTQKATLVCLATGFYPDHVELSWWVNGKEVHSGVCTDPQPLKEQPALNDSRYCLSSRLRVSATFWQNPRNHFRCQVQFYGLSENDEWTQDRAKPVTQIVSAEAWGRADCGFTSESYQQGVLSATILYEILLGKATLYAVLVSALVLMAMVKRKDSRGRAKRSGSGATNFSLLKQAGDVEENPGPTSMDWIWRILFLVGAATGAHSGPQLQLQESGPGLVKPSETLSLTCTVSGDSISSGDYYWGWIRQPPGKGLEWIGHIYYSGVTYYNPSLKSRVTISVDTSRNQFSLKLSSVTAADTAVYYCTREDSSNWRSRGQGTLVTVSSGSGGGGSGGGGSGGGGSFEDVVMTQSPDSLAVSLGERATINCKSSQSLLDSDGKTYLNWLQQKPGQPPKRLISLVSKLDSGVPDRFSGSGSGTDFTLTISSLQAEDVAVYYCWQGTHFPGTFGGGTKVEIKTRIQNPDPAVYQLRDSKSSDKSVCLFTDFDSQTNVSQSKDSDVYITDKCVLDMRSMDFKSNSAVAWSNKSDFACANAFNNSIIPEDTFFPSPESSCDVKLVEKSFETDTNLNFQNLSVIGFRILLLKVAGFNLLMTLRLWSS

SEQ ID NO: 13082 - protein, 899 aa, Artificial Sequence
  Synthetic Polypeptide
MALPVTALLLPLALLLHAARPEVQLVESGGGLVQPGGSLRLSCAASGFSFSDFWMSWVRQAPGKGLEWVATISQAGSEKDYVDSVKGRFTISRDNAKKSLYLQMNSLRAEDTAVYYCASGVYSFDYRGQGTLVTVSSGTGGGGSGGGGSGGGGSEFDELVMTQSPSSLTVTAGEKVTMSCKSSQSLLNSGNQKNYLTWYQQKPGQPPKLLIYWASTRESGVPDRFTGSGSGTDFTLTISSVQAEDLAVYYCQNDYSYPLTFGAGTKLEIKLEDLKNVFPPEVAVFEPSEAEISHTQKATLVCLATGFYPDHVELSWWVNGKEVHSGVCTDPQPLKEQPALNDSRYCLSSRLRVSATFWQNPRNHFRCQVQFYGLSENDEWTQDRAKPVTQIVSAEAWGRADCGFTSESYQQGVLSATILYEILLGKATLYAVLVSALVLMAMVKRKDSRGRAKRSGSGATNFSLLKQAGDVEENPGPTSMDWIWRILFLVGAATGAHSGPQLQLQESGPGLVKPSETLSLTCTVSGDSISSGDYYWGWIRQPPGKGLEWIGHIYYSGVTYYNPSLKSRVTISVDTSRNQFSLKLSSVTAADTAVYYCTREDSSNWRSRGQGTLVTVSSGSGGGGSGGGGSGGGGSFEEVQLLEQSGAELVRPGTSVKISCKASGYAFTNYWLGWVKQRPGHGLEWIGDIFPGSGNIHYNEKFKGKATLTADKSSSTAYMQLSSLTFEDSAVYFCARLRNWDEPMDYWGQGTTVTVSSTRIQNPDPAVYQLRDSKSSDKSVCLFTDFDSQTNVSQSKDSDVYITDKCVLDMRSMDFKSNSAVAWSNKSDFACANAFNNSIIPEDTFFPSPESSCDVKLVEKSFETDTNLNFQNLSVIGFRILLLKVAGFNLLMTLRLWSS

SEQ ID NO: 13083 - protein, 900 aa, Artificial Sequence
  Synthetic Polypeptide
MALPVTALLLPLALLLHAARPEVQLVESGGGLVQPGGSLRLSCAASGFSFSDFWMSWVRQAPGKGLEWVATISQAGSEKDYVDSVKGRFTISRDNAKKSLYLQMNSLRAEDTAVYYCASGVYSFDYRGQGTLVTVSSGTGGGGSGGGGSGGGGSEFDELQMTQSPSSLSASVGDRVTITCRASQSISSYLNWYQQKPGQPPKLLIYWASTRESGVPDRFSGSESGTNYTLTISSLQPEDFATYFCQQSDSLPITFGQGTRLDIQLEDLKNVFPPEVAVFEPSEAEISHTQKATLVCLATGFYPDHVELSWWVNGKEVHSGVCTDPQPLKEQPALNDSRYCLSSRLRVSATFWQNPRNHFRCQVQFYGLSENDEWTQDRAKPVTQIVSAEAWGRADCGFTSESYQQGVLSATILYEILLGKATLYAVLVSALVLMAMVKRKDSRGRAKRSGSGATNFSLLKQAGDVEENPGPTSMDWIWRILFLVGAATGAHSGPQLQLQESGPGLVKPSETLSLTCTVSGDSISSGDYYWGWIRQPPGKGLEWIGHIYYSGVTYYNPSLKSRVTISVDTSRNQFSLKLSSVTAADTAVYYCTREDSSNWRSRGQGTLVTVSSGSGGGGSGGGGSGGGGSFEEVQLLESGGGVVQPGRSLRLSCAASGFTFSSYGMHWVRQAPGKGLEWVAVISYDGSNKYYADSVKGRFTISRDNSKNTLYLQMNSLRAEDTAVYYCAKDMGWGSGWRPYYYYGMDVWGQGTTVTVSSTRIQNPDPAVYQLRDSKSSDKSVCLFTDFDSQTNVSQSKDSDVYITDKCVLDMRSMDFKSNSAVAWSNKSDFACANAFNNSIIPEDTFFPSPESSCDVKLVEKSFETDTNLNFQNLSVIGFRILLLKVAGFNLLMTLRLWSS

SEQ ID NO: 13084 - protein, 897 aa, Artificial Sequence
  Synthetic Polypeptide
MALPVTALLLPLALLLHAARPEVQLVESGGGLVQPGGSLRLSCAASGFSFSDFWMSWVRQAPGKGLEWVATISQAGSEKDYVDSVKGRFTISRDNAKKSLYLQMNSLRAEDTAVYYCASGVYSFDYRGQGTLVTVSSGTGGGGSGGGGSGGGGSEFDDIQMTQSPSSLSASVGDRVTITCRASQSISSYLNWYQQKPGKAPKLLIYAASSLQSGVPSRFSGSGSGTDFTLTISSLQPEDLATYYCQQSYSTPFTFGPGTKVDIKLEDLKNVFPPEVAVFEPSEAEISHTQKATLVCLATGFYPDHVELSWWVNGKEVHSGVCTDPQPLKEQPALNDSRYCLSSRLRVSATFWQNPRNHFRCQVQFYGLSENDEWTQDRAKPVTQIVSAEAWGRADCGFTSESYQQGVLSATILYEILLGKATLYAVLVSALVLMAMVKRKDSRGRAKRSGSGATNFSLLKQAGDVEENPGPTSMDWIWRILFLVGAATGAHSGPQLQLQESGPGLVKPSETLSLTCTVSGDSISSGDYYWGWIRQPPGKGLEWIGHIYYSGVTYYNPSLKSRVTISVDTSRNQFSLKLSSVTAADTAVYYCTREDSSNWRSRGQGTLVTVSSGSGGGGSGGGGSGGGGSFEVHEVQLVQSGAEVKKPGSSVKVSCKASGGTFSSYAISWVRQAPGQGLEWMGGIIPIFGTANYAQKFQGRVTITADKSTSTAYMELSSLRSEDTAVYYCATFALFGFREQAFDIWGQGTTVTVSSTRIQNPDPAVYQLRDSKSSDKSVCLFTDFDSQTNVSQSKDSDVYITDKCVLDMRSMDFKSNSAVAWSNKSDFACANAFNNSIIPEDTFFPSPESSCDVKLVEKSFETDTNLNFQNLSVIGFRILLLKVAGFNLLMTLRLWSS

SEQ ID NO: 13085 - protein, 895 aa, Artificial Sequence
  Synthetic Polypeptide
MALPVTALLLPLALLLHAARPEVQLVESGGGLVQPGGSLRLSCAASGFSFSDFWMSWVRQAPGKGLEWVATISQAGSEKDYVDSVKGRFTISRDNAKKSLYLQMNSLRAEDTAVYYCASGVYSFDYRGQGTLVTVSSGTGGGGSGGGGSGGGGSEFDIVLTQSPLSLAVSLGQPAIISCKASQSVSFAGTSLMHWYHQKPGQQPRLLIYRASNLEAGVPDRFSGSGSKTDFTLTISPVEAEDAATYYCQQSREYPYTFGGGTKLEIKRLEDLKNVFPPEVAVFEPSEAEISHTQKATLVCLATGFYPDHVELSWWVNGKEVHSGVCTDPQPLKEQPALNDSRYCLSSRLRVSATFWQNPRNHFRCQVQFYGLSENDEWTQDRAKPVTQIVSAEAWGRADCGFTSESYQQGVLSATILYEILLGKATLYAVLVSALVLMAMVKRKDSRGRAKRSGSGATNFSLLKQAGDVEENPGPTSMDWIWRILFLVGAATGAHSGPQLQLQESGPGLVKPSETLSLTCTVSGDSISSGDYYWGWIRQPPGKGLEWIGHIYYSGVTYYNPSLKSRVTISVDTSRNQFSLKLSSVTAADTAVYYCTREDSSNWRSRGQGTLVTVSSGSGGGGSGGGGSGGGGSFEQVQLVQSGAEVVKPGASVKISCKASGYTFTGYFMNWVKQSPGQSLEWIGRIHPYDGDTFYNQKFQGKATLTVDKSSNTAHMELLSLTSEDFAVYYCTRYDGSRAMDYWGQGTTVTVSSTRIQNPDPAVYQLRDSKSSDKSVCLFTDFDSQTNVSQSKDSDVYITDKCVLDMRSMDFKSNSAVAWSNKSDFACANAFNNSIIPEDTFFPSPESSCDVKLVEKSFETDTNLNFQNLSVIGFRILLLKVAGFNLLMTLRLWSS

SEQ ID NO: 13086 - protein, 892 aa, Artificial Sequence
  Synthetic Polypeptide
MALPVTALLLPLALLLHAARPEVQLVESGGGLVQPGGSLRLSCAASGFSFSDFWMSWVRQAPGKGLEWVATISQAGSEKDYVDSVKGRFTISRDNAKKSLYLQMNSLRAEDTAVYYCASGVYSFDYRGQGTLVTVSSGTGGGGSGGGGSGGGGSEFDDVVMTQTPLSLPVTPGEPASISCRSSQSLVHRNGNTYLHWYLQKPGQSPKLLIHKVSNRFSGVPDRFSGSGSGTDFTLKISRVEAEDLGVYFCSQSTHVPPLTFGAGTKLELKLEDLKNVFPPEVAVFEPSEAEISHTQKATLVCLATGFYPDHVELSWWVNGKEVHSGVCTDPQPLKEQPALNDSRYCLSSRLRVSATFWQNPRNHFRCQVQFYGLSENDEWTQDRAKPVTQIVSAEAWGRADCGFTSESYQQGVLSATILYEILLGKATLYAVLVSALVLMAMVKRKDSRGRAKRSGSGATNFSLLKQAGDVEENPGPTSMDWIWRILFLVGAATGAHSGPQLQLQESGPGLVKPSETLSLTCTVSGDSISSGDYYWGWIRQPPGKGLEWIGHIYYSGVTYYNPSLKSRVTISVDTSRNQFSLKLSSVTAADTAVYYCTREDSSNWRSRGQGTLVTVSSGSGGGGSGGGGSGGGGSFEEVQLVQSGAEVEKPGASVKISCKASGSSFTGYNMNWVRQNIGKSLEWIGAIDPYYGGTSYNQKFKGRATLTVDKSTSTAYMHLKSLRSEDTAVYYCVSGMEYWGQGTSVTVSSTRIQNPDPAVYQLRDSKSSDKSVCLFTDFDSQTNVSQSKDSDVYITDKCVLDMRSMDFKSNSAVAWSNKSDFACANAFNNSIIPEDTFFPSPESSCDVKLVEKSFETDTNLNFQNLSVIGFRILLLKVAGFNLLMTLRLWSS

SEQ ID NO: 13087 - protein, 890 aa, Artificial Sequence
  Synthetic Polypeptide
MALPVTALLLPLALLLHAARPEVQLVESGGGLVQPGGSLRLSCAASGFSFSDFWMSWVRQAPGKGLEWVATISQAGSEKDYVDSVKGRFTISRDNAKKSLYLQMNSLRAEDTAVYYCASGVYSFDYRGQGTLVTVSSGTGGGGSGGGGSGGGGSEFDEIVMTQTPATLSVSAGERVTITCKASQSVSNDVTWYQQKPGQAPRLLIYSASNRYSGVPARFSGSGYGTEFTFTISSVQSEDFAVYFCQQDYSSFGQGTKLEIKRLEDLKNVFPPEVAVFEPSEAEISHTQKATLVCLATGFYPDHVELSWWVNGKEVHSGVCTDPQPLKEQPALNDSRYCLSSRLRVSATFWQNPRNHFRCQVQFYGLSENDEWTQDRAKPVTQIVSAEAWGRADCGFTSESYQQGVLSATILYEILLGKATLYAVLVSALVLMAMVKRKDSRGRAKRSGSGATNFSLLKQAGDVEENPGPTSMDWIWRILFLVGAATGAHSGPQLQLQESGPGLVKPSETLSLTCTVSGDSISSGDYYWGWIRQPPGKGLEWIGHIYYSGVTYYNPSLKSRVTISVDTSRNQFSLKLSSVTAADTAVYYCTREDSSNWRSRGQGTLVTVSSGSGGGGSGGGGSGGGGSFEQVQLVESGPGVVQPGRSLRISCAVSGFSVTNYGVHWVRQPPGKGLEWLGVIWAGGITNYNSAFMSRLTISKDNSKNTVYLQMNSLRAEDTAMYYCASRGGHYGYALDYWGQGTLVTVSSTRIQNPDPAVYQLRDSKSSDKSVCLFTDFDSQTNVSQSKDSDVYITDKCVLDMRSMDFKSNSAVAWSNKSDFACANAFNNSIIPEDTFFPSPESSCDVKLVEKSFETDTNLNFQNLSVIGFRILLLKVAGFNLLMTLRLWSS

SEQ ID NO: 13088 - protein, 892 aa, Artificial Sequence
  Synthetic Polypeptide
MALPVTALLLPLALLLHAARPEVQLVESGGGLVQPGGSLRLSCAASGFSFSDFWMSWVRQAPGKGLEWVATISQAGSEKDYVDSVKGRFTISRDNAKKSLYLQMNSLRAEDTAVYYCASGVYSFDYRGQGTLVTVSSGTGGGGSGGGGSGGGGSEFDIQMTQTASSLPASLGDRVTISCSASQDISNYLNWYQQKPDGTVKLLIFYSSNLHSGVPSRFSGGGSGTDYSLTISNLEPEDIATYFCHQYSKLPWTFGGGTKLEIKRLEDLKNVFPPEVAVFEPSEAEISHTQKATLVCLATGFYPDHVELSWWVNGKEVHSGVCTDPQPLKEQPALNDSRYCLSSRLRVSATFWQNPRNHFRCQVQFYGLSENDEWTQDRAKPVTQIVSAEAWGRADCGFTSESYQQGVLSATILYEILLGKATLYAVLVSALVLMAMVKRKDSRGRAKRSGSGATNFSLLKQAGDVEENPGPTSMDWIWRILFLVGAATGAHSGPQLQLQESGPGLVKPSETLSLTCTVSGDSISSGDYYWGWIRQPPGKGLEWIGHIYYSGVTYYNPSLKSRVTISVDTSRNQFSLKLSSVTAADTAVYYCTREDSSNWRSRGQGTLVTVSSGSGGGGSGGGGSGGGGSFEEVTLVESGGDFVKPGGSLKVSCAASGFAFSHYAMSWVRQTPAKRLEWVAYISSGGSGTYYSDSVKGRFTISRDNAKNTLYLQMRSLRSEDSAMYFCTRVKLGTYYFDSWGQGTTLTVSSTRIQNPDPAVYQLRDSKSSDKSVCLFTDFDSQTNVSQSKDSDVYITDKCVLDMRSMDFKSNSAVAWSNKSDFACANAFNNSIIPEDTFFPSPESSCDVKLVEKSFETDTNLNFQNLSVIGFRILLLKVAGFNLLMTLRLWSS

SEQ ID NO: 13089 - protein, 894 aa, Artificial Sequence
  Synthetic Polypeptide
MALPVTALLLPLALLLHAARPEVQLVESGGGLVQPGGSLRLSCAASGFSFSDFWMSWVRQAPGKGLEWVATISQAGSEKDYVDSVKGRFTISRDNAKKSLYLQMNSLRAEDTAVYYCASGVYSFDYRGQGTLVTVSSGTGGGGSGGGGSGGGGSEFQFVLTQSPSASAALGASAKLTCTLSSAHKTYTIDWYQQQKGKAPRYLIQVKSDGTYTKATGVPDRFSGSSSGADRYLIIPSVQADDEADYYCGTDYTGGYVFGGGTQLTVTLEDLKNVFPPEVAVFEPSEAEISHTQKATLVCLATGFYPDHVELSWWVNGKEVHSGVCTDPQPLKEQPALNDSRYCLSSRLRVSATFWQNPRNHFRCQVQFYGLSENDEWTQDRAKPVTQIVSAEAWGRADCGFTSESYQQGVLSATILYEILLGKATLYAVLVSALVLMAMVKRKDSRGRAKRSGSGATNFSLLKQAGDVEENPGPTSMDWIWRILFLVGAATGAHSGPQLQLQESGPGLVKPSETLSLTCTVSGDSISSGDYYWGWIRQPPGKGLEWIGHIYYSGVTYYNPSLKSRVTISVDTSRNQFSLKLSSVTAADTAVYYCTREDSSNWRSRGQGTLVTVSSGSGGGGSGGGGSGGGGSFEEQLKESGGGLFKPTDTLTLTCTVSGFSLSYYGVNWVRQAPGNGLEWIGTIGGSGDTYYASWAKSRSTIIRNTNENTVTLKMTSLTAADTATYFCVRYANIGYEYFNVWGPGTLVTVSSTRIQNPDPAVYQLRDSKSSDKSVCLFTDFDSQTNVSQSKDSDVYITDKCVLDMRSMDFKSNSAVAWSNKSDFACANAFNNSIIPEDTFFPSPESSCDVKLVEKSFETDTNLNFQNLSVIGFRILLLKVAGFNLLMTLRLWSS

SEQ ID NO: 13090 - protein, 899 aa, Artificial Sequence
  Synthetic Polypeptide
MALPVTALLLPLALLLHAARPEVQLVESGGGLVQPGGSLRLSCAASGFSFSDFWMSWVRQAPGKGLEWVATISQAGSEKDYVDSVKGRFTISRDNAKKSLYLQMNSLRAEDTAVYYCASGVYSFDYRGQGTLVTVSSGTGGGGSGGGGSGGGGSEFQFVLTQSPSVSAALGASAKLTCTLSSAHKTYTIDWYQQQQGEAPRYLMQVKSDGSYTKGTGVPDRFSGSSSGADRYLIIPSVQADDEAGYVCGADDNGGYVFGGGTQLTVTLEDLKNVFPPEVAVFEPSEAEISHTQKATLVCLATGFYPDHVELSWWVNGKEVHSGVCTDPQPLKEQPALNDSRYCLSSRLRVSATFWQNPRNHFRCQVQFYGLSENDEWTQDRAKPVTQIVSAEAWGRADCGFTSESYQQGVLSATILYEILLGKATLYAVLVSALVLMAMVKRKDSRGRAKRSGSGATNFSLLKQAGDVEENPGPTSMDWIWRILFLVGAATGAHSGPQLQLQESGPGLVKPSETLSLTCTVSGDSISSGDYYWGWIRQPPGKGLEWIGHIYYSGVTYYNPSLKSRVTISVDTSRNQFSLKLSSVTAADTAVYYCTREDSSNWRSRGQGTLVTVSSGSGGGGSGGGGSGGGGSFEQSVKESEGGLFKPTDTLTLTCTVSGFSLSRHALTWVRQAPGNGLEWIGAIDNAGTTYYASWAKSRSTITRNTDLHTVTLKMTSLTASDTATYFCARVFYDINSGYYLDGMDLWGPGTLVTVSSTRIQNPDPAVYQLRDSKSSDKSVCLFTDFDSQTNVSQSKDSDVYITDKCVLDMRSMDFKSNSAVAWSNKSDFACANAFNNSIIPEDTFFPSPESSCDVKLVEKSFETDTNLNFQNLSVIGFRILLLKVAGFNLLMTLRLWSS

SEQ ID NO: 13091 - protein, 893 aa, Artificial Sequence
  Synthetic Polypeptide
MALPVTALLLPLALLLHAARPEVQLVESGGGLVQPGGSLRLSCAASGFSFSDFWMSWVRQAPGKGLEWVATISQAGSEKDYVDSVKGRFTISRDNAKKSLYLQMNSLRAEDTAVYYCASGVYSFDYRGQGTLVTVSSGTGGGGSGGGGSGGGGSEFDIQMTQSPSSLSASVGDRVTITCRASQGISSWLAWYQQKPEKAPKSLIYAASSLQSGVPSRFSGSGSGTDFTLTISSLQPEDFATYYCQQYNSYPPTFGGGTKVEIKLEDLKNVFPPEVAVFEPSEAEISHTQKATLVCLATGFYPDHVELSWWVNGKEVHSGVCTDPQPLKEQPALNDSRYCLSSRLRVSATFWQNPRNHFRCQVQFYGLSENDEWTQDRAKPVTQIVSAEAWGRADCGFTSESYQQGVLSATILYEILLGKATLYAVLVSALVLMAMVKRKDSRGRAKRSGSGATNFSLLKQAGDVEENPGPTSMDWIWRILFLVGAATGAHSGPQLQLQESGPGLVKPSETLSLTCTVSGDSISSGDYYWGWIRQPPGKGLEWIGHIYYSGVTYYNPSLKSRVTISVDTSRNQFSLKLSSVTAADTAVYYCTREDSSNWRSRGQGTLVTVSSGSGGGGSGGGGSGGGGSFEEVQLVESGGGLVQPGESLRLSCVASGFTFSRYKMNWVRQAPGKGLEWVSYISRSGRDIYYADSVKGRFTISRDNAKNSLYLQMNSLRDEDTAVYYCAGTVTTYYYFGMDVWGHGTTVTVSSTRIQNPDPAVYQLRDSKSSDKSVCLFTDFDSQTNVSQSKDSDVYITDKCVLDMRSMDFKSNSAVAWSNKSDFACANAFNNSIIPEDTFFPSPESSCDVKLVEKSFETDTNLNFQNLSVIGFRILLLKVAGFNLLMTLRLWSS

SEQ ID NO: 13092 - protein, 894 aa, Artificial Sequence
  Synthetic Polypeptide
MALPVTALLLPLALLLHAARPEVQLVESGGGLVQPGGSLRLSCAASGFSFSDFWMSWVRQAPGKGLEWVATISQAGSEKDYVDSVKGRFTISRDNAKKSLYLQMNSLRAEDTAVYYCASGVYSFDYRGQGTLVTVSSGTGGGGSGGGGSGGGGSEFDIQMTQSPSSLSASVGDRVTITCRASQGISSWLAWYQQKPEKAPKSLIYAASSLQSGVPSRFSGSGSGTDFTLTISSLQPEDFATYYCQQYNSYPPTFGGGTKVEIKLEDLKNVFPPEVAVFEPSEAEISHTQKATLVCLATGFYPDHVELSWWVNGKEVHSGVCTDPQPLKEQPALNDSRYCLSSRLRVSATFWQNPRNHFRCQVQFYGLSENDEWTQDRAKPVTQIVSAEAWGRADCGFTSESYQQGVLSATILYEILLGKATLYAVLVSALVLMAMVKRKDSRGRAKRSGSGATNFSLLKQAGDVEENPGPTSMDWIWRILFLVGAATGAHSGPQLQLQESGPGLVKPSETLSLTCTVSGDSISSGDYYWGWIRQPPGKGLEWIGHIYYSGVTYYNPSLKSRVTISVDTSRNQFSLKLSSVTAADTAVYYCTREDSSNWRSRGQGTLVTVSSGSGGGGSGGGGSGGGGSFEEVQLVESGGGSVQPGESLRLSCVASGFTFSRYKMNWVRQAPGKGLEWVSYISRSGRDIYYADSVKGRFTISRDNAKNSLYLQMNSLRDEDTAVYYCAGTVTTYYYDFGMDVWGQGTTVTVSSTRIQNPDPAVYQLRDSKSSDKSVCLFTDFDSQTNVSQSKDSDVYITDKCVLDMRSMDFKSNSAVAWSNKSDFACANAFNNSIIPEDTFFPSPESSCDVKLVEKSFETDTNLNFQNLSVIGFRILLLKVAGFNLLMTLRLWSS

SEQ ID NO: 13093 - protein, 892 aa, Artificial Sequence
  Synthetic Polypeptide
MALPVTALLLPLALLLHAARPEVQLVESGGGLVQPGGSLRLSCAASGFSFSDFWMSWVRQAPGKGLEWVATISQAGSEKDYVDSVKGRFTISRDNAKKSLYLQMNSLRAEDTAVYYCASGVYSFDYRGQGTLVTVSSGTGGGGSGGGGSGGGGSEFQSVLTQPPSASGTPGQRVTISCSGSRSNVGGNYVFWYQQVPGATPKLLIYRSNQRPSGVPDRFAGSKSGSSASLAISGLRSEDEADYYCATWDDSLSGFVFGTGTKVTVLGLEDLKNVFPPEVAVFEPSEAEISHTQKATLVCLATGFYPDHVELSWWVNGKEVHSGVCTDPQPLKEQPALNDSRYCLSSRLRVSATFWQNPRNHFRCQVQFYGLSENDEWTQDRAKPVTQIVSAEAWGRADCGFTSESYQQGVLSATILYEILLGKATLYAVLVSALVLMAMVKRKDSRGRAKRSGSGATNFSLLKQAGDVEENPGPTSMDWIWRILFLVGAATGAHSGPQLQLQESGPGLVKPSETLSLTCTVSGDSISSGDYYWGWIRQPPGKGLEWIGHIYYSGVTYYNPSLKSRVTISVDTSRNQFSLKLSSVTAADTAVYYCTREDSSNWRSRGQGTLVTVSSGSGGGGSGGGGSGGGGSFEVQLVESGGGLVKPGGSLRLSCAASGFTFSDYYMSWIRQAPGKGLEWVSYISSSGSTIYYADSVKGRFTISRDNAKNSLYLQMNSLRAEDTAVYYCARGYGKAYDQWGQGTLVTVSSTRIQNPDPAVYQLRDSKSSDKSVCLFTDFDSQTNVSQSKDSDVYITDKCVLDMRSMDFKSNSAVAWSNKSDFACANAFNNSIIPEDTFFPSPESSCDVKLVEKSFETDTNLNFQNLSVIGFRILLLKVAGFNLLMTLRLWSS

SEQ ID NO: 13094 - protein, 891 aa, Artificial Sequence
  Synthetic Polypeptide
MALPVTALLLPLALLLHAARPEVQLVESGGGLVQPGGSLRLSCAASGFSFSDFWMSWVRQAPGKGLEWVATISQAGSEKDYVDSVKGRFTISRDNAKKSLYLQMNSLRAEDTAVYYCASGVYSFDYRGQGTLVTVSSGTGGGGSGGGGSGGGGSEFQSVVTQPPSMSAAPGQQVTISCSGGNSNIERNYVSWYLQLPGTAPKLVIFDNDRRPSGIPDRFSGSKSGTSATLGITGLQTGDEADYYCGTWDSSLRGWVFGGGTKLTVLGLEDLKNVFPPEVAVFEPSEAEISHTQKATLVCLATGFYPDHVELSWWVNGKEVHSGVCTDPQPLKEQPALNDSRYCLSSRLRVSATFWQNPRNHFRCQVQFYGLSENDEWTQDRAKPVTQIVSAEAWGRADCGFTSESYQQGVLSATILYEILLGKATLYAVLVSALVLMAMVKRKDSRGRAKRSGSGATNFSLLKQAGDVEENPGPTSMDWIWRILFLVGAATGAHSGPQLQLQESGPGLVKPSETLSLTCTVSGDSISSGDYYWGWIRQPPGKGLEWIGHIYYSGVTYYNPSLKSRVTISVDTSRNQFSLKLSSVTAADTAVYYCTREDSSNWRSRGQGTLVTVSSGSGGGGSGGGGSGGGGSFEVQLVESGGGLIQPGGSLRLSCAASGFTFSNYAMNWVRQAPGKGLEWVSTINGRGSSTIYADSVKGRFTISRDNSKNTLYLQMNSLRAEDTATYYCARYISRGLGDSWGQGTLVTVTRIQNPDPAVYQLRDSKSSDKSVCLFTDFDSQTNVSQSKDSDVYITDKCVLDMRSMDFKSNSAVAWSNKSDFACANAFNNSIIPEDTFFPSPESSCDVKLVEKSFETDTNLNFQNLSVIGFRILLLKVAGFNLLMTLRLWSS

SEQ ID NO: 13095 - protein, 892 aa, Artificial Sequence
  Synthetic Polypeptide
MALPVTALLLPLALLLHAARPEVQLVESGGGLVQPGGSLRLSCAASGFSFSDFWMSWVRQAPGKGLEWVATISQAGSEKDYVDSVKGRFTISRDNAKKSLYLQMNSLRAEDTAVYYCASGVYSFDYRGQGTLVTVSSGTGGGGSGGGGSGGGGSEFDVVMTQTPLSLPVSLGDQASISCRSSQSLVHSNGNTYLHWYLQKPGQSPKLLIYKVSNRFSGVPDRFSGSGSGTDFTLKISRVEAEDLGVYFCSQNTPVPPKFGSGTKLEIKLEDLKNVFPPEVAVFEPSEAEISHTQKATLVCLATGFYPDHVELSWWVNGKEVHSGVCTDPQPLKEQPALNDSRYCLSSRLRVSATFWQNPRNHFRCQVQFYGLSENDEWTQDRAKPVTQIVSAEAWGRADCGFTSESYQQGVLSATILYEILLGKATLYAVLVSALVLMAMVKRKDSRGRAKRSGSGATNFSLLKQAGDVEENPGPTSMDWIWRILFLVGAATGAHSGPQLQLQESGPGLVKPSETLSLTCTVSGDSISSGDYYWGWIRQPPGKGLEWIGHIYYSGVTYYNPSLKSRVTISVDTSRNQFSLKLSSVTAADTAVYYCTREDSSNWRSRGQGTLVTVSSGSGGGGSGGGGSGGGGSFEQVQLQQSGAELVRPGASVKLSCKASGYTFNDYEMHWVKQTPVHGLKWIGALEPKTGDTAYSQKFKGKATLTADKSSSTAYMELRSLTSEDSAVYYCTSCYYYTYSGQGTLVTVSATRIQNPDPAVYQLRDSKSSDKSVCLFTDFDSQTNVSQSKDSDVYITDKCVLDMRSMDFKSNSAVAWSNKSDFACANAFNNSIIPEDTFFPSPESSCDVKLVEKSFETDTNLNFQNLSVIGFRILLLKVAGFNLLMTLRLWSS

SEQ ID NO: 13096 - protein, 891 aa, Artificial Sequence
  Synthetic Polypeptide
MALPVTALLLPLALLLHAARPEVQLVESGGGLVQPGGSLRLSCAASGFSFSDFWMSWVRQAPGKGLEWVATISQAGSEKDYVDSVKGRFTISRDNAKKSLYLQMNSLRAEDTAVYYCASGVYSFDYRGQGTLVTVSSGTGGGGSGGGGSGGGGSEFDIQLTQSPSSLSASVGDRVTITCRASQGIRNDLGWYQQKPGKAPKRLIYAASSLQNGVPSRFSGSGSGTEFTLTISSLQPEDFATYYCLQHNTYPAFGQGTKVEIKRLEDLKNVFPPEVAVFEPSEAEISHTQKATLVCLATGFYPDHVELSWWVNGKEVHSGVCTDPQPLKEQPALNDSRYCLSSRLRVSATFWQNPRNHFRCQVQFYGLSENDEWTQDRAKPVTQIVSAEAWGRADCGFTSESYQQGVLSATILYEILLGKATLYAVLVSALVLMAMVKRKDSRGRAKRSGSGATNFSLLKQAGDVEENPGPTSMDWIWRILFLVGAATGAHSGPQLQLQESGPGLVKPSETLSLTCTVSGDSISSGDYYWGWIRQPPGKGLEWIGHIYYSGVTYYNPSLKSRVTISVDTSRNQFSLKLSSVTAADTAVYYCTREDSSNWRSRGQGTLVTVSSGSGGGGSGGGGSGGGGSFEQVQLQESGPGLVKPSQTLSLTCTVSGGSISSFNYYWSWIRHHPGKGLEWIGYIYYSGSTYSNPSLKSRVTISVDTSKNQFSLTLSSVTAADTAVYYCARGYNWNYFDYWGQGTLVTVSSTRIQNPDPAVYQLRDSKSSDKSVCLFTDFDSQTNVSQSKDSDVYITDKCVLDMRSMDFKSNSAVAWSNKSDFACANAFNNSIIPEDTFFPSPESSCDVKLVEKSFETDTNLNFQNLSVIGFRILLLKVAGFNLLMTLRLWSS

SEQ ID NO: 13097 - protein, 893 aa, Artificial Sequence
  Synthetic Polypeptide
MALPVTALLLPLALLLHAARPEVQLVESGGGLVQPGGSLRLSCAASGFSFSDFWMSWVRQAPGKGLEWVATISQAGSEKDYVDSVKGRFTISRDNAKKSLYLQMNSLRAEDTAVYYCASGVYSFDYRGQGTLVTVSSGTGGGGSGGGGSGGGGSEFDDIVLTQSPASLAVSLGQSVTISCRASESVEYYGTSLMQWYQQKPGQPPKLLIYATSNVESGVPARFSGSGSGTDFSLNIHPVEEDDIAMYFCQQSRKLPSTFGGGTKLEIKLEDLKNVFPPEVAVFEPSEAEISHTQKATLVCLATGFYPDHVELSWWVNGKEVHSGVCTDPQPLKEQPALNDSRYCLSSRLRVSATFWQNPRNHFRCQVQFYGLSENDEWTQDRAKPVTQIVSAEAWGRADCGFTSESYQQGVLSATILYEILLGKATLYAVLVSALVLMAMVKRKDSRGRAKRSGSGATNFSLLKQAGDVEENPGPTSMDWIWRILFLVGAATGAHSGPQLQLQESGPGLVKPSETLSLTCTVSGDSISSGDYYWGWIRQPPGKGLEWIGHIYYSGVTYYNPSLKSRVTISVDTSRNQFSLKLSSVTAADTAVYYCTREDSSNWRSRGQGTLVTVSSGSGGGGSGGGGSGGGGSFEDVRLQESGPGQVKPSQTVSLTCSVTGYSITNGNHWWNWIRQVSGSKLEWIGYISSSGSTDSNPSLKSRISITRDTSKNQLFLQLNSVTTEDIATYYCARGYYFDYWGQGTTLTVSSTRIQNPDPAVYQLRDSKSSDKSVCLFTDFDSQTNVSQSKDSDVYITDKCVLDMRSMDFKSNSAVAWSNKSDFACANAFNNSIIPEDTFFPSPESSCDVKLVEKSFETDTNLNFQNLSVIGFRILLLKVAGFNLLMTLRLWSS

SEQ ID NO: 13098 - protein, 892 aa, Artificial Sequence
  Synthetic Polypeptide
MALPVTALLLPLALLLHAARPEVQLVESGGGLVQPGGSLRLSCAASGFSFSDFWMSWVRQAPGKGLEWVATISQAGSEKDYVDSVKGRFTISRDNAKKSLYLQMNSLRAEDTAVYYCASGVYSFDYRGQGTLVTVSSGTGGGGSGGGGSGGGGSEFDIQMTQSPSSLSASVGDRVTITCRASQDVNTAVAWYQQKPGKAPKLLIYSASFLESGVPSRFSGSRSGTDFTLTISSLQPEDFATYYCQQHYTTPPTFGQTKVEIKRLEDLKNVFPPEVAVFEPSEAEISHTQKATLVCLATGFYPDHVELSWWVNGKEVHSGVCTDPQPLKEQPALNDSRYCLSSRLRVSATFWQNPRNHFRCQVQFYGLSENDEWTQDRAKPVTQIVSAEAWGRADCGFTSESYQQGVLSATILYEILLGKATLYAVLVSALVLMAMVKRKDSRGRAKRSGSGATNFSLLKQAGDVEENPGPTSMDWIWRILFLVGAATGAHSGPQLQLQESGPGLVKPSETLSLTCTVSGDSISSGDYYWGWIRQPPGKGLEWIGHIYYSGVTYYNPSLKSRVTISVDTSRNQFSLKLSSVTAADTAVYYCTREDSSNWRSRGQGTLVTVSSGSGGGGSGGGGSGGGGSFEEVQLVESGGGLVQPGGSLRLSCAASGFNIKDTYIHWVRQAPGKGLEWVARIYPTNGYTRYADSVKGRFTISADTSKNTAYLQMNSLRAEDTAVYYCSRWGGDGFYAMDVWGQGTLVTVSSTRIQNPDPAVYQLRDSKSSDKSVCLFTDFDSQTNVSQSKDSDVYITDKCVLDMRSMDFKSNSAVAWSNKSDFACANAFNNSIIPEDTFFPSPESSCDVKLVEKSFETDTNLNFQNLSVIGFRILLLKVAGFNLLMTLRLWSS

SEQ ID NO: 13099 - protein, 891 aa, Artificial Sequence
  Synthetic Polypeptide
MALPVTALLLPLALLLHAARPEVQLVESGGGLVQPGGSLRLSCAASGFSFSDFWMSWVRQAPGKGLEWVATISQAGSEKDYVDSVKGRFTISRDNAKKSLYLQMNSLRAEDTAVYYCASGVYSFDYRGQGTLVTVSSGTGGGGSGGGGSGGGGSEFDQSVLTQPPSVSVAPGKTARIPCEGNYIGSSNVHWYQQKPGQAPVLVIHFDSDRPSGIPDRFSGSNSGNMATLTISRVEAGDEADYYCQVWENHGWVFGGGTKLTVLSLEDLKNVFPPEVAVFEPSEAEISHTQKATLVCLATGFYPDHVELSWWVNGKEVHSGVCTDPQPLKEQPALNDSRYCLSSRLRVSATFWQNPRNHFRCQVQFYGLSENDEWTQDRAKPVTQIVSAEAWGRADCGFTSESYQQGVLSATILYEILLGKATLYAVLVSALVLMAMVKRKDSRGRAKRSGSGATNFSLLKQAGDVEENPGPTSMDWIWRILFLVGAATGAHSGPQLQLQESGPGLVKPSETLSLTCTVSGDSISSGDYYWGWIRQPPGKGLEWIGHIYYSGVTYYNPSLKSRVTISVDTSRNQFSLKLSSVTAADTAVYYCTREDSSNWRSRGQGTLVTVSSGSGGGGSGGGGSGGGGSFEEVQLVETGGGLVQPGESLRLSCAASGFTFSDYEMNWVRQAPGKGLEWVSYISSSGSTIYYADSVKGRFTIYRDNAKNSLYLQMNSLRAEDTALYYCARAWGVGPPDYWGQGTLVTVSSTRIQNPDPAVYQLRDSKSSDKSVCLFTDFDSQTNVSQSKDSDVYITDKCVLDMRSMDFKSNSAVAWSNKSDFACANAFNNSIIPEDTFFPSPESSCDVKLVEKSFETDTNLNFQNLSVIGFRILLLKVAGFNLLMTLRLWSS

SEQ ID NO: 13100 - protein, 899 aa, Artificial Sequence
  Synthetic Polypeptide
MALPVTALLLPLALLLHAARPEVQLVESGGGLVQPGGSLRLSCAASGFSFSDFWMSWVRQAPGKGLEWVATISQAGSEKDYVDSVKGRFTISRDNAKKSLYLQMNSLRAEDTAVYYCASGVYSFDYRGQGTLVTVSSGTGGGGSGGGGSGGGGSEFDIQMTQSPSSLSASVGDTVTITCQANGYLNWYQQRRGKAPKLLIYDGSKLERGVPSRFSGRRWGQEYNLTINNLQPEDIATYFCQVYEFVVPGTRLDLKRTVAAPLEDLKNVFPPEVAVFEPSEAEISHTQKATLVCLATGFYPDHVELSWWVNGKEVHSGVCTDPQPLKEQPALNDSRYCLSSRLRVSATFWQNPRNHFRCQVQFYGLSENDEWTQDRAKPVTQIVSAEAWGRADCGFTSESYQQGVLSATILYEILLGKATLYAVLVSALVLMAMVKRKDSRGRAKRSGSGATNFSLLKQAGDVEENPGPTSMDWIWRILFLVGAATGAHSGPQLQLQESGPGLVKPSETLSLTCTVSGDSISSGDYYWGWIRQPPGKGLEWIGHIYYSGVTYYNPSLKSRVTISVDTSRNQFSLKLSSVTAADTAVYYCTREDSSNWRSRGQGTLVTVSSGSGGGGSGGGGSGGGGSFEQVQLLQSGAAVTKPGASVRVSCEASGYNIRDYFIHWWRQAPGQGLQWVGWINPKTGQPNNPRQFQGRVSLTRHASWDFDTFSFYMDLKALRSDDTAVYFCARQRSDYWDFDVWGSGTQVTVSSASTKGPTRIQNPDPAVYQLRDSKSSDKSVCLFTDFDSQTNVSQSKDSDVYITDKCVLDMRSMDFKSNSAVAWSNKSDFACANAFNNSIIPEDTFFPSPESSCDVKLVEKSFETDTNLNFQNLSVIGFRILLLKVAGFNLLMTLRLWSS

SEQ ID NO: 13101 - protein, 905 aa, Artificial Sequence
  Synthetic Polypeptide
MALPVTALLLPLALLLHAARPEVQLVESGGGLVQPGGSLRLSCAASGFSFSDFWMSWVRQAPGKGLEWVATISQAGSEKDYVDSVKGRFTISRDNAKKSLYLQMNSLRAEDTAVYYCASGVYSFDYRGQGTLVTVSSGTGGGGSGGGGSGGGGSEFQSALTQPPSASGSPGQSITISCTGTSNNFVSWYQQHAGKAPKLVIYDVNKRPSGVPDRFSGSKSGNTASLTVSGLQTDDEAVYYCGSLVGNWDVIFGGGTKLTVLLEDLKNVFPPEVAVFEPSEAEISHTQKATLVCLATGFYPDHVELSWWVNGKEVHSGVCTDPQPLKEQPALNDSRYCLSSRLRVSATFWQNPRNHFRCQVQFYGLSENDEWTQDRAKPVTQIVSAEAWGRADCGFTSESYQQGVLSATILYEILLGKATLYAVLVSALVLMAMVKRKDSRGRAKRSGSGATNFSLLKQAGDVEENPGPTSMDWIWRILFLVGAATGAHSGPQLQLQESGPGLVKPSETLSLTCTVSGDSISSGDYYWGWIRQPPGKGLEWIGHIYYSGVTYYNPSLKSRVTISVDTSRNQFSLKLSSVTAADTAVYYCTREDSSNWRSRGQGTLVTVSSGSGGGGSGGGGSGGGGSFEQPQLQESGPTLVEASETLSLTCAVSGDSTAACNSFWGWVRQPPGKGLEWVGSLSHCASYWNRGWTYHNPSLKSRLTLALDTPKNLVFLKLNSVTAADTATYYCARFGGEVLRYTDWPKPAWVDLWGRGTLVTVSSTRIQNPDPAVYQLRDSKSSDKSVCLFTDFDSQTNVSQSKDSDVYITDKCVLDMRSMDFKSNSAVAWSNKSDFACANAFNNSIIPEDTFFPSPESSCDVKLVEKSFETDTNLNFQNLSVIGFRILLLKVAGFNLLMTLRLWSS

SEQ ID NO: 13102 - protein, 890 aa, Artificial Sequence
  Synthetic Polypeptide
MALPVTALLLPLALLLHAARPEVQLVESGGGLVQPGGSLRLSCAASGFSFSDFWMSWVRQAPGKGLEWVATISQAGSEKDYVDSVKGRFTISRDNAKKSLYLQMNSLRAEDTAVYYCASGVYSFDYRGQGTLVTVSSGTGGGGSGGGGSGGGGSEFEIVLTQSPGTLSLSPGETAIISCRTSQYGSLAWYQQRPGQAPRLVIYSGSTRAAGIPDRFSGSRWGPDYNLTISNLESGDFGVYYCQQYEFFGQGTKVQVDIKRLEDLKNVFPPEVAVFEPSEAEISHTQKATLVCLATGFYPDHVELSWWVNGKEVHSGVCTDPQPLKEQPALNDSRYCLSSRLRVSATFWQNPRNHFRCQVQFYGLSENDEWTQDRAKPVTQIVSAEAWGRADCGFTSESYQQGVLSATILYEILLGKATLYAVLVSALVLMAMVKRKDSRGRAKRSGSGATNFSLLKQAGDVEENPGPTSMDWIWRILFLVGAATGAHSGPQLQLQESGPGLVKPSETLSLTCTVSGDSISSGDYYWGWIRQPPGKGLEWIGHIYYSGVTYYNPSLKSRVTISVDTSRNQFSLKLSSVTAADTAVYYCTREDSSNWRSRGQGTLVTVSSGSGGGGSGGGGSGGGGSFEQVQLVQSGGQMKKPGESMRISCRASGYEFIDCTLNWIRLAPGKRPEWMGWLKPRGGAVNYARPLQGRVTMTRDVYSDTAFLELRSLTVDDTAVYFCTRGKNCDYNWDFEHWGRGTPVIVSSTRIQNPDPAVYQLRDSKSSDKSVCLFTDFDSQTNVSQSKDSDVYITDKCVLDMRSMDFKSNSAVAWSNKSDFACANAFNNSIIPEDTFFPSPESSCDVKLVEKSFETDTNLNFQNLSVIGFRILLLKVAGFNLLMTLRLWSS

SEQ ID NO: 13103 - protein, 900 aa, Artificial Sequence
  Synthetic Polypeptide
MALPVTALLLPLALLLHAARPEVQLVESGGGLVQPGGSLRLSCAASGFSFSDFWMSWVRQAPGKGLEWVATISQAGSEKDYVDSVKGRFTISRDNAKKSLYLQMNSLRAEDTAVYYCASGVYSFDYRGQGTLVTVSSGTGGGGSGGGGSGGGGSEFELVLTQSPGTLSLSAGERATLSCRASQSVSSGSLAWYQQKPGQAPRLLIYGASTRATGIPDRFSGSGSGTDFTLTIGRLEPEDLAVYYCQQYGTSPYTFGQGTKLEILEDLKNVFPPEVAVFEPSEAEISHTQKATLVCLATGFYPDHVELSWWVNGKEVHSGVCTDPQPLKEQPALNDSRYCLSSRLRVSATFWQNPRNHFRCQVQFYGLSENDEWTQDRAKPVTQIVSAEAWGRADCGFTSESYQQGVLSATILYEILLGKATLYAVLVSALVLMAMVKRKDSRGRAKRSGSGATNFSLLKQAGDVEENPGPTSMDWIWRILFLVGAATGAHSGPQLQLQESGPGLVKPSETLSLTCTVSGDSISSGDYYWGWIRQPPGKGLEWIGHIYYSGVTYYNPSLKSRVTISVDTSRNQFSLKLSSVTAADTAVYYCTREDSSNWRSRGQGTLVTVSSGSGGGGSGGGGSGGGGSFELEQSGAEVKKPGSSVQVSCKASGGTFSMYGFNWVRQAPGHGLEWMGGIIPIFGTSNYAQKFRGRVTFTADQATSTAYMELTNLRSDDTAVYYCARDFGPDWEDGDSYDGSGRGFFDFWGQGTLVTVSSTRIQNPDPAVYQLRDSKSSDKSVCLFTDFDSQTNVSQSKDSDVYITDKCVLDMRSMDFKSNSAVAWSNKSDFACANAFNNSIIPEDTFFPSPESSCDVKLVEKSFETDTNLNFQNLSVIGFRILLLKVAGFNLLMTLRLWSS

SEQ ID NO: 13104 - protein, 880 aa, Artificial Sequence
  Synthetic Polypeptide
MALPVTALLLPLALLLHAARPEVQLVESGGGLVQPGGSLRLSCAASGFSFSDFWMSWVRQAPGKGLEWVATISQAGSEKDYVDSVKGRFTISRDNAKKSLYLQMNSLRAEDTAVYYCASGVYSFDYRGQGTLVTVSSGTGGGGSGGGGSGGGGSEFDIQMTQSPSSLSASVGDRVTITCQASQDINNYLNWYQQKPGKAPKLLIYDASNLQTGVPSRFSGSGSGTDFTFTIEDIATYYCQQYTFGPGTKVDIKLEDLKNVFPPEVAVFEPSEAEISHTQKATLVCLATGFYPDHVELSWWVNGKEVHSGVCTDPQPLKEQPALNDSRYCLSSRLRVSATFWQNPRNHFRCQVQFYGLSENDEWTQDRAKPVTQIVSAEAWGRADCGFTSESYQQGVLSATILYEILLGKATLYAVLVSALVLMAMVKRKDSRGRAKRSGSGATNFSLLKQAGDVEENPGPTSMDWIWRILFLVGAATGAHSGPQLQLQESGPGLVKPSETLSLTCTVSGDSISSGDYYWGWIRQPPGKGLEWIGHIYYSGVTYYNPSLKSRVTISVDTSRNQFSLKLSSVTAADTAVYYCTREDSSNWRSRGQGTLVTVSSGSGGGGSGGGGSGGGGSFEEVQLLESGGGLVQPGGSLRLSCAASGFTFSWYSMTWVRQAPGKGLEWVSSIVPWGDFTQYADSVKGRFTISRDNSKNTLYLQMNSLRAEDTAVYYCAKGPGWGSFDLWGRGTLVTVSSTRIQNPDPAVYQLRDSKSSDKSVCLFTDFDSQTNVSQSKDSDVYITDKCVLDMRSMDFKSNSAVAWSNKSDFACANAFNNSIIPEDTFFPSPESSCDVKLVEKSFETDTNLNFQNLSVIGFRILLLKVAGFNLLMTLRLWSS

SEQ ID NO: 13105 - protein, 890 aa, Artificial Sequence
  Synthetic Polypeptide
MALPVTALLLPLALLLHAARPEVQLVESGGGLVQPGGSLRLSCAASGFSFSDFWMSWVRQAPGKGLEWVATISQAGSEKDYVDSVKGRFTISRDNAKKSLYLQMNSLRAEDTAVYYCASGVYSFDYRGQGTLVTVSSGTGGGGSGGGGSGGGGSEFDIQMTQSPSSLSASVGDRVTITCTASLSVSSTYLHWYQQKPGSSPKLWIYSTSNLASGVPSRFSGSGSGTSYTLTISSLQPEDFATYYCHQYHRSPLTFGGGTKVEIKRLEDLKNVFPPEVAVFEPSEAEISHTQKATLVCLATGFYPDHVELSWWVNGKEVHSGVCTDPQPLKEQPALNDSRYCLSSRLRVSATFWQNPRNHFRCQVQFYGLSENDEWTQDRAKPVTQIVSAEAWGRADCGFTSESYQQGVLSATILYEILLGKATLYAVLVSALVLMAMVKRKDSRGRAKRSGSGATNFSLLKQAGDVEENPGPTSMDWIWRILFLVGAATGAHSGPQLQLQESGPGLVKPSETLSLTCTVSGDSISSGDYYWGWIRQPPGKGLEWIGHIYYSGVTYYNPSLKSRVTISVDTSRNQFSLKLSSVTAADTAVYYCTREDSSNWRSRGQGTLVTVSSGSGGGGSGGGGSGGGGSFEEVQLVESGGGLVQPGGSLRLSCAASGFSLTKYGVHWVRQAPGKGLEWVGVKWAGGSTDYNSALMSRFTISKDNAKNSLYLQMNSLRAEDTAVYYCARDHRDAMDYWGQGTLVTVSSTRIQNPDPAVYQLRDSKSSDKSVCLFTDFDSQTNVSQSKDSDVYITDKCVLDMRSMDFKSNSAVAWSNKSDFACANAFNNSIIPEDTFFPSPESSCDVKLVEKSFETDTNLNFQNLSVIGFRILLLKVAGFNLLMTLRLWSS

SEQ ID NO: 13106 - protein, 894 aa, Artificial Sequence
  Synthetic Polypeptide
MALPVTALLLPLALLLHAARPEVQLVESGGGLVQPGGSLRLSCAASGFSFSDFWMSWVRQAPGKGLEWVATISQAGSEKDYVDSVKGRFTISRDNAKKSLYLQMNSLRAEDTAVYYCASGVYSFDYRGQGTLVTVSSGTGGGGSGGGGSGGGGSEFDIQMTQSPSSLSASVGDRVTITCKASQDVGTAVAWYQQKPGKAPKLLIYSASYRSTGVPSRFSGSGSGTDFTLTISSLQPEDFATYYCQHHYSAPWTFGGGTKVEIKLEDLKNVFPPEVAVFEPSEAEISHTQKATLVCLATGFYPDHVELSWWVNGKEVHSGVCTDPQPLKEQPALNDSRYCLSSRLRVSATFWQNPRNHFRCQVQFYGLSENDEWTQDRAKPVTQIVSAEAWGRADCGFTSESYQQGVLSATILYEILLGKATLYAVLVSALVLMAMVKRKDSRGRAKRSGSGATNFSLLKQAGDVEENPGPTSMDWIWRILFLVGAATGAHSGPQLQLQESGPGLVKPSETLSLTCTVSGDSISSGDYYWGWIRQPPGKGLEWIGHIYYSGVTYYNPSLKSRVTISVDTSRNQFSLKLSSVTAADTAVYYCTREDSSNWRSRGQGTLVTVSSGSGGGGSGGGGSGGGGSFEEVQLVESGGGLVQPGGSLRLSCAASGFTFSRNGMSWVRQAPGKGLEWVATVSSGGSYIYYADSVKGRFTISRDNAKNSLYLQMNSLRAEDTAVYYCARQGTTALATRFFDVWGQGTLVTVSSTRIQNPDPAVYQLRDSKSSDKSVCLFTDFDSQTNVSQSKDSDVYITDKCVLDMRSMDFKSNSAVAWSNKSDFACANAFNNSIIPEDTFFPSPESSCDVKLVEKSFETDTNLNFQNLSVIGFRILLLKVAGFNLLMTLRLWSS

SEQ ID NO: 13107 - protein, 890 aa, Artificial Sequence
  Synthetic Polypeptide
MALPVTALLLPLALLLHAARPEVQLVESGGGLVQPGGSLRLSCAASGFSFSDFWMSWVRQAPGKGLEWVATISQAGSEKDYVDSVKGRFTISRDNAKKSLYLQMNSLRAEDTAVYYCASGVYSFDYRGQGTLVTVSSGTGGGGSGGGGSGGGGSEFDIQMTQSPPSLSASVGGKVTITCKASQDIDRYMAWYQDKPGKGPKLLIHDTSTLQPGIPSRFSGSGSGRDYSFSISNLEPEDIATYYCLQYDNLWTFGGGTKLEIKRLEDLKNVFPPEVAVFEPSEAEISHTQKATLVCLATGFYPDHVELSWWVNGKEVHSGVCTDPQPLKEQPALNDSRYCLSSRLRVSATFWQNPRNHFRCQVQFYGLSENDEWTQDRAKPVTQIVSAEAWGRADCGFTSESYQQGVLSATILYEILLGKATLYAVLVSALVLMAMVKRKDSRGRAKRSGSGATNFSLLKQAGDVEENPGPTSMDWIWRILFLVGAATGAHSGPQLQLQESGPGLVKPSETLSLTCTVSGDSISSGDYYWGWIRQPPGKGLEWIGHIYYSGVTYYNPSLKSRVTISVDTSRNQFSLKLSSVTAADTAVYYCTREDSSNWRSRGQGTLVTVSSGSGGGGSGGGGSGGGGSFEQVQLVQSGAELVKPGASVKMSCKASGYIFTNYNIHWVKKSPGQGLEWIGAIYPGNGDAPYSQKFQDRATLTADTSSSTTYMELSSLTSEDSAVYYCVRANWDVAFAYWGQGTLVSVSSTRIQNPDPAVYQLRDSKSSDKSVCLFTDFDSQTNVSQSKDSDVYITDKCVLDMRSMDFKSNSAVAWSNKSDFACANAFNNSIIPEDTFFPSPESSCDVKLVEKSFETDTNLNFQNLSVIGFRILLLKVAGFNLLMTLRLWSS

SEQ ID NO: 13108 - protein, 891 aa, Artificial Sequence
  Synthetic Polypeptide
MALPVTALLLPLALLLHAARPEVQLVESGGGLVQPGGSLRLSCAASGFSFSDFWMSWVRQAPGKGLEWVATISQAGSEKDYVDSVKGRFTISRDNAKKSLYLQMNSLRAEDTAVYYCASGVYSFDYRGQGTLVTVSSGTGGGGSGGGGSGGGGSEFDIQMTQSPASLSASVGETVTITCRVSGNIHNYLAWYQQKQGKSPQLLVYNAKTLADGVPSRFSGSGSGTQYSLKINSLQPEDFGSYYCQHFWSNPYTFGGGTKLEIKLEDLKNVFPPEVAVFEPSEAEISHTQKATLVCLATGFYPDHVELSWWVNGKEVHSGVCTDPQPLKEQPALNDSRYCLSSRLRVSATFWQNPRNHFRCQVQFYGLSENDEWTQDRAKPVTQIVSAEAWGRADCGFTSESYQQGVLSATILYEILLGKATLYAVLVSALVLMAMVKRKDSRGRAKRSGSGATNFSLLKQAGDVEENPGPTSMDWIWRILFLVGAATGAHSGPQLQLQESGPGLVKPSETLSLTCTVSGDSISSGDYYWGWIRQPPGKGLEWIGHIYYSGVTYYNPSLKSRVTISVDTSRNQFSLKLSSVTAADTAVYYCTREDSSNWRSRGQGTLVTVSSGSGGGGSGGGGSGGGGSFEQVQLQQSGASVKVSCKASELVRPGTGYAFTNYLIEWVKQRPGQGLEWIGVINPGSGGTNYNEKFKGKATLTADKSSSTAYMQLSSLTSDDSAVYFCARYRSYDWYFDVWGAGTTVTVSSTRIQNPDPAVYQLRDSKSSDKSVCLFTDFDSQTNVSQSKDSDVYITDKCVLDMRSMDFKSNSAVAWSNKSDFACANAFNNSIIPEDTFFPSPESSCDVKLVEKSFETDTNLNFQNLSVIGFRILLLKVAGFNLLMTLRLWSS

SEQ ID NO: 13109 - protein, 890 aa, Artificial Sequence
  Synthetic Polypeptide
MALPVTALLLPLALLLHAARPEVQLVESGGGLVQPGGSLRLSCAASGFSFSDFWMSWVRQAPGKGLEWVATISQAGSEKDYVDSVKGRFTISRDNAKKSLYLQMNSLRAEDTAVYYCASGVYSFDYRGQGTLVTVSSGTGGGGSGGGGSGGGGSEFDIQMTQSFSSLSASVGDRVTITCRASQDISNYLNWYQQKPGKAPKLLIYYTSRLHSGVPSRFSGSGSGTDYTLTISSLQPEDFATYFCQQGNTLPWTFGGGTKLEIKRLEDLKNVFPPEVAVFEPSEAEISHTQKATLVCLATGFYPDHVELSWWVNGKEVHSGVCTDPQPLKEQPALNDSRYCLSSRLRVSATFWQNPRNHFRCQVQFYGLSENDEWTQDRAKPVTQIVSAEAWGRADCGFTSESYQQGVLSATILYEILLGKATLYAVLVSALVLMAMVKRKDSRGRAKRSGSGATNFSLLKQAGDVEENPGPTSMDWIWRILFLVGAATGAHSGPQLQLQESGPGLVKPSETLSLTCTVSGDSISSGDYYWGWIRQPPGKGLEWIGHIYYSGVTYYNPSLKSRVTISVDTSRNQFSLKLSSVTAADTAVYYCTREDSSNWRSRGQGTLVTVSSGSGGGGSGGGGSGGGGSFEEVQLVQSGGGLVQSGGSLRLSCRASGYTFTRYWMLWVRQRPGKGLEWVAEINPRNDRTNYNEKFKTRFTISVDRSKNTLYLQMDSLRAEDTAVYFCALGGGYAMDYWGQGTLVTVSSTRIQNPDPAVYQLRDSKSSDKSVCLFTDFDSQTNVSQSKDSDVYITDKCVLDMRSMDFKSNSAVAWSNKSDFACANAFNNSIIPEDTFFPSPESSCDVKLVEKSFETDTNLNFQNLSVIGFRILLLKVAGFNLLMTLRLWSS

SEQ ID NO: 13110 - protein, 891 aa, Artificial Sequence
  Synthetic Polypeptide
MALPVTALLLPLALLLHAARPEVQLVESGGGLVQPGGSLRLSCAASGFSFSDFWMSWVRQAPGKGLEWVATISQAGSEKDYVDSVKGRFTISRDNAKKSLYLQMNSLRAEDTAVYYCASGVYSFDYRGQGTLVTVSSGTGGGGSGGGGSGGGGSEFDIQMTQSPASLSASVGETVTIICRASVNIYSYLAWYQQKQGKSPQLLVYNAKILAEGVPSRFSGSGSGTQFSLKINSLQPEDFGSYYCQHHYGTFTFGSGTKLEIKRLEDLKNVFPPEVAVFEPSEAEISHTQKATLVCLATGFYPDHVELSWWVNGKEVHSGVCTDPQPLKEQPALNDSRYCLSSRLRVSATFWQNPRNHFRCQVQFYGLSENDEWTQDRAKPVTQIVSAEAWGRADCGFTSESYQQGVLSATILYEILLGKATLYAVLVSALVLMAMVKRKDSRGRAKRSGSGATNFSLLKQAGDVEENPGPTSMDWIWRILFLVGAATGAHSGPQLQLQESGPGLVKPSETLSLTCTVSGDSISSGDYYWGWIRQPPGKGLEWIGHIYYSGVTYYNPSLKSRVTISVDTSRNQFSLKLSSVTAADTAVYYCTREDSSNWRSRGQGTLVTVSSGSGGGGSGGGGSGGGGSFEQVQLKESGPGLVAPSQSLSITCTISGFSLTSYGVHWVRQPPGKGLEWLVVIWSDGSTTYNSALKSRLSISKDNSKSQVFLKMNSLQTDDTAIYYCASHYGSTLAFASWGHGTLVTVSAATRIQNPDPAVYQLRDSKSSDKSVCLFTDFDSQTNVSQSKDSDVYITDKCVLDMRSMDFKSNSAVAWSNKSDFACANAFNNSIIPEDTFFPSPESSCDVKLVEKSFETDTNLNFQNLSVIGFRILLLKVAGFNLLMTLRLWSS

SEQ ID NO: 13111 - protein, 899 aa, Artificial Sequence
  Synthetic Polypeptide
MALPVTALLLPLALLLHAARPEVQLVESGGGLVQPGGSLRLSCAASGFSFSDFWMSWVRQAPGKGLEWVATISQAGSEKDYVDSVKGRFTISRDNAKKSLYLQMNSLRAEDTAVYYCASGVYSFDYRGQGTLVTVSSGTGGGGSGGGGSGGGGSEFDIVMTQSHKFMSTSVGDRVSVTCKASQNVGNNVAWYQQKPGQSPKVLIYSASYRYSGVPDRFTGSGSGTDFTLTISNVQSEDLAEYFCQQYNTYPFTFGSGTKLEIKLEDLKNVFPPEVAVFEPSEAEISHTQKATLVCLATGFYPDHVELSWWVNGKEVHSGVCTDPQPLKEQPALNDSRYCLSSRLRVSATFWQNPRNHFRCQVQFYGLSENDEWTQDRAKPVTQIVSAEAWGRADCGFTSESYQQGVLSATILYEILLGKATLYAVLVSALVLMAMVKRKDSRGRAKRSGSGATNFSLLKQAGDVEENPGPTSMDWIWRILFLVGAATGAHSGPQLQLQESGPGLVKPSETLSLTCTVSGDSISSGDYYWGWIRQPPGKGLEWIGHIYYSGVTYYNPSLKSRVTISVDTSRNQFSLKLSSVTAADTAVYYCTREDSSNWRSRGQGTLVTVSSGSGGGGSGGGGSGGGGSFEEVQLEESGGGLVQPGGSMKLSCVASGFTFSNYWMNWVRQSPEKGLEWVAEIRFKSHNYATHFAESVKGRFTISRDDSKSSVYLQMNNLRAEDTGIYYCTRRIGNSDYDWWYFDVWGAGTSVTVSSASTRIQNPDPAVYQLRDSKSSDKSVCLFTDFDSQTNVSQSKDSDVYITDKCVLDMRSMDFKSNSAVAWSNKSDFACANAFNNSIIPEDTFFPSPESSCDVKLVEKSFETDTNLNFQNLSVIGFRILLLKVAGFNLLMTLRLWSS

SEQ ID NO: 13112 - protein, 892 aa, Artificial Sequence
  Synthetic Polypeptide
MALPVTALLLPLALLLHAARPEVQLVESGGGLVQPGGSLRLSCAASGFSFSDFWMSWVRQAPGKGLEWVATISQAGSEKDYVDSVKGRFTISRDNAKKSLYLQMNSLRAEDTAVYYCASGVYSFDYRGQGTLVTVSSGTGGGGSGGGGSGGGGSEFDQIVLTQSPAIMSASPGEKVTISCSASSSVSYMYWYQQKPGSSPKPWIYRTSNLASGVPARFSGSGSGTSYSLTISNMEAEDAAAYYCQQYHSYPTTFGGGTKLEVKLEDLKNVFPPEVAVFEPSEAEISHTQKATLVCLATGFYPDHVELSWWVNGKEVHSGVCTDPQPLKEQPALNDSRYCLSSRLRVSATFWQNPRNHFRCQVQFYGLSENDEWTQDRAKPVTQIVSAEAWGRADCGFTSESYQQGVLSATILYEILLGKATLYAVLVSALVLMAMVKRKDSRGRAKRSGSGATNFSLLKQAGDVEENPGPTSMDWIWRILFLVGAATGAHSGPQLQLQESGPGLVKPSETLSLTCTVSGDSISSGDYYWGWIRQPPGKGLEWIGHIYYSGVTYYNPSLKSRVTISVDTSRNQFSLKLSSVTAADTAVYYCTREDSSNWRSRGQGTLVTVSSGSGGGGSGGGGSGGGGSFEEVQLVESGGGLVQPKGSLKLSCAASGFSFNTYAMNWVRQAPGKGLEWIAHIRSKSNNFATYYADSVKDRFSISRDASENILFLQMNNLKTEDTAMYYCVRQGGDFPMDYWGQGTSVTVSSTRIQNPDPAVYQLRDSKSSDKSVCLFTDFDSQTNVSQSKDSDVYITDKCVLDMRSMDFKSNSAVAWSNKSDFACANAFNNSIIPEDTFFPSPESSCDVKLVEKSFETDTNLNFQNLSVIGFRILLLKVAGFNLLMTLRLWSS

SEQ ID NO: 13113 - protein, 891 aa, Artificial Sequence
  Synthetic Polypeptide
MALPVTALLLPLALLLHAARPEVQLVESGGGLVQPGGSLRLSCAASGFSFSDFWMSWVRQAPGKGLEWVATISQAGSEKDYVDSVKGRFTISRDNAKKSLYLQMNSLRAEDTAVYYCASGVYSFDYRGQGTLVTVSSGTGGGGSGGGGSGGGGSEFDDIQMTQSSSSFSVSLGDRVTITCMASEDIYIRLAWYQQKPGNAPRLLISAATSLETGVPSRFSGSGSGKDYTLSITSLQTEDVGTYYCQQYWSSPWTFGGGTKLEINLEDLKNVFPPEVAVFEPSEAEISHTQKATLVCLATGFYPDHVELSWWVNGKEVHSGVCTDPQPLKEQPALNDSRYCLSSRLRVSATFWQNPRNHFRCQVQFYGLSENDEWTQDRAKPVTQIVSAEAWGRADCGFTSESYQQGVLSATILYEILLGKATLYAVLVSALVLMAMVKRKDSRGRAKRSGSGATNFSLLKQAGDVEENPGPTSMDWIWRILFLVGAATGAHSGPQLQLQESGPGLVKPSETLSLTCTVSGDSISSGDYYWGWIRQPPGKGLEWIGHIYYSGVTYYNPSLKSRVTISVDTSRNQFSLKLSSVTAADTAVYYCTREDSSNWRSRGQGTLVTVSSGSGGGGSGGGGSGGGGSFEDVQLQESGPGLVKPSQSLSLTCTVTGYSITSDYTWNWIRQFPGNKLEWMGYITYSGSTSYNPSLKSRNSITRDTSKNQFFLQLNSVTTEDTATYYCARLGRRYTMDYWGQGTSVTVSSTRIQNPDPAVYQLRDSKSSDKSVCLFTDFDSQTNVSQSKDSDVYITDKCVLDMRSMDFKSNSAVAWSNKSDFACANAFNNSIIPEDTFFPSPESSCDVKLVEKSFETDTNLNFQNLSVIGFRILLLKVAGFNLLMTLRLWSS

SEQ ID NO: 13114 - protein, 894 aa, Artificial Sequence
  Synthetic Polypeptide
MALPVTALLLPLALLLHAARPEVQLVESGGGLVQPGGSLRLSCAASGFSFSDFWMSWVRQAPGKGLEWVATISQAGSEKDYVDSVKGRFTISRDNAKKSLYLQMNSLRAEDTAVYYCASGVYSFDYRGQGTLVTVSSGTGGGGSGGGGSGGGGSEFDDIQMTQSPSSLSASVGDRVTITCRASQSISSYLNWYQQKPGKAPKLLIYDASNLETGVPSRFSGSGSGTDFTFTISSLQPEDIATYYCQQYDNLPLTFGGGTKVDIKRLEDLKNVFPPEVAVFEPSEAEISHTQKATLVCLATGFYPDHVELSWWVNGKEVHSGVCTDPQPLKEQPALNDSRYCLSSRLRVSATFWQNPRNHFRCQVQFYGLSENDEWTQDRAKPVTQIVSAEAWGRADCGFTSESYQQGVLSATILYEILLGKATLYAVLVSALVLMAMVKRKDSRGRAKRSGSGATNFSLLKQAGDVEENPGPTSMDWIWRILFLVGAATGAHSGPQLQLQESGPGLVKPSETLSLTCTVSGDSISSGDYYWGWIRQPPGKGLEWIGHIYYSGVTYYNPSLKSRVTISVDTSRNQFSLKLSSVTAADTAVYYCTREDSSNWRSRGQGTLVTVSSGSGGGGSGGGGSGGGGSFEQVQLVESGGGVVQPGRSLRLSCAASGFTFSSYAMHWVRQAPGKGLEWVAVISYDGSNKYYADSVKGRFTISRDNSKNTLYLQMNSLRAEDTAVYYCARAHNSSSWSFDYWGQGTLVTVSSTRIQNPDPAVYQLRDSKSSDKSVCLFTDFDSQTNVSQSKDSDVYITDKCVLDMRSMDFKSNSAVAWSNKSDFACANAFNNSIIPEDTFFPSPESSCDVKLVEKSFETDTNLNFQNLSVIGFRILLLKVAGFNLLMTLRLWSS

SEQ ID NO: 13115 - protein, 903 aa, Artificial Sequence
  Synthetic Polypeptide
MALPVTALLLPLALLLHAARPEVQLVESGGGLVQPGGSLRLSCAASGFSFSDFWMSWVRQAPGKGLEWVATISQAGSEKDYVDSVKGRFTISRDNAKKSLYLQMNSLRAEDTAVYYCASGVYSFDYRGQGTLVTVSSGTGGGGSGGGGSGGGGSEFDDVVMTQSPLSLPVSLGDQASISCRSSQRLVHSNGNTYLHWYLQKPGQSPKLLIYRVSNRFPGVPDRFSGSGSGTDFTLKISRVEAEDLGIYFCSQSTHVPYTFGGGTKLEIKRLEDLKNVFPPEVAVFEPSEAEISHTQKATLVCLATGFYPDHVELSWWVNGKEVHSGVCTDPQPLKEQPALNDSRYCLSSRLRVSATFWQNPRNHFRCQVQFYGLSENDEWTQDRAKPVTQIVSAEAWGRADCGFTSESYQQGVLSATILYEILLGKATLYAVLVSALVLMAMVKRKDSRGRAKRSGSGATNFSLLKQAGDVEENPGPTSMDWIWRILFLVGAATGAHSGPQLQLQESGPGLVKPSETLSLTCTVSGDSISSGDYYWGWIRQPPGKGLEWIGHIYYSGVTYYNPSLKSRVTISVDTSRNQFSLKLSSVTAADTAVYYCTREDSSNWRSRGQGTLVTVSSGSGGGGSGGGGSGGGGSFEEVRLQQSGPDLIKPGASVKMSCKASGYTFTGYVMHWVKQRPGQGLEWIGFINPYNDDIQSNERFRGKATLTSDKSSTTAYMELSSLTSEDSAVYYCARGAGYNFDGAYRFFDFWGQGTTLTVSSTRIQNPDPAVYQLRDSKSSDKSVCLFTDFDSQTNVSQSKDSDVYITDKCVLDMRSMDFKSNSAVAWSNKSDFACANAFNNSIIPEDTFFPSPESSCDVKLVEKSFETDTNLNFQNLSVIGFRILLLKVAGFNLLMTLRLWSS

SEQ ID NO: 13116 - protein, 894 aa, Artificial Sequence
  Synthetic Polypeptide
MALPVTALLLPLALLLHAARPEVQLVESGGGLVQPGGSLRLSCAASGFSFSDFWMSWVRQAPGKGLEWVATISQAGSEKDYVDSVKGRFTISRDNAKKSLYLQMNSLRAEDTAVYYCASGVYSFDYRGQGTLVTVSSGTGGGGSGGGGSGGGGSEFDSYELTQPPSVSVSPGQTATISCSGDQLGGKYGHWYQKKPGQSPVLVLYQDRKRPAGIPERFSGSSSGNTITLTISGTQAVDEADYYCQAWDTNLGGVFGGGTKVTVLGQLEDLKNVFPPEVAVFEPSEAEISHTQKATLVCLATGFYPDHVELSWWVNGKEVHSGVCTDPQPLKEQPALNDSRYCLSSRLRVSATFWQNPRNHFRCQVQFYGLSENDEWTQDRAKPVTQIVSAEAWGRADCGFTSESYQQGVLSATILYEILLGKATLYAVLVSALVLMAMVKRKDSRGRAKRSGSGATNFSLLKQAGDVEENPGPTSMDWIWRILFLVGAATGAHSGPQLQLQESGPGLVKPSETLSLTCTVSGDSISSGDYYWGWIRQPPGKGLEWIGHIYYSGVTYYNPSLKSRVTISVDTSRNQFSLKLSSVTAADTAVYYCTREDSSNWRSRGQGTLVTVSSGSGGGGSGGGGSGGGGSFEQVQLVESGAEVKKPGASVKVSCKASGYTFTGYYMHWVRQAPGQGLEWMGRINPNSGGTNYAQKFQGRVTMTRDTSISTAYMELSRLRSDDTAVYYCASPRGRGSAFDIWGQGTLVTVSSTRIQNPDPAVYQLRDSKSSDKSVCLFTDFDSQTNVSQSKDSDVYITDKCVLDMRSMDFKSNSAVAWSNKSDFACANAFNNSIIPEDTFFPSPESSCDVKLVEKSFETDTNLNFQNLSVIGFRILLLKVAGFNLLMTLRLWSS

SEQ ID NO: 13117 - protein, 897 aa, Artificial Sequence
  Synthetic Polypeptide
MALPVTALLLPLALLLHAARPEVQLVESGGGLVQPGGSLRLSCAASGFSFSDFWMSWVRQAPGKGLEWVATISQAGSEKDYVDSVKGRFTISRDNAKKSLYLQMNSLRAEDTAVYYCASGVYSFDYRGQGTLVTVSSGTGGGGSGGGGSGGGGSEFDNFMLTQPHSVSESPGKTVTISCTRSSGSIASKYVQWYQQRPGSSPTTVIYEDNQRPSGVPDRFSGSIDTSSNSASLTISGLRTEDEADYYCHSYDSNNHSVFGGGTKVTVLGQLEDLKNVFPPEVAVFEPSEAEISHTQKATLVCLATGFYPDHVELSWWVNGKEVHSGVCTDPQPLKEQPALNDSRYCLSSRLRVSATFWQNPRNHFRCQVQFYGLSENDEWTQDRAKPVTQIVSAEAWGRADCGFTSESYQQGVLSATILYEILLGKATLYAVLVSALVLMAMVKRKDSRGRAKRSGSGATNFSLLKQAGDVEENPGPTSMDWIWRILFLVGAATGAHSGPQLQLQESGPGLVKPSETLSLTCTVSGDSISSGDYYWGWIRQPPGKGLEWIGHIYYSGVTYYNPSLKSRVTISVDTSRNQFSLKLSSVTAADTAVYYCTREDSSNWRSRGQGTLVTVSSGSGGGGSGGGGSGGGGSFEEVQLVESGGGVVQPGGSLRLSCAASGFTFSSYAMSWVRQAPGKGLEWVSAISGSGGSTYYADSVKGRFSISRDNSKNTLYLQMNSLRAEDTAVYYCARTRSSGAFDIWGQGTLVTVSSTRIQNPDPAVYQLRDSKSSDKSVCLFTDFDSQTNVSQSKDSDVYITDKCVLDMRSMDFKSNSAVAWSNKSDFACANAFNNSIIPEDTFFPSPESSCDVKLVEKSFETDTNLNFQNLSVIGFRILLLKVAGFNLLMTLRLWSS

SEQ ID NO: 13118 - protein, 892 aa, Artificial Sequence
  Synthetic Polypeptide
MALPVTALLLPLALLLHAARPEVQLVESGGGLVQPGGSLRLSCAASGFSFSDFWMSWVRQAPGKGLEWVATISQAGSEKDYVDSVKGRFTISRDNAKKSLYLQMNSLRAEDTAVYYCASGVYSFDYRGQGTLVTVSSGTGGGGSGGGGSGGGGSEFDIQMNQSPSSLSASLGDTITITCHASQNINVWLSWYQQKPGNIPKLLIYKASNLHTGVPSRFSGSGSGTGFTITISSLQPEDIATYYCQQGQSYPWTFGGGTKLEIKRLEDLKNVFPPEVAVFEPSEAEISHTQKATLVCLATGFYPDHVELSWWVNGKEVHSGVCTDPQPLKEQPALNDSRYCLSSRLRVSATFWQNPRNHFRCQVQFYGLSENDEWTQDRAKPVTQIVSAEAWGRADCGFTSESYQQGVLSATILYEILLGKATLYAVLVSALVLMAMVKRKDSRGRAKRSGSGATNFSLLKQAGDVEENPGPTSMDWIWRILFLVGAATGAHSGPQLQLQESGPGLVKPSETLSLTCTVSGDSISSGDYYWGWIRQPPGKGLEWIGHIYYSGVTYYNPSLKSRVTISVDTSRNQFSLKLSSVTAADTAVYYCTREDSSNWRSRGQGTLVTVSSGSGGGGSGGGGSGGGGSFEEVQLQQSGPELVKPGASVKISCKASGYSFTGYFMNWVKQSHGKSLEYIGRFNPYNGETLYNQKFKGKATLTVDKSSSTVHMELLSVTSEDSAVYYCGRSGNDDAMDYWGQGTSVTVSSATRIQNPDPAVYQLRDSKSSDKSVCLFTDFDSQTNVSQSKDSDVYITDKCVLDMRSMDFKSNSAVAWSNKSDFACANAFNNSIIPEDTFFPSPESSCDVKLVEKSFETDTNLNFQNLSVIGFRILLLKVAGFNLLMTLRLWSS

SEQ ID NO: 13119 - protein, 893 aa, Artificial Sequence
  Synthetic Polypeptide
MALPVTALLLPLALLLHAARPEVQLVESGGGLVQPGGSLRLSCAASGFSFSDFWMSWVRQAPGKGLEWVATISQAGSEKDYVDSVKGRFTISRDNAKKSLYLQMNSLRAEDTAVYYCASGVYSFDYRGQGTLVTVSSGTGGGGSGGGGSGGGGSEFEIVLTQSPATLSLSPGERATLSCRASQSVRSYLAWYQQKPGQAPRLLIYDASNRATGIPARFSGSGSGTDFTLTISSLEPEDFAVYYCQQRSNWPPTFGQGTKVEIKLEDLKNVFPPEVAVFEPSEAEISHTQKATLVCLATGFYPDHVELSWWVNGKEVHSGVCTDPQPLKEQPALNDSRYCLSSRLRVSATFWQNPRNHFRCQVQFYGLSENDEWTQDRAKPVTQIVSAEAWGRADCGFTSESYQQGVLSATILYEILLGKATLYAVLVSALVLMAMVKRKDSRGRAKRSGSGATNFSLLKQAGDVEENPGPTSMDWIWRILFLVGAATGAHSGPQLQLQESGPGLVKPSETLSLTCTVSGDSISSGDYYWGWIRQPPGKGLEWIGHIYYSGVTYYNPSLKSRVTISVDTSRNQFSLKLSSVTAADTAVYYCTREDSSNWRSRGQGTLVTVSSGSGGGGSGGGGSGGGGSFEQLQVQESGPGLVKPSETLSLTCTVSGGSISNSYFSWGWIRQPPGKGLEWIGSFYYGEKTYYNPSLKSRATISIDTSKSQFSLKLSSVTAADTAVYYCPRGPTMIRGVIDSWGQGTLVTVSSTRIQNPDPAVYQLRDSKSSDKSVCLFTDFDSQTNVSQSKDSDVYITDKCVLDMRSMDFKSNSAVAWSNKSDFACANAFNNSIIPEDTFFPSPESSCDVKLVEKSFETDTNLNFQNLSVIGFRILLLKVAGFNLLMTLRLWSS

SEQ ID NO: 13120 - protein, 902 aa, Artificial Sequence
  Synthetic Polypeptide
MALPVTALLLPLALLLHAARPEVQLVESGGGLVQPGGSLRLSCAASGFSFSDFWMSWVRQAPGKGLEWVATISQAGSEKDYVDSVKGRFTISRDNAKKSLYLQMNSLRAEDTAVYYCASGVYSFDYRGQGTLVTVSSGTGGGGSGGGGSGGGGSEFDIVMTQTPLSLPVTPGEPASISCRSSRSLLDSDDGNTYLDWYLQKPGQSPQLLIYTLSYRASGVPDRFSGSGSGTDFTLKISRVEAEDVGVYYCMQRVEFPITFGQGTRLEIKRLEDLKNVFPPEVAVFEPSEAEISHTQKATLVCLATGFYPDHVELSWWVNGKEVHSGVCTDPQPLKEQPALNDSRYCLSSRLRVSATFWQNPRNHFRCQVQFYGLSENDEWTQDRAKPVTQIVSAEAWGRADCGFTSESYQQGVLSATILYEILLGKATLYAVLVSALVLMAMVKRKDSRGRAKRSGSGATNFSLLKQAGDVEENPGPTSMDWIWRILFLVGAATGAHSGPQLQLQESGPGLVKPSETLSLTCTVSGDSISSGDYYWGWIRQPPGKGLEWIGHIYYSGVTYYNPSLKSRVTISVDTSRNQFSLKLSSVTAADTAVYYCTREDSSNWRSRGQGTLVTVSSGSGGGGSGGGGSGGGGSFEQVQLVESGGGVVQPGRSLRLSCAASGFIFSRYGMHWVRQAPGKGLKWVAVIWYDGSNKLYADSVKGRFTISRDNSKNTLYLQMNSLRAEDTAVYYCARDYYDNSRHHWGFDYWGQGTLVTVSSTRIQNPDPAVYQLRDSKSSDKSVCLFTDFDSQTNVSQSKDSDVYITDKCVLDMRSMDFKSNSAVAWSNKSDFACANAFNNSIIPEDTFFPSPESSCDVKLVEKSFETDTNLNFQNLSVIGFRILLLKVAGFNLLMTLRLWSS

SEQ ID NO: 13121 - protein, 892 aa, Artificial Sequence
  Synthetic Polypeptide
MALPVTALLLPLALLLHAARPEVQLVESGGGLVQPGGSLRLSCAASGFSFSDFWMSWVRQAPGKGLEWVATISQAGSEKDYVDSVKGRFTISRDNAKKSLYLQMNSLRAEDTAVYYCASGVYSFDYRGQGTLVTVSSGTGGGGSGGGGSGGGGSEFEIQMTQSPSSMSASLGDTITITCQATQDIFKNLNWYQQKPGKPPSLLIYYATELAEGVPSRFSGSGSGSDYSLTISNLESEDFAAYYCLQFFEFPFTFGSGTKLEMKLEDLKNVFPPEVAVFEPSEAEISHTQKATLVCLATGFYPDHVELSWWVNGKEVHSGVCTDPQPLKEQPALNDSRYCLSSRLRVSATFWQNPRNHFRCQVQFYGLSENDEWTQDRAKPVTQIVSAEAWGRADCGFTSESYQQGVLSATILYEILLGKATLYAVLVSALVLMAMVKRKDSRGRAKRSGSGATNFSLLKQAGDVEENPGPTSMDWIWRILFLVGAATGAHSGPQLQLQESGPGLVKPSETLSLTCTVSGDSISSGDYYWGWIRQPPGKGLEWIGHIYYSGVTYYNPSLKSRVTISVDTSRNQFSLKLSSVTAADTAVYYCTREDSSNWRSRGQGTLVTVSSGSGGGGSGGGGSGGGGSFEQVQLQQSGAELVRPGTSVKVSCKASGYVFTNYWIEWIKQRPGQGLEWIGVMNPGSGETTYNEKFKGKATLTADKSSSTAYMQLSSLTSVDSAVYFCARDHDRDYYAMDYWGQGTSVTVSSTRIQNPDPAVYQLRDSKSSDKSVCLFTDFDSQTNVSQSKDSDVYITDKCVLDMRSMDFKSNSAVAWSNKSDFACANAFNNSIIPEDTFFPSPESSCDVKLVEKSFETDTNLNFQNLSVIGFRILLLKVAGFNLLMTLRLWSS

SEQ ID NO: 13122 - protein, 889 aa, Artificial Sequence
  Synthetic Polypeptide
MALPVTALLLPLALLLHAARPEVQLVESGGGLVQPGGSLRLSCAASGFSFSDFWMSWVRQAPGKGLEWVATISQAGSEKDYVDSVKGRFTISRDNAKKSLYLQMNSLRAEDTAVYYCASGVYSFDYRGQGTLVTVSSGTGGGGSGGGGSGGGGSEFDILLTQSPAILSVSPGERVSFSCRASQNIGTSIHWYQQRTNGSPRLLIKYASESVSGIPSRFSGSGSGTDFTLSINSVESEDIADYYCQHTNSWPTTFGGGTKLEIKRLEDLKNVFPPEVAVFEPSEAEISHTQKATLVCLATGFYPDHVELSWWVNGKEVHSGVCTDPQPLKEQPALNDSRYCLSSRLRVSATFWQNPRNHFRCQVQFYGLSENDEWTQDRAKPVTQIVSAEAWGRADCGFTSESYQQGVLSATILYEILLGKATLYAVLVSALVLMAMVKRKDSRGRAKRSGSGATNFSLLKQAGDVEENPGPTSMDWIWRILFLVGAATGAHSGPQLQLQESGPGLVKPSETLSLTCTVSGDSISSGDYYWGWIRQPPGKGLEWIGHIYYSGVTYYNPSLKSRVTISVDTSRNQFSLKLSSVTAADTAVYYCTREDSSNWRSRGQGTLVTVSSGSGGGGSGGGGSGGGGSFEQVQLQQSDAELVKPGASVKISCKASGYTFTDHAIHWVKQKPEQGLEWIGYFSPGNGDIKYNEKFKGKATLTADKSSSTAYMQLNSLTSEDSAVYFCKRSYGNYDYWGQGTTLTVSSTRIQNPDPAVYQLRDSKSSDKSVCLFTDFDSQTNVSQSKDSDVYITDKCVLDMRSMDFKSNSAVAWSNKSDFACANAFNNSIIPEDTFFPSPESSCDVKLVEKSFETDTNLNFQNLSVIGFRILLLKVAGFNLLMTLRLWSS

SEQ ID NO: 13123 - protein, 894 aa, Artificial Sequence
  Synthetic Polypeptide
MALPVTALLLPLALLLHAARPEVQLVESGGGLVQPGGSLRLSCAASGFSFSDFWMSWVRQAPGKGLEWVATISQAGSEKDYVDSVKGRFTISRDNAKKSLYLQMNSLRAEDTAVYYCASGVYSFDYRGQGTLVTVSSGTGGGGSGGGGSGGGGSEFDIVMTQSPDSLAVSLGERATINCKSSQSLLNSGDQKNYLTWYQQKPGQPPKLLIYWASTRESGVPDRFSGSGSGTDFTLTISSLQAEDVAVYYCQNDYSYPLTFGQGTKVEIKLEDLKNVFPPEVAVFEPSEAEISHTQKATLVCLATGFYPDHVELSWWVNGKEVHSGVCTDPQPLKEQPALNDSRYCLSSRLRVSATFWQNPRNHFRCQVQFYGLSENDEWTQDRAKPVTQIVSAEAWGRADCGFTSESYQQGVLSATILYEILLGKATLYAVLVSALVLMAMVKRKDSRGRAKRSGSGATNFSLLKQAGDVEENPGPTSMDWIWRILFLVGAATGAHSGPQLQLQESGPGLVKPSETLSLTCTVSGDSISSGDYYWGWIRQPPGKGLEWIGHIYYSGVTYYNPSLKSRVTISVDTSRNQFSLKLSSVTAADTAVYYCTREDSSNWRSRGQGTLVTVSSGSGGGGSGGGGSGGGGSFEQVQLVQSGAEVKKTGSSVKVSCKASGYTFTDHAIHVWRQAPGQALEWMGHFSPGNTDIKYNDKFKGRVTLTVDRSMSTAYMELSSLRSEDTAMYYCKTSTFFFDYWGQGTMVTVSSTRIQNPDPAVYQLRDSKSSDKSVCLFTDFDSQTNVSQSKDSDVYITDKCVLDMRSMDFKSNSAVAWSNKSDFACANAFNNSIIPEDTFFPSPESSCDVKLVEKSFETDTNLNFQNLSVIGFRILLLKVAGFNLLMTLRLWSS

SEQ ID NO: 13124 - protein, 893 aa, Artificial Sequence
  Synthetic Polypeptide
MALPVTALLLPLALLLHAARPEVQLVESGGGLVQPGGSLRLSCAASGFSFSDFWMSWVRQAPGKGLEWVATISQAGSEKDYVDSVKGRFTISRDNAKKSLYLQMNSLRAEDTAVYYCASGVYSFDYRGQGTLVTVSSGTGGGGSGGGGSGGGGSEFDIQMTQSPSSLSASVGDRVTITCKASQDVSIAVAWYQQKPGKAPKVLIYSASYRYTGVPDRFSGSGSGTDFTFTISSLQPEDIAVYYCQQHYITPLTFGGGTKVEIKLEDLKNVFPPEVAVFEPSEAEISHTQKATLVCLATGFYPDHVELSWWVNGKEVHSGVCTDPQPLKEQPALNDSRYCLSSRLRVSATFWQNPRNHFRCQVQFYGLSENDEWTQDRAKPVTQIVSAEAWGRADCGFTSESYQQGVLSATILYEILLGKATLYAVLVSALVLMAMVKRKDSRGRAKRSGSGATNFSLLKQAGDVEENPGPTSMDWIWRILFLVGAATGAHSGPQLQLQESGPGLVKPSETLSLTCTVSGDSISSGDYYWGWIRQPPGKGLEWIGHIYYSGVTYYNPSLKSRVTISVDTSRNQFSLKLSSVTAADTAVYYCTREDSSNWRSRGQGTLVTVSSGSGGGGSGGGGSGGGGSFEQIQLVQSGHEVKKPGASVKVSCKASGYTFTNYGMNWVRQAPGQGLEWMGWINTKTGEPTYAEEFKGRFVFSLETSASTAYLQISSLKAEDTAMYFCGRGGYGSSYWYFDVWGQGTTVTVSSTRIQNPDPAVYQLRDSKSSDKSVCLFTDFDSQTNVSQSKDSDVYITDKCVLDMRSMDFKSNSAVAWSNKSDFACANAFNNSIIPEDTFFPSPESSCDVKLVEKSFETDTNLNFQNLSVIGFRILLLKVAGFNLLMTLRLWSS

SEQ ID NO: 13125 - protein, 895 aa, Artificial Sequence
  Synthetic Polypeptide
MALPVTALLLPLALLLHAARPEVQLVESGGGLVQPGGSLRLSCAASGFSFSDFWMSWVRQAPGKGLEWVATISQAGSEKDYVDSVKGRFTISRDNAKKSLYLQMNSLRAEDTAVYYCASGVYSFDYRGQGTLVTVSSGTGGGGSGGGGSGGGGSEFDIVMTQSPDSLAVSLGERATINCRASKSVSTSGYSYMHWYQQKPGQPPKLLIYLASNLESGVPDRFSGSGSGTDFTLTISSLQAEDVAVYYCQHSRELPYTFGQGTKLEIKLEDLKNVFPPEVAVFEPSEAEISHTQKATLVCLATGFYPDHVELSWWVNGKEVHSGVCTDPQPLKEQPALNDSRYCLSSRLRVSATFWQNPRNHFRCQVQFYGLSENDEWTQDRAKPVTQIVSAEAWGRADCGFTSESYQQGVLSATILYEILLGKATLYAVLVSALVLMAMVKRKDSRGRAKRSGSGATNFSLLKQAGDVEENPGPTSMDWIWRILFLVGAATGAHSGPQLQLQESGPGLVKPSETLSLTCTVSGDSISSGDYYWGWIRQPPGKGLEWIGHIYYSGVTYYNPSLKSRVTISVDTSRNQFSLKLSSVTAADTAVYYCTREDSSNWRSRGQGTLVTVSSGSGGGGSGGGGSGGGGSFEQVQLQESGPGLVKPSETLSLTCTVSGGSISSYGVHWIRQPPGKGLEWIGVIWTSGVTDYNSALMGRVTISVDTSKNQFSLKLSSVTAADTAVYYCARDGDYDRYTMDYWGQGTLVTVSSTRIQNPDPAVYQLRDSKSSDKSVCLFTDFDSQTNVSQSKDSDVYITDKCVLDMRSMDFKSNSAVAWSNKSDFACANAFNNSIIPEDTFFPSPESSCDVKLVEKSFETDTNLNFQNLSVIGFRILLLKVAGFNLLMTLRLWSS

SEQ ID NO: 13126 - protein, 895 aa, Artificial Sequence
  Synthetic Polypeptide
MALPVTALLLPLALLLHAARPEVQLVESGGGLVQPGGSLRLSCAASGFSFSDFWMSWVRQAPGKGLEWVATISQAGSEKDYVDSVKGRFTISRDNAKKSLYLQMNSLRAEDTAVYYCASGVYSFDYRGQGTLVTVSSGTGGGGSGGGGSGGGGSEFDIQMTQSPSSLSASVGDRVTITCRASQSIGTSLHWYQQKPGKAPKLLIKFASRLQSGVPSRFSGSGSGTDFTLTISSLQPEDFATYYCQQSPGFPPTFGQGTKLEIKRLEDLKNVFPPEVAVFEPSEAEISHTQKATLVCLATGFYPDHVELSWWVNGKEVHSGVCTDPQPLKEQPALNDSRYCLSSRLRVSATFWQNPRNHFRCQVQFYGLSENDEWTQDRAKPVTQIVSAEAWGRADCGFTSESYQQGVLSATILYEILLGKATLYAVLVSALVLMAMVKRKDSRGRAKRSGSGATNFSLLKQAGDVEENPGPTSMDWIWRILFLVGAATGAHSGPQLQLQESGPGLVKPSETLSLTCTVSGDSISSGDYYWGWIRQPPGKGLEWIGHIYYSGVTYYNPSLKSRVTISVDTSRNQFSLKLSSVTAADTAVYYCTREDSSNWRSRGQGTLVTVSSGSGGGGSGGGGSGGGGSFEQVQLVESGGGLVKPGGSLRLSCAASGFSITTSGYYWTWIRQFPGKGLEWMGYIGYNSKTYYNPALKSRITISRDNAKNSLYLQMNSLRAEDTAVYYCARSLYGGYKDAFDSWGQGTLVTVSSTRIQNPDPAVYQLRDSKSSDKSVCLFTDFDSQTNVSQSKDSDVYITDKCVLDMRSMDFKSNSAVAWSNKSDFACANAFNNSIIPEDTFFPSPESSCDVKLVEKSFETDTNLNFQNLSVIGFRILLLKVAGFNLLMTLRLWSS

SEQ ID NO: 13127 - protein, 900 aa, Artificial Sequence
  Synthetic Polypeptide
MALPVTALLLPLALLLHAARPEVQLVESGGGLVQPGGSLRLSCAASGFSFSDFWMSWVRQAPGKGLEWVATISQAGSEKDYVDSVKGRFTISRDNAKKSLYLQMNSLRAEDTAVYYCASGVYSFDYRGQGTLVTVSSGTGGGGSGGGGSGGGGSEFDEIVLTQSPLSLPVTPGEPASISCRSSQSLLHSIGYNYLDWYLQKPGQSPQLLIYLGSNRASGVPDRFSGSGSGTDFTLKISRVEAEDVGVYYCMQALQTPLTFGGGTKVEIKRLEDLKNVFPPEVAVFEPSEAEISHTQKATLVCLATGFYPDHVELSWWVNGKEVHSGVCTDPQPLKEQPALNDSRYCLSSRLRVSATFWQNPRNHFRCQVQFYGLSENDEWTQDRAKPVTQIVSAEAWGRADCGFTSESYQQGVLSATILYEILLGKATLYAVLVSALVLMAMVKRKDSRGRAKRSGSGATNFSLLKQAGDVEENPGPTSMDWIWRILFLVGAATGAHSGPQLQLQESGPGLVKPSETLSLTCTVSGDSISSGDYYWGWIRQPPGKGLEWIGHIYYSGVTYYNPSLKSRVTISVDTSRNQFSLKLSSVTAADTAVYYCTREDSSNWRSRGQGTLVTVSSGSGGGGSGGGGSGGGGSFEEVQLVESGGGVVQPGRSLRLSCAASGFTFRSYGMHWVRQAPGKGLEWVAVISYDGSNKYYTDSVNGRFTISRDNSKNTLYLQMNSLRAEDTAVYYCARGGGYYETSGPDYWGQGTLVTVSSTRIQNPDPAVYQLRDSKSSDKSVCLFTDFDSQTNVSQSKDSDVYITDKCVLDMRSMDFKSNSAVAWSNKSDFACANAFNNSIIPEDTFFPSPESSCDVKLVEKSFETDTNLNFQNLSVIGFRILLLKVAGFNLLMTLRLWSS

SEQ ID NO: 13128 - protein, 898 aa, Artificial Sequence
  Synthetic Polypeptide
MALPVTALLLPLALLLHAARPEVQLVESGGGLVQPGGSLRLSCAASGFSFSDFWMSWVRQAPGKGLEWVATISQAGSEKDYVDSVKGRFTISRDNAKKSLYLQMNSLRAEDTAVYYCASGVYSFDYRGQGTLVTVSSGTGGGGSGGGGSGGGGSEFDDVVMTQSPLSLPVTPGEPASISCRSSQSLLHSIGYNYLHWFLQKPGQSPQLLIYLGSNRASGVPDRFSGSGSGTDFTLKISRVEAEDVGVYYCMQALQTPPTFGQGTRLEIKRLEDLKNVFPPEVAVFEPSEAEISHTQKATLVCLATGFYPDHVELSWWVNGKEVHSGVCTDPQPLKEQPALNDSRYCLSSRLRVSATFWQNPRNHFRCQVQFYGLSENDEWTQDRAKPVTQIVSAEAWGRADCGFTSESYQQGVLSATILYEILLGKATLYAVLVSALVLMAMVKRKDSRGRAKRSGSGATNFSLLKQAGDVEENPGPTSMDWIWRILFLVGAATGAHSGPQLQLQESGPGLVKPSETLSLTCTVSGDSISSGDYYWGWIRQPPGKGLEWIGHIYYSGVTYYNPSLKSRVTISVDTSRNQFSLKLSSVTAADTAVYYCTREDSSNWRSRGQGTLVTVSSGSGGGGSGGGGSGGGGSFEQLQLQESGPGLVKPSGTLSLTCAVSGGSISSSNWWSWVRQPPGKGLEWIGEIYHSGSTNYNPSLKSRVTISVDKSKNQFSLKLSSVTAADTAVYYCVGSPYGDYVLDYWGQGTLVTVSSTRIQNPDPAVYQLRDSKSSDKSVCLFTDFDSQTNVSQSKDSDVYITDKCVLDMRSMDFKSNSAVAWSNKSDFACANAFNNSIIPEDTFFPSPESSCDVKLVEKSFETDTNLNFQNLSVIGFRILLLKVAGFNLLMTLRLWSS

SEQ ID NO: 13129 - protein, 896 aa, Artificial Sequence
  Synthetic Polypeptide
MALPVTALLLPLALLLHAARPEVQLVESGGGLVQPGGSLRLSCAASGFSFSDFWMSWVRQAPGKGLEWVATISQAGSEKDYVDSVKGRFTISRDNAKKSLYLQMNSLRAEDTAVYYCASGVYSFDYRGQGTLVTVSSGTGGGGSGGGGSGGGGSEFDEIVLTQSPGTLSLSLGERATLSCRASQSISSSFLAWYQQKPGQAPKLLIYAASTRATGIPDRFSGSGSGTDFTLTISRLEPEDFAVYYCQQYGRSLSFGGGTKVEVKLEDLKNVFPPEVAVFEPSEAEISHTQKATLVCLATGFYPDHVELSWWVNGKEVHSGVCTDPQPLKEQPALNDSRYCLSSRLRVSATFWQNPRNHFRCQVQFYGLSENDEWTQDRAKPVTQIVSAEAWGRADCGFTSESYQQGVLSATILYEILLGKATLYAVLVSALVLMAMVKRKDSRGRAKRSGSGATNFSLLKQAGDVEENPGPTSMDWIWRILFLVGAATGAHSGPQLQLQESGPGLVKPSETLSLTCTVSGDSISSGDYYWGWIRQPPGKGLEWIGHIYYSGVTYYNPSLKSRVTISVDTSRNQFSLKLSSVTAADTAVYYCTREDSSNWRSRGQGTLVTVSSGSGGGGSGGGGSGGGGSFEQVQLQQSGPGLVKPSQTLSLTCAISGDSVSGNSATWNWIRQSPSRGLEWLGRTYYRSKWNHDYAESVKSRITINPDTSKNQFSLQLNSVTPEDTAVYYCARGDSSSWYAFDYWGQGTLVTVSSTRIQNPDPAVYQLRDSKSSDKSVCLFTDFDSQTNVSQSKDSDVYITDKCVLDMRSMDFKSNSAVAWSNKSDFACANAFNNSIIPEDTFFPSPESSCDVKLVEKSFETDTNLNFQNLSVIGFRILLLKVAGFNLLMTLRLWSS

SEQ ID NO: 13130 - protein, 895 aa, Artificial Sequence
  Synthetic Polypeptide
MALPVTALLLPLALLLHAARPEVQLVESGGGLVQPGGSLRLSCAASGFSFSDFWMSWVRQAPGKGLEWVATISQAGSEKDYVDSVKGRFTISRDNAKKSLYLQMNSLRAEDTAVYYCASGVYSFDYRGQGTLVTVSSGTGGGGSGGGGSGGGGSEFDQSVVTQPPSVSVAPGKTARITCGRNNIGSKSVHWYQQKPGQAPVLVVYDDSDRPSGIPERFSGSNSGNTATLTISRVEAGDEADYYCQVWDSSSDHVVFGGGTKLTVLGLEDLKNVFPPEVAVFEPSEAEISHTQKATLVCLATGFYPDHVELSWWVNGKEVHSGVCTDPQPLKEQPALNDSRYCLSSRLRVSATFWQNPRNHFRCQVQFYGLSENDEWTQDRAKPVTQIVSAEAWGRADCGFTSESYQQGVLSATILYEILLGKATLYAVLVSALVLMAMVKRKDSRGRAKRSGSGATNFSLLKQAGDVEENPGPTSMDWIWRILFLVGAATGAHSGPQLQLQESGPGLVKPSETLSLTCTVSGDSISSGDYYWGWIRQPPGKGLEWIGHIYYSGVTYYNPSLKSRVTISVDTSRNQFSLKLSSVTAADTAVYYCTREDSSNWRSRGQGTLVTVSSGSGGGGSGGGGSGGGGSFEVQLVQSGGGVMRPGGSLRLSCAASGFTFDDYGMSWVRQAPGKGLEWVSGINWNGGSTGYADSVRGRFTISRDNAKNSLYLQMNSLRAEDTALYYCARERGYGYHDPHDYWGQGTLVTVSSTRIQNPDPAVYQLRDSKSSDKSVCLFTDFDSQTNVSQSKDSDVYITDKCVLDMRSMDFKSNSAVAWSNKSDFACANAFNNSIIPEDTFFPSPESSCDVKLVEKSFETDTNLNFQNLSVIGFRILLLKVAGFNLLMTLRLWSS

SEQ ID NO: 13131 - protein, 908 aa, Artificial Sequence
  Synthetic Polypeptide
MALPVTALLLPLALLLHAARPEVQLVESGGGLVQPGGSLRLSCAASGFSFSDFWMSWVRQAPGKGLEWVATISQAGSEKDYVDSVKGRFTISRDNAKKSLYLQMNSLRAEDTAVYYCASGVYSFDYRGQGTLVTVSSGTGGGGSGGGGSGGGGSEFEQKLISEEDLEFQAVVTQPPSASGTPGQRVTISCSGSSSNIGSNTVNWYQQVPGTAPKLLIYSNNQRPSGVPDRFSGSKSGTSASLAISGLQSEDEADYYCAAWDDSLNGWVFGGGTKLTVLLEDLKNVFPPEVAVFEPSEAEISHTQKATLVCLATGFYPDHVELSWWVNGKEVHSGVCTDPQPLKEQPALNDSRYCLSSRLRVSATFWQNPRNHFRCQVQFYGLSENDEWTQDRAKPVTQIVSAEAWGRADCGFTSESYQQGVLSATILYEILLGKATLYAVLVSALVLMAMVKRKDSRGRAKRSGSGATNFSLLKQAGDVEENPGPTSMDWIWRILFLVGAATGAHSGPQLQLQESGPGLVKPSETLSLTCTVSGDSISSGDYYWGWIRQPPGKGLEWIGHIYYSGVTYYNPSLKSRVTISVDTSRNQFSLKLSSVTAADTAVYYCTREDSSNWRSRGQGTLVTVSSGSGGGGSGGGGSGGGGSFEQMQLVQSGAEVKEPGESLRISCKGSGYSFTNFWISWVRQMPGKGLEWMGRVDPGYSYSTYSPSFQGHVTISADKSTSTAYLQWNSLKASDTAMYYCARVQYSGYYDWFDPWGQGTLVTVSSTRIQNPDPAVYQLRDSKSSDKSVCLFTDFDSQTNVSQSKDSDVYITDKCVLDMRSMDFKSNSAVAWSNKSDFACANAFNNSIIPEDTFFPSPESSCDVKLVEKSFETDTNLNFQNLSVIGFRILLLKVAGFNLLMTLRLWSS

SEQ ID NO: 13132 - protein, 902 aa, Artificial Sequence
  Synthetic Polypeptide
MALPVTALLLPLALLLHAARPEVQLVESGGGLVQPGGSLRLSCAASGFSFSDFWMSWVRQAPGKGLEWVATISQAGSEKDYVDSVKGRFTISRDNAKKSLYLQMNSLRAEDTAVYYCASGVYSFDYRGQGTLVTVSSGTGGGGSGGGGSGGGGSEFEQKLISEEDLEFDIQMTQSPSTLSASVGDRVTITCRASQNINKWLAWYQQRPGKAPQLLIYKASSLESGVPSRFSGSGSGTEYTLTISSLQPDDFATYYCQQYNSYATFGQGTKVEIKRLEDLKNVFPPEVAVFEPSEAEISHTQKATLVCLATGFYPDHVELSWWVNGKEVHSGVCTDPQPLKEQPALNDSRYCLSSRLRVSATFWQNPRNHFRCQVQFYGLSENDEWTQDRAKPVTQIVSAEAWGRADCGFTSESYQQGVLSATILYEILLGKATLYAVLVSALVLMAMVKRKDSRGRAKRSGSGATNFSLLKQAGDVEENPGPTSMDWIWRILFLVGAATGAHSGPQLQLQESGPGLVKPSETLSLTCTVSGDSISSGDYYWGWIRQPPGKGLEWIGHIYYSGVTYYNPSLKSRVTISVDTSRNQFSLKLSSVTAADTAVYYCTREDSSNWRSRGQGTLVTVSSGSGGGGSGGGGSGGGGSFEQVQLVQSGAEVKKPGESLKISCKGSGYNFSNKWIGWVRQLPGRGLEWIAIIYPGYSDITYSPSFQGRVTISADTSINTAYLHWHSLKASDTAMYYCVRHTALAGFDYWGLGTLVTVSSTRIQNPDPAVYQLRDSKSSDKSVCLFTDFDSQTNVSQSKDSDVYITDKCVLDMRSMDFKSNSAVAWSNKSDFACANAFNNSIIPEDTFFPSPESSCDVKLVEKSFETDTNLNFQNLSVIGFRILLLKVAGFNLLMTLRLWSS

SEQ ID NO: 13133 - protein, 893 aa, Artificial Sequence
  Synthetic Polypeptide
MALPVTALLLPLALLLHAARPEVQLVESGGGLVQPGGSLRLSCAASGFSFSDFWMSWVRQAPGKGLEWVATISQAGSEKDYVDSVKGRFTISRDNAKKSLYLQMNSLRAEDTAVYYCASGVYSFDYRGQGTLVTVSSGTGGGGSGGGGSGGGGSEFIVLTQSPASLAVSLGQRATISCRASESVDNYGNTFMHWYQQKPGQPPKLLIYRASNLESGIPARFSGSGSRTDFTLTINPVEADDVATYYCQQSNEDPPTFGAGTKLELKLEDLKNVFPPEVAVFEPSEAEISHTQKATLVCLATGFYPDHVELSWWVNGKEVHSGVCTDPQPLKEQPALNDSRYCLSSRLRVSATFWQNPRNHFRCQVQFYGLSENDEWTQDRAKPVTQIVSAEAWGRADCGFTSESYQQGVLSATILYEILLGKATLYAVLVSALVLMAMVKRKDSRGRAKRSGSGATNFSLLKQAGDVEENPGPTSMDWIWRILFLVGAATGAHSGPQLQLQESGPGLVKPSETLSLTCTVSGDSISSGDYYWGWIRQPPGKGLEWIGHIYYSGVTYYNPSLKSRVTISVDTSRNQFSLKLSSVTAADTAVYYCTREDSSNWRSRGQGTLVTVSSGSGGGGSGGGGSGGGGSFEQIQLVQSGPELKKPGETVKISCKASGYIFTNYGMNWVKQAPGKSFKWMGWINTYTGESTYSADFKGRFAFSLETSASTAYLHINDLKNEDTATYFCARSGGYDPMDYWGQGTSVTVSSTRIQNPDPAVYQLRDSKSSDKSVCLFTDFDSQTNVSQSKDSDVYITDKCVLDMRSMDFKSNSAVAWSNKSDFACANAFNNSIIPEDTFFPSPESSCDVKLVEKSFETDTNLNFQNLSVIGFRILLLKVAGFNLLMTLRLWSS

SEQ ID NO: 13134 - protein, 892 aa, Artificial Sequence
  Synthetic Polypeptide
MALPVTALLLPLALLLHAARPEVQLVESGGGLVQPGGSLRLSCAASGFSFSDFWMSWVRQAPGKGLEWVATISQAGSEKDYVDSVKGRFTISRDNAKKSLYLQMNSLRAEDTAVYYCASGVYSFDYRGQGTLVTVSSGTGGGGSGGGGSGGGGSEFEIVLTQSPGTLSLSPGERATLSCRASQSVSNTYLAWYHQRPGQAPRLLIYGASSRATGIPDRFSGSGSGTDFALTISSLEPEDFAVYYCQQYSNSWTFGQGTKVEIKRLEDLKNVFPPEVAVFEPSEAEISHTQKATLVCLATGFYPDHVELSWWVNGKEVHSGVCTDPQPLKEQPALNDSRYCLSSRLRVSATFWQNPRNHFRCQVQFYGLSENDEWTQDRAKPVTQIVSAEAWGRADCGFTSESYQQGVLSATILYEILLGKATLYAVLVSALVLMAMVKRKDSRGRAKRSGSGATNFSLLKQAGDVEENPGPTSMDWIWRILFLVGAATGAHSGPQLQLQESGPGLVKPSETLSLTCTVSGDSISSGDYYWGWIRQPPGKGLEWIGHIYYSGVTYYNPSLKSRVTISVDTSRNQFSLKLSSVTAADTAVYYCTREDSSNWRSRGQGTLVTVSSGSGGGGSGGGGSGGGGSFEQVQLVESGGGVVQPGRSLRLSCAASGFTFSSYDMHWVRQAPGKGLEWVAVISYDGTNEYYADSVKGRFTISRDTSKNTLYLQMNSLRAEDTAVYYCARERYFDWSFDYWGQGTLVSVSSTRIQNPDPAVYQLRDSKSSDKSVCLFTDFDSQTNVSQSKDSDVYITDKCVLDMRSMDFKSNSAVAWSNKSDFACANAFNNSIIPEDTFFPSPESSCDVKLVEKSFETDTNLNFQNLSVIGFRILLLKVAGFNLLMTLRLWSS

SEQ ID NO: 13135 - protein, 891 aa, Artificial Sequence
  Synthetic Polypeptide
MALPVTALLLPLALLLHAARPEVQLVESGGGLVQPGGSLRLSCAASGFSFSDFWMSWVRQAPGKGLEWVATISQAGSEKDYVDSVKGRFTISRDNAKKSLYLQMNSLRAEDTAVYYCASGVYSFDYRGQGTLVTVSSGTGGGGSGGGGSGGGGSEFELTQDPAVSVALGQTVRITCQGDSLRSNYANWYQQKPGQAPVLVIYGQNNRPSGIPDRFSGSSSGNTASLTITGAQAADEADYYCDSRVSTGNHVVFGGGTKLTVLGQLEDLKNVFPPEVAVFEPSEAEISHTQKATLVCLATGFYPDHVELSWWVNGKEVHSGVCTDPQPLKEQPALNDSRYCLSSRLRVSATFWQNPRNHFRCQVQFYGLSENDEWTQDRAKPVTQIVSAEAWGRADCGFTSESYQQGVLSATILYEILLGKATLYAVLVSALVLMAMVKRKDSRGRAKRSGSGATNFSLLKQAGDVEENPGPTSMDWIWRILFLVGAATGAHSGPQLQLQESGPGLVKPSETLSLTCTVSGDSISSGDYYWGWIRQPPGKGLEWIGHIYYSGVTYYNPSLKSRVTISVDTSRNQFSLKLSSVTAADTAVYYCTREDSSNWRSRGQGTLVTVSSGSGGGGSGGGGSGGGGSFEEVQLVQSGAEVKKPGASVKVSCKASGYTFTSYAMHWVRQAPGQRLEWMGWINAGNGNTKYSQKFQGRVTITRDTSASTAYMELSSLRSEDTAVYYCARDISYGSFDYWGQGTLVTVSSTRIQNPDPAVYQLRDSKSSDKSVCLFTDFDSQTNVSQSKDSDVYITDKCVLDMRSMDFKSNSAVAWSNKSDFACANAFNNSIIPEDTFFPSPESSCDVKLVEKSFETDTNLNFQNLSVIGFRILLLKVAGFNLLMTLRLWSS

SEQ ID NO: 13136 - protein, 893 aa, Artificial Sequence
  Synthetic Polypeptide
MALPVTALLLPLALLLHAARPEVQLVESGGGLVQPGGSLRLSCAASGFSFSDFWMSWVRQAPGKGLEWVATISQAGSEKDYVDSVKGRFTISRDNAKKSLYLQMNSLRAEDTAVYYCASGVYSFDYRGQGTLVTVSSGTGGGGSGGGGSGGGGSEFDIVLTQTPATLSVTPGDSVSLSCRASQSISNNLHWYQQKSHESPRLLIKNASQSISGIPSKFSGSGSGTDFTLRINSVETEDFGMYFCQQSNSWPYTFGSGTKLEIKLEDLKNVFPPEVAVFEPSEAEISHTQKATLVCLATGFYPDHVELSWWVNGKEVHSGVCTDPQPLKEQPALNDSRYCLSSRLRVSATFWQNPRNHFRCQVQFYGLSENDEWTQDRAKPVTQIVSAEAWGRADCGFTSESYQQGVLSATILYEILLGKATLYAVLVSALVLMAMVKRKDSRGRAKRSGSGATNFSLLKQAGDVEENPGPTSMDWIWRILFLVGAATGAHSGPQLQLQESGPGLVKPSETLSLTCTVSGDSISSGDYYWGWIRQPPGKGLEWIGHIYYSGVTYYNPSLKSRVTISVDTSRNQFSLKLSSVTAADTAVYYCTREDSSNWRSRGQGTLVTVSSGSGGGGSGGGGSGGGGSFEQVKLQQSGPELVKPGASVKISCKASGYSFTGYYMHWVKQSHGNILDWIGYIYPYNGVSSYNQKFKGKATLTVDKSSSTAYMELRSLTSEDSAVYYCARERGLYQLRAMDYWGQGTSVTVSSTRIQNPDPAVYQLRDSKSSDKSVCLFTDFDSQTNVSQSKDSDVYITDKCVLDMRSMDFKSNSAVAWSNKSDFACANAFNNSIIPEDTFFPSPESSCDVKLVEKSFETDTNLNFQNLSVIGFRILLLKVAGFNLLMTLRLWSS

SEQ ID NO: 13137 - protein, 884 aa, Artificial Sequence
  Synthetic Polypeptide
MALPVTALLLPLALLLHAARPEVQLVESGGGLVQPGGSLRLSCAASGFSFSDFWMSWVRQAPGKGLEWVATISQAGSEKDYVDSVKGRFTISRDNAKKSLYLQMNSLRAEDTAVYYCASGVYSFDYRGQGTLVTVSSGTGGGGSGGGGSGGGGSEFDIVMTQTPAIMSASPGQKVTITCSASSSVNYMHWYQQKLGSSPKLWIYDTSKLAPGVPARFSGSGSGTSYSLTISSMEAEDAASYFCHQWSSYPYTFGSGTKLEIKLEDLKNVFPPEVAVFEPSEAEISHTQKATLVCLATGFYPDHVELSWWVNGKEVHSGVCTDPQPLKEQPALNDSRYCLSSRLRVSATFWQNPRNHFRCQVQFYGLSENDEWTQDRAKPVTQIVSAEAWGRADCGFTSESYQQGVLSATILYEILLGKATLYAVLVSALVLMAMVKRKDSRGRAKRSGSGATNFSLLKQAGDVEENPGPTSMDWIWRILFLVGAATGAHSGPQLQLQESGPGLVKPSETLSLTCTVSGDSISSGDYYWGWIRQPPGKGLEWIGHIYYSGVTYYNPSLKSRVTISVDTSRNQFSLKLSSVTAADTAVYYCTREDSSNWRSRGQGTLVTVSSGSGGGGSGGGGSGGGGSFEEVQLQESGPDLVKPSQSLSLTCTVTGYSITSGYGWHWIRQFPGNKLEWMGYIHYSGSTTYNPSLKSRISISRDTSKNQFFLQLNSVTTEDTATYYCARSLRYWGQGTTLTVSSTRIQNPDPAVYQLRDSKSSDKSVCLFTDFDSQTNVSQSKDSDVYITDKCVLDMRSMDFKSNSAVAWSNKSDFACANAFNNSIIPEDTFFPSPESSCDVKLVEKSFETDTNLNFQNLSVIGFRILLLKVAGFNLLMTLRLWSS

SEQ ID NO: 13138 - protein, 887 aa, Artificial Sequence
  Synthetic Polypeptide
MALPVTALLLPLALLLHAARPEVQLVESGGGLVQPGGSLRLSCAASGFSFSDFWMSWVRQAPGKGLEWVATISQAGSEKDYVDSVKGRFTISRDNAKKSLYLQMNSLRAEDTAVYYCASGVYSFDYRGQGTLVTVSSGTGGGGSGGGGSGGGGSEFDIQMTQSPSSLSASVGDRVTITCSATSSISYMHWYQQKPGKAPKGWIYDTSKLAHGVPSRFSGSGSGTDFTLTISSLQPEDFATYYCHQRRSYPFTFGQGTKVEIKLEDLKNVFPPEVAVFEPSEAEISHTQKATLVCLATGFYPDHVELSWWVNGKEVHSGVCTDPQPLKEQPALNDSRYCLSSRLRVSATFWQNPRNHFRCQVQFYGLSENDEWTQDRAKPVTQIVSAEAWGRADCGFTSESYQQGVLSATILYEILLGKATLYAVLVSALVLMAMVKRKDSRGRAKRSGSGATNFSLLKQAGDVEENPGPTSMDWIWRILFLVGAATGAHSGPQLQLQESGPGLVKPSETLSLTCTVSGDSISSGDYYWGWIRQPPGKGLEWIGHIYYSGVTYYNPSLKSRVTISVDTSRNQFSLKLSSVTAADTAVYYCTREDSSNWRSRGQGTLVTVSSGSGGGGSGGGGSGGGGSFEEVQLVQSGAEVKKPGASVKVSCKASGYTFTNFWIHWVRQAPGQGLEWIGEIDPSDSYTNYNQKFKGRVTITRDTSTSTAYLELSSLRSEDTAVYYCAREITTVDYWGQGTLVTVSSTRIQNPDPAVYQLRDSKSSDKSVCLFTDFDSQTNVSQSKDSDVYITDKCVLDMRSMDFKSNSAVAWSNKSDFACANAFNNSIIPEDTFFPSPESSCDVKLVEKSFETDTNLNFQNLSVIGFRILLLKVAGFNLLMTLRLWSS

SEQ ID NO: 13139 - protein, 894 aa, Artificial Sequence
  Synthetic Polypeptide
MALPVTALLLPLALLLHAARPEVQLVESGGGLVQPGGSLRLSCAASGFSFSDFWMSWVRQAPGKGLEWVATISQAGSEKDYVDSVKGRFTISRDNAKKSLYLQMNSLRAEDTAVYYCASGVYSFDYRGQGTLVTVSSGTGGGGSGGGGSGGGGSEFDIQMTQSPSSLSASVGDRVTITCKASQGFNKYVAWYQQKPGKAPKLLIYYTSTLQPGVPSRFSGSGSGRDYTLTISSLQPEDFATYYCLQYGNLLYAFGQGTKVEIKRLEDLKNVFPPEVAVFEPSEAEISHTQKATLVCLATGFYPDHVELSWWVNGKEVHSGVCTDPQPLKEQPALNDSRYCLSSRLRVSATFWQNPRNHFRCQVQFYGLSENDEWTQDRAKPVTQIVSAEAWGRADCGFTSESYQQGVLSATILYEILLGKATLYAVLVSALVLMAMVKRKDSRGRAKRSGSGATNFSLLKQAGDVEENPGPTSMDWIWRILFLVGAATGAHSGPQLQLQESGPGLVKPSETLSLTCTVSGDSISSGDYYWGWIRQPPGKGLEWIGHIYYSGVTYYNPSLKSRVTISVDTSRNQFSLKLSSVTAADTAVYYCTREDSSNWRSRGQGTLVTVSSGSGGGGSGGGGSGGGGSFEEVQLVQSGAEVKKPGASVKVSCKASGYTFTSYWIGWVRQAPGQGLEWIGDIYPGGGYTNYNEKFKGRVTITRDTSTSTAYLELSSLRSEDTAVYYCARLDGSSYRGAMDSWGQGTLVTVSSTRIQNPDPAVYQLRDSKSSDKSVCLFTDFDSQTNVSQSKDSDVYITDKCVLDMRSMDFKSNSAVAWSNKSDFACANAFNNSIIPEDTFFPSPESSCDVKLVEKSFETDTNLNFQNLSVIGFRILLLKVAGFNLLMTLRLWSS

SEQ ID NO: 13140 - protein, 890 aa, Artificial Sequence
  Synthetic Polypeptide
MALPVTALLLPLALLLHAARPEVQLVESGGGLVQPGGSLRLSCAASGFSFSDFWMSWVRQAPGKGLEWVATISQAGSEKDYVDSVKGRFTISRDNAKKSLYLQMNSLRAEDTAVYYCASGVYSFDYRGQGTLVTVSSGTGGGGSGGGGSGGGGSEFDIQMTQSPSSLSASVGDRVTITCRASQDIRYYLNWYQQKPGKAPKLLIYVASSLQSGVPSRFSGSGSGTEFTLTVSSLQPEDFATYYCLQVYSTPRTFGQGTKVEIKLEDLKNVFPPEVAVFEPSEAEISHTQKATLVCLATGFYPDHVELSWWVNGKEVHSGVCTDPQPLKEQPALNDSRYCLSSRLRVSATFWQNPRNHFRCQVQFYGLSENDEWTQDRAKPVTQIVSAEAWGRADCGFTSESYQQGVLSATILYEILLGKATLYAVLVSALVLMAMVKRKDSRGRAKRSGSGATNFSLLKQAGDVEENPGPTSMDWIWRILFLVGAATGAHSGPQLQLQESGPGLVKPSETLSLTCTVSGDSISSGDYYWGWIRQPPGKGLEWIGHIYYSGVTYYNPSLKSRVTISVDTSRNQFSLKLSSVTAADTAVYYCTREDSSNWRSRGQGTLVTVSSGSGGGGSGGGGSGGGGSFEEVQLVESGGGLAKPGGSLRLSCAASGFRFTFNNYYMDWVRQAPGQGLEWVSRISSSGDPTWYADSVKGRFTISRENAKNTLFLQMNSLRAEDTAVYYCASLTTGSDSWGQGVLVTVSSTRIQNPDPAVYQLRDSKSSDKSVCLFTDFDSQTNVSQSKDSDVYITDKCVLDMRSMDFKSNSAVAWSNKSDFACANAFNNSIIPEDTFFPSPESSCDVKLVEKSFETDTNLNFQNLSVIGFRILLLKVAGFNLLMTLRLWSS

SEQ ID NO: 13141 - protein, 891 aa, Artificial Sequence
  Synthetic Polypeptide
MALPVTALLLPLALLLHAARPEVQLVESGGGLVQPGGSLRLSCAASGFSFSDFWMSWVRQAPGKGLEWVATISQAGSEKDYVDSVKGRFTISRDNAKKSLYLQMNSLRAEDTAVYYCASGVYSFDYRGQGTLVTVSSGTGGGGSGGGGSGGGGSEFEIVMTQSPATLSVSPGERATLSCRASQSVSRNLAWYQQKPGQAPRLLIYGASTRATGIPARFSGSGSGTEFTLTIGSLQSEDFAVYYCQQYKTWPRTFGQGTNVEIKLEDLKNVFPPEVAVFEPSEAEISHTQKATLVCLATGFYPDHVELSWWVNGKEVHSGVCTDPQPLKEQPALNDSRYCLSSRLRVSATFWQNPRNHFRCQVQFYGLSENDEWTQDRAKPVTQIVSAEAWGRADCGFTSESYQQGVLSATILYEILLGKATLYAVLVSALVLMAMVKRKDSRGRAKRSGSGATNFSLLKQAGDVEENPGPTSMDWIWRILFLVGAATGAHSGPQLQLQESGPGLVKPSETLSLTCTVSGDSISSGDYYWGWIRQPPGKGLEWIGHIYYSGVTYYNPSLKSRVTISVDTSRNQFSLKLSSVTAADTAVYYCTREDSSNWRSRGQGTLVTVSSGSGGGGSGGGGSGGGGSFEQVQLQQWGAGLLKPSETLSLTCAVFGGSFSGYYWSWIRQPPGKGLEWIGEINHRGNTNDNPSLKSRVTISVDTSKNQFALKLSSVTAADTAVYYCARERGYTYGNFDHWGQGTLVTVSSTRIQNPDPAVYQLRDSKSSDKSVCLFTDFDSQTNVSQSKDSDVYITDKCVLDMRSMDFKSNSAVAWSNKSDFACANAFNNSIIPEDTFFPSPESSCDVKLVEKSFETDTNLNFQNLSVIGFRILLLKVAGFNLLMTLRLWSS

SEQ ID NO: 13142 - protein, 892 aa, Artificial Sequence
  Synthetic Polypeptide
MALPVTALLLPLALLLHAARPEVQLVESGGGLVQPGGSLRLSCAASGFSFSDFWMSWVRQAPGKGLEWVATISQAGSEKDYVDSVKGRFTISRDNAKKSLYLQMNSLRAEDTAVYYCASGVYSFDYRGQGTLVTVSSGTGGGGSGGGGSGGGGSEFEIVMTPSSATLSVSPGERATLSCRASQSVSRNLAWYQQKPGQAPRLLIYGASTRATGIPARFSGSGSGTEFTLTISSLQSEDFAVYYCHQYSNWMCSFGQGTKLEIKLEDLKNVFPPEVAVFEPSEAEISHTQKATLVCLATGFYPDHVELSWWVNGKEVHSGVCTDPQPLKEQPALNDSRYCLSSRLRVSATFWQNPRNHFRCQVQFYGLSENDEWTQDRAKPVTQIVSAEAWGRADCGFTSESYQQGVLSATILYEILLGKATLYAVLVSALVLMAMVKRKDSRGRAKRSGSGATNFSLLKQAGDVEENPGPTSMDWIWRILFLVGAATGAHSGPQLQLQESGPGLVKPSETLSLTCTVSGDSISSGDYYWGWIRQPPGKGLEWIGHIYYSGVTYYNPSLKSRVTISVDTSRNQFSLKLSSVTAADTAVYYCTREDSSNWRSRGQGTLVTVSSGSGGGGSGGGGSGGGGSFEEVQLLESGGGLVQPGGSLRLSCAASGFTFSRYAMNWVRQAPGKGLEWVSGISGSGGRTYYADSVKGRFTISRDNSKNTLYLQMNSLRAEDTAVYYCAKDRDFWSGPFDYWGQGTLVTVSSTRIQNPDPAVYQLRDSKSSDKSVCLFTDFDSQTNVSQSKDSDVYITDKCVLDMRSMDFKSNSAVAWSNKSDFACANAFNNSIIPEDTFFPSPESSCDVKLVEKSFETDTNLNFQNLSVIGFRILLLKVAGFNLLMTLRLWSS

SEQ ID NO: 13143 - protein, 897 aa, Artificial Sequence
  Synthetic Polypeptide
MALPVTALLLPLALLLHAARPEVQLVESGGGLVQPGGSLRLSCAASGFSFSDFWMSWVRQAPGKGLEWVATISQAGSEKDYVDSVKGRFTISRDNAKKSLYLQMNSLRAEDTAVYYCASGVYSFDYRGQGTLVTVSSGTGGGGSGGGGSGGGGSEFDIQMTQSPSSLSASVGDRVTITCKASKNIRSYLAWYQQKPGKAPKLLIYSGSTLHSGVPSRFSGSGSGTDFTLTISSLQPEDFATYYCQQHHEYPLTFGQGTKVEIKRLEDLKNVFPPEVAVFEPSEAEISHTQKATLVCLATGFYPDHVELSWWVNGKEVHSGVCTDPQPLKEQPALNDSRYCLSSRLRVSATFWQNPRNHFRCQVQFYGLSENDEWTQDRAKPVTQIVSAEAWGRADCGFTSESYQQGVLSATILYEILLGKATLYAVLVSALVLMAMVKRKDSRGRAKRSGSGATNFSLLKQAGDVEENPGPTSMDWIWRILFLVGAATGAHSGPQLQLQESGPGLVKPSETLSLTCTVSGDSISSGDYYWGWIRQPPGKGLEWIGHIYYSGVTYYNPSLKSRVTISVDTSRNQFSLKLSSVTAADTAVYYCTREDSSNWRSRGQGTLVTVSSGSGGGGSGGGGSGGGGSFEQVQLQESGPGLVKPSETLSLTCTVSGYTITSGYDWSWIRQPPGKGLEWIGYINYGGSTNYKPSLGSRVTISVDTSKNQFSLKLSSVTAADTAVYYCARYNEYKSYIYDWYFDFWGQGTLVTVSSTRIQNPDPAVYQLRDSKSSDKSVCLFTDFDSQTNVSQSKDSDVYITDKCVLDMRSMDFKSNSAVAWSNKSDFACANAFNNSIIPEDTFFPSPESSCDVKLVEKSFETDTNLNFQNLSVIGFRILLLKVAGFNLLMTLRLWSS

SEQ ID NO: 13144 - protein, 899 aa, Artificial Sequence
  Synthetic Polypeptide
MALPVTALLLPLALLLHAARPEVQLVESGGGLVQPGGSLRLSCAASGFSFSDFWMSWVRQAPGKGLEWVATISQAGSEKDYVDSVKGRFTISRDNAKKSLYLQMNSLRAEDTAVYYCASGVYSFDYRGQGTLVTVSSGTGGGGSGGGGSGGGGSEFQSVVTQPPSVSAAPGQKVTISCSGSSSNIGNNYVSWYQQLPGTAPKLLIYDNNKRPSGIPDRFSGSKSGTSATLGITGLQTGDEADYYCGTWDGSLYTMLFGGGTKLTVLLEDLKNVFPPEVAVFEPSEAEISHTQKATLVCLATGFYPDHVELSWWVNGKEVHSGVCTDPQPLKEQPALNDSRYCLSSRLRVSATFWQNPRNHFRCQVQFYGLSENDEWTQDRAKPVTQIVSAEAWGRADCGFTSESYQQGVLSATILYEILLGKATLYAVLVSALVLMAMVKRKDSRGRAKRSGSGATNFSLLKQAGDVEENPGPTSMDWIWRILFLVGAATGAHSGPQLQLQESGPGLVKPSETLSLTCTVSGDSISSGDYYWGWIRQPPGKGLEWIGHIYYSGVTYYNPSLKSRVTISVDTSRNQFSLKLSSVTAADTAVYYCTREDSSNWRSRGQGTLVTVSSGSGGGGSGGGGSGGGGSFEEVQLVESGGGLVKPGGSLRLSCAASGFTFSNAWMSWVRQAPGKGLEWVGFIRSKAYGGTTEYAASVKGRFTISRDDSKSIAYLQMNNLKTEDTAVYYCARDGLYSSSWYDSDYWGQGTLVTVSSTRIQNPDPAVYQLRDSKSSDKSVCLFTDFDSQTNVSQSKDSDVYITDKCVLDMRSMDFKSNSAVAWSNKSDFACANAFNNSIIPEDTFFPSPESSCDVKLVEKSFETDTNLNFQNLSVIGFRILLLKVAGFNLLMTLRLWSS

SEQ ID NO: 13145 - protein, 904 aa, Artificial Sequence
  Synthetic Polypeptide
MALPVTALLLPLALLLHAARPEVQLVESGGGLVQPGGSLRLSCAASGFSFSDFWMSWVRQAPGKGLEWVATISQAGSEKDYVDSVKGRFTISRDNAKKSLYLQMNSLRAEDTAVYYCASGVYSFDYRGQGTLVTVSSGTGGGGSGGGGSGGGGSEFQSVLTQPPSVSGAPGQRVTISCTGSSSNIGAGYDVHWYQQLPGTAPKLLIFGNSNRPSGVPDRFSGFKSGTSASLAITGLQAEDEADYFCQSYDSSLSGSGVFGTGTKVTVLGLEDLKNVFPPEVAVFEPSEAEISHTQKATLVCLATGFYPDHVELSWWVNGKEVHSGVCTDPQPLKEQPALNDSRYCLSSRLRVSATFWQNPRNHFRCQVQFYGLSENDEWTQDRAKPVTQIVSAEAWGRADCGFTSESYQQGVLSATILYEILLGKATLYAVLVSALVLMAMVKRKDSRGRAKRSGSGATNFSLLKQAGDVEENPGPTSMDWIWRILFLVGAATGAHSGPQLQLQESGPGLVKPSETLSLTCTVSGDSISSGDYYWGWIRQPPGKGLEWIGHIYYSGVTYYNPSLKSRVTISVDTSRNQFSLKLSSVTAADTAVYYCTREDSSNWRSRGQGTLVTVSSGSGGGGSGGGGSGGGGSFEQMQLVQSGGGLVQPGRSLRLSCAASGFTFDDYAMHWVRQAPGKGLEWVSGISWNSGSIGYADSVKGRFTISRDNAKNSLYLQMNSLRAEDTALYYCAKDIHSGSYYGLLYYAMDVWGQGTTVTVSSTRIQNPDPAVYQLRDSKSSDKSVCLFTDFDSQTNVSQSKDSDVYITDKCVLDMRSMDFKSNSAVAWSNKSDFACANAFNNSIIPEDTFFPSPESSCDVKLVEKSFETDTNLNFQNLSVIGFRILLLKVAGFNLLMTLRLWSS

SEQ ID NO: 13146 - protein, 904 aa, Artificial Sequence
  Synthetic Polypeptide
MALPVTALLLPLALLLHAARPEVQLVESGGGLVQPGGSLRLSCAASGFSFSDFWMSWVRQAPGKGLEWVATISQAGSEKDYVDSVKGRFTISRDNAKKSLYLQMNSLRAEDTAVYYCASGVYSFDYRGQGTLVTVSSGTGGGGSGGGGSGGGGSEFLPVLTQPPSASGTPGQRVTISCSGRSSNIGSNSVNWYRQLPGAAPKLLIYSNNQRPPGVPVRFSGSKSGTSASLAISGLQSEDEATYYCATWDDNLNVHYVFGTGTKVTVLGSRLEDLKNVFPPEVAVFEPSEAEISHTQKATLVCLATGFYPDHVELSWWVNGKEVHSGVCTDPQPLKEQPALNDSRYCLSSRLRVSATFWQNPRNHFRCQVQFYGLSENDEWTQDRAKPVTQIVSAEAWGRADCGFTSESYQQGVLSATILYEILLGKATLYAVLVSALVLMAMVKRKDSRGRAKRSGSGATNFSLLKQAGDVEENPGPTSMDWIWRILFLVGAATGAHSGPQLQLQESGPGLVKPSETLSLTCTVSGDSISSGDYYWGWIRQPPGKGLEWIGHIYYSGVTYYNPSLKSRVTISVDTSRNQFSLKLSSVTAADTAVYYCTREDSSNWRSRGQGTLVTVSSGSGGGGSGGGGSGGGGSFELEMAQVQLVQSGAEVKKPGSSVKVSCKASGGTFSSYAISWVRQAPGQGLEWMGRIIPILGIANYAQKFQGRVTITADKSTSTAYMELSSLRSEDTAVYYCARGGYYSHDMWSEDWGQGTLVTVSSTRIQNPDPAVYQLRDSKSSDKSVCLFTDFDSQTNVSQSKDSDVYITDKCVLDMRSMDFKSNSAVAWSNKSDFACANAFNNSIIPEDTFFPSPESSCDVKLVEKSFETDTNLNFQNLSVIGFRILLLKVAGFNLLMTLRLWSS

SEQ ID NO: 13147 - protein, 898 aa, Artificial Sequence
  Synthetic Polypeptide
MALPVTALLLPLALLLHAARPEVQLVESGGGLVQPGGSLRLSCAASGFSFSDFWMSWVRQAPGKGLEWVATISQAGSEKDYVDSVKGRFTISRDNAKKSLYLQMNSLRAEDTAVYYCASGVYSFDYRGQGTLVTVSSGTGGGGSGGGGSGGGGSEFDFVMTQSPDSLAVSLGERVTMSCKSSQSLLNSGNQKNYLTWYQQKPGQPPKLLIYWASTRESGVPDRFSGSGSGTDFTLTISSLQAEDVAVYYCQNDYSYPYTFGQGTKLEIKLEDLKNVFPPEVAVFEPSEAEISHTQKATLVCLATGFYPDHVELSWWVNGKEVHSGVCTDPQPLKEQPALNDSRYCLSSRLRVSATFWQNPRNHFRCQVQFYGLSENDEWTQDRAKPVTQIVSAEAWGRADCGFTSESYQQGVLSATILYEILLGKATLYAVLVSALVLMAMVKRKDSRGRAKRSGSGATNFSLLKQAGDVEENPGPTSMDWIWRILFLVGAATGAHSGPQLQLQESGPGLVKPSETLSLTCTVSGDSISSGDYYWGWIRQPPGKGLEWIGHIYYSGVTYYNPSLKSRVTISVDTSRNQFSLKLSSVTAADTAVYYCTREDSSNWRSRGQGTLVTVSSGSGGGGSGGGGSGGGGSFEEVQLVQSGAELKKPGASVKVSCKASGYTFTDYYMKWVRQAPGQGLEWIGDIIPSNGATFYNQKFKGRVTITVDKSTSTAYMELSSLRSEDTAVYYCARSHLLRASWFAYWGQGTLVTVSSTRIQNPDPAVYQLRDSKSSDKSVCLFTDFDSQTNVSQSKDSDVYITDKCVLDMRSMDFKSNSAVAWSNKSDFACANAFNNSIIPEDTFFPSPESSCDVKLVEKSFETDTNLNFQNLSVIGFRILLLKVAGFNLLMTLRLWSS

SEQ ID NO: 13148 - protein, 898 aa, Artificial Sequence
  Synthetic Polypeptide
MALPVTALLLPLALLLHAARPEVQLVESGGGLVQPGGSLRLSCAASGFSFSDFWMSWVRQAPGKGLEWVATISQAGSEKDYVDSVKGRFTISRDNAKKSLYLQMNSLRAEDTAVYYCASGVYSFDYRGQGTLVTVSSGTGGGGSGGGGSGGGGSEFDFVMTQSPDSLAVSLGERVTMSCKSSQSLLNSGNQKNYLTWYQQKPGQPPKLLIYWASTRESGVPDRFSGSGSGTDFTLTISSLQAEDVAVYYCQNDYSYPYTFGQGTKLEIKLEDLKNVFPPEVAVFEPSEAEISHTQKATLVCLATGFYPDHVELSWWVNGKEVHSGVCTDPQPLKEQPALNDSRYCLSSRLRVSATFWQNPRNHFRCQVQFYGLSENDEWTQDRAKPVTQIVSAEAWGRADCGFTSESYQQGVLSATILYEILLGKATLYAVLVSALVLMAMVKRKDSRGRAKRSGSGATNFSLLKQAGDVEENPGPTSMDWIWRILFLVGAATGAHSGPQLQLQESGPGLVKPSETLSLTCTVSGDSISSGDYYWGWIRQPPGKGLEWIGHIYYSGVTYYNPSLKSRVTISVDTSRNQFSLKLSSVTAADTAVYYCTREDSSNWRSRGQGTLVTVSSGSGGGGSGGGGSGGGGSFEQVQLVQSGAELKKPGASVKVSCKASGYTFTDYYMKWVRQAPGQGLEWIGDIIPSNGATFYNQKFKGRVTITVDKSTSTAYMELSSLRSEDTAVYYCARSHLLRASWFAYWGQGTLVTVSSTRIQNPDPAVYQLRDSKSSDKSVCLFTDFDSQTNVSQSKDSDVYITDKCVLDMRSMDFKSNSAVAWSNKSDFACANAFNNSIIPEDTFFPSPESSCDVKLVEKSFETDTNLNFQNLSVIGFRILLLKVAGFNLLMTLRLWSS

SEQ ID NO: 13149 - protein, 888 aa, Artificial Sequence
  Synthetic Polypeptide
MALPVTALLLPLALLLHAARPEVQLVESGGGLVQPGGSLRLSCAASGFSFSDFWMSWVRQAPGKGLEWVATISQAGSEKDYVDSVKGRFTISRDNAKKSLYLQMNSLRAEDTAVYYCASGVYSFDYRGQGTLVTVSSGTGGGGSGGGGSGGGGSEFDVQITQSPSYLAASPGETITINCRASKSISKDLAWYQEKPGKTNKLLIYSGSTLQSGIPSRFSGSGSGTDFTLTISSLEPEDFAMYYCQQHNKYPYTFGGGTKLEIKRLEDLKNVFPPEVAVFEPSEAEISHTQKATLVCLATGFYPDHVELSWWVNGKEVHSGVCTDPQPLKEQPALNDSRYCLSSRLRVSATFWQNPRNHFRCQVQFYGLSENDEWTQDRAKPVTQIVSAEAWGRADCGFTSESYQQGVLSATILYEILLGKATLYAVLVSALVLMAMVKRKDSRGRAKRSGSGATNFSLLKQAGDVEENPGPTSMDWIWRILFLVGAATGAHSGPQLQLQESGPGLVKPSETLSLTCTVSGDSISSGDYYWGWIRQPPGKGLEWIGHIYYSGVTYYNPSLKSRVTISVDTSRNQFSLKLSSVTAADTAVYYCTREDSSNWRSRGQGTLVTVSSGSGGGGSGGGGSGGGGSFEQVQLQQPGAELVRPGASVKLSCKASGYTFTSYWMNWVKQRPDQGLEWIGRIDPYDSETHYNQKFKDKAILTVDKSSSTAYMQLSSLTSEDSAVYYCARGNWDDYWGQGTTLTVSSTRIQNPDPAVYQLRDSKSSDKSVCLFTDFDSQTNVSQSKDSDVYITDKCVLDMRSMDFKSNSAVAWSNKSDFACANAFNNSIIPEDTFFPSPESSCDVKLVEKSFETDTNLNFQNLSVIGFRILLLKVAGFNLLMTLRLWSS

SEQ ID NO: 13150 - protein, 890 aa, Artificial Sequence
  Synthetic Polypeptide
MALPVTALLLPLALLLHAARPEVQLVESGGGLVQPGGSLRLSCAASGFSFSDFWMSWVRQAPGKGLEWVATISQAGSEKDYVDSVKGRFTISRDNAKKSLYLQMNSLRAEDTAVYYCASGVYSFDYRGQGTLVTVSSGTGGGGSGGGGSGGGGSEFEIVLTQSPTSMTASPGEQVTITCRASSSINYMHWYQQKPGASPRPWIYETSKLASGVPDRFSGSASGTSYSLTINNMEAEDAATYYCQQWNYPSWTFGGGTKLELKLEDLKNVFPPEVAVFEPSEAEISHTQKATLVCLATGFYPDHVELSWWVNGKEVHSGVCTDPQPLKEQPALNDSRYCLSSRLRVSATFWQNPRNHFRCQVQFYGLSENDEWTQDRAKPVTQIVSAEAWGRADCGFTSESYQQGVLSATILYEILLGKATLYAVLVSALVLMAMVKRKDSRGRAKRSGSGATNFSLLKQAGDVEENPGPTSMDWIWRILFLVGAATGAHSGPQLQLQESGPGLVKPSETLSLTCTVSGDSISSGDYYWGWIRQPPGKGLEWIGHIYYSGVTYYNPSLKSRVTISVDTSRNQFSLKLSSVTAADTAVYYCTREDSSNWRSRGQGTLVTVSSGSGGGGSGGGGSGGGGSFEEVQLVESGGGLVQPGRSLKLSCAASGFTFSDYNMAWVRQAPKKGLEWVATILYDGGRTYYRGSVKGRFTISRDNAKSTLYLRMDSLRSEDTATYYCATHSRGTDYFDYWGQGVMVTVSSTRIQNPDPAVYQLRDSKSSDKSVCLFTDFDSQTNVSQSKDSDVYITDKCVLDMRSMDFKSNSAVAWSNKSDFACANAFNNSIIPEDTFFPSPESSCDVKLVEKSFETDTNLNFQNLSVIGFRILLLKVAGFNLLMTLRLWSS

SEQ ID NO: 13151 - protein, 899 aa, Artificial Sequence
  Synthetic Polypeptide
MALPVTALLLPLALLLHAARPEVQLVESGGGLVQPGGSLRLSCAASGFSFSDFWMSWVRQAPGKGLEWVATISQAGSEKDYVDSVKGRFTISRDNAKKSLYLQMNSLRAEDTAVYYCASGVYSFDYRGQGTLVTVSSGTGGGGSGGGGSGGGGSEFDIVMTQSPSSLAVSEGETVTINCKSSQSFLSSGDGKNYVAWYQYKPGQSPKLLIYWASTRQSGVPDRFIGSGSGTDFTLTISTVQAEDLAIYYCQQYYDTPLTFGSGTKLEIKLEDLKNVFPPEVAVFEPSEAEISHTQKATLVCLATGFYPDHVELSWWVNGKEVHSGVCTDPQPLKEQPALNDSRYCLSSRLRVSATFWQNPRNHFRCQVQFYGLSENDEWTQDRAKPVTQIVSAEAWGRADCGFTSESYQQGVLSATILYEILLGKATLYAVLVSALVLMAMVKRKDSRGRAKRSGSGATNFSLLKQAGDVEENPGPTSMDWIWRILFLVGAATGAHSGPQLQLQESGPGLVKPSETLSLTCTVSGDSISSGDYYWGWIRQPPGKGLEWIGHIYYSGVTYYNPSLKSRVTISVDTSRNQFSLKLSSVTAADTAVYYCTREDSSNWRSRGQGTLVTVSSGSGGGGSGGGGSGGGGSFEEVKLQESGPSLVQSSQTLSLTCTVSGFSLTSYHIHWVRQTPGKGLEWMGVMWSDGDTSYNSALKSRLSISRDTSQSQVFLKMNSLQTEDTATYYCARGYYSSYLYLWFAYWGQGTLVTVSSTRIQNPDPAVYQLRDSKSSDKSVCLFTDFDSQTNVSQSKDSDVYITDKCVLDMRSMDFKSNSAVAWSNKSDFACANAFNNSIIPEDTFFPSPESSCDVKLVEKSFETDTNLNFQNLSVIGFRILLLKVAGFNLLMTLRLWSS

SEQ ID NO: 13152 - protein, 903 aa, Artificial Sequence
  Synthetic Polypeptide
MALPVTALLLPLALLLHAARPEVQLVESGGGLVQPGGSLRLSCAASGFSFSDFWMSWVRQAPGKGLEWVATISQAGSEKDYVDSVKGRFTISRDNAKKSLYLQMNSLRAEDTAVYYCASGVYSFDYRGQGTLVTVSSGTGGGGSGGGGSGGGGSEFDVLMTQTPVSLPVSLGGQVSISCRSSQSLVHSDGDTYLHWYLQKPGQSPQLLIYRVSNRFSGVPDRFSGSGSGTDFTLKISRVEPEDLGLYYCLQTTHFPPWTFGGGTKLEMKLEDLKNVFPPEVAVFEPSEAEISHTQKATLVCLATGFYPDHVELSWWVNGKEVHSGVCTDPQPLKEQPALNDSRYCLSSRLRVSATFWQNPRNHFRCQVQFYGLSENDEWTQDRAKPVTQIVSAEAWGRADCGFTSESYQQGVLSATILYEILLGKATLYAVLVSALVLMAMVKRKDSRGRAKRSGSGATNFSLLKQAGDVEENPGPTSMDWIWRILFLVGAATGAHSGPQLQLQESGPGLVKPSETLSLTCTVSGDSISSGDYYWGWIRQPPGKGLEWIGHIYYSGVTYYNPSLKSRVTISVDTSRNQFSLKLSSVTAADTAVYYCTREDSSNWRSRGQGTLVTVSSGSGGGGSGGGGSGGGGSFEQVQLQQSGPELRRPGSSVRLSCKASGYRIKDFLIHWIKNRPEHGLEWIGWIDPEDGETKYAQKFQTKATLTADTSSNTAYMQLSSLTSEDTATYFCARWGDVYYGLMRGHVMDAWGQGTSVTVSSTRIQNPDPAVYQLRDSKSSDKSVCLFTDFDSQTNVSQSKDSDVYITDKCVLDMRSMDFKSNSAVAWSNKSDFACANAFNNSIIPEDTFFPSPESSCDVKLVEKSFETDTNLNFQNLSVIGFRILLLKVAGFNLLMTLRLWSS

SEQ ID NO: 13153 - protein, 898 aa, Artificial Sequence
  Synthetic Polypeptide
MALPVTALLLPLALLLHAARPEVQLVESGGGLVQPGGSLRLSCAASGFSFSDFWMSWVRQAPGKGLEWVATISQAGSEKDYVDSVKGRFTISRDNAKKSLYLQMNSLRAEDTAVYYCASGVYSFDYRGQGTLVTVSSGTGGGGSGGGGSGGGGSEFDIVMTQSPATLSLSPGERATLSCRSSKSLQNVNGNTYLYWFQQKPGQSPQLLIYRMSNLNSGVPDRFSGSGSGTEFTLTISSLEPEDFAVYYCMQHLEYPITFGAGTKLEIKLEDLKNVFPPEVAVFEPSEAEISHTQKATLVCLATGFYPDHVELSWWVNGKEVHSGVCTDPQPLKEQPALNDSRYCLSSRLRVSATFWQNPRNHFRCQVQFYGLSENDEWTQDRAKPVTQIVSAEAWGRADCGFTSESYQQGVLSATILYEILLGKATLYAVLVSALVLMAMVKRKDSRGRAKRSGSGATNFSLLKQAGDVEENPGPTSMDWIWRILFLVGAATGAHSGPQLQLQESGPGLVKPSETLSLTCTVSGDSISSGDYYWGWIRQPPGKGLEWIGHIYYSGVTYYNPSLKSRVTISVDTSRNQFSLKLSSVTAADTAVYYCTREDSSNWRSRGQGTLVTVSSGSGGGGSGGGGSGGGGSFEEVQLVESGGGLVKPGGSLKLSCAASGYTFTSYVMHWVRQAPGKGLEWIGYINPYNDGTKYNEKFQGRVTISSDKSISTAYMELSSLRSEDTAMYYCARGTYYYGTRVFDYWGQGTLVTVSSTRIQNPDPAVYQLRDSKSSDKSVCLFTDFDSQTNVSQSKDSDVYITDKCVLDMRSMDFKSNSAVAWSNKSDFACANAFNNSIIPEDTFFPSPESSCDVKLVEKSFETDTNLNFQNLSVIGFRILLLKVAGFNLLMTLRLWSS

SEQ ID NO: 13154 - protein, 894 aa, Artificial Sequence
  Synthetic Polypeptide
MALPVTALLLPLALLLHAARPEVQLVESGGGLVQPGGSLRLSCAASGFSFSDFWMSWVRQAPGKGLEWVATISQAGSEKDYVDSVKGRFTISRDNAKKSLYLQMNSLRAEDTAVYYCASGVYSFDYRGQGTLVTVSSGTGGGGSGGGGSGGGGSEFDIQMTQSPSSLSASVGDRVTITCKASDHINNWLAWYQQKPGQAPKLLIYGATTLETGVPSRFSGSGSGTDYTLTISSLQPEDFATYYCQQSWNTPWTFGQGTKLEIKRLEDLKNVFPPEVAVFEPSEAEISHTQKATLVCLATGFYPDHVELSWWVNGKEVHSGVCTDPQPLKEQPALNDSRYCLSSRLRVSATFWQNPRNHFRCQVQFYGLSENDEWTQDRAKPVTQIVSAEAWGRADCGFTSESYQQGVLSATILYEILLGKATLYAVLVSALVLMAMVKRKDSRGRAKRSGSGATNFSLLKQAGDVEENPGPTSMDWIWRILFLVGAATGAHSGPQLQLQESGPGLVKPSETLSLTCTVSGDSISSGDYYWGWIRQPPGKGLEWIGHIYYSGVTYYNPSLKSRVTISVDTSRNQFSLKLSSVTAADTAVYYCTREDSSNWRSRGQGTLVTVSSGSGGGGSGGGGSGGGGSFEQVQLQQPGAELVKPGASVKMSCKASGYAFSSYWINWMKQKPGQGLEWIGQIYPGDGDTNYNGKFKGRATLTADTSSSTAYMQLSSLTSEDSAVYFCARSITTVVGCAMDYWGQGTSVTVSSTRIQNPDPAVYQLRDSKSSDKSVCLFTDFDSQTNVSQSKDSDVYITDKCVLDMRSMDFKSNSAVAWSNKSDFACANAFNNSIIPEDTFFPSPESSCDVKLVEKSFETDTNLNFQNLSVIGFRILLLKVAGFNLLMTLRLWSS

SEQ ID NO: 13155 - protein, 896 aa, Artificial Sequence
  Synthetic Polypeptide
MALPVTALLLPLALLLHAARPEVQLVESGGGLVQPGGSLRLSCAASGFSFSDFWMSWVRQAPGKGLEWVATISQAGSEKDYVDSVKGRFTISRDNAKKSLYLQMNSLRAEDTAVYYCASGVYSFDYRGQGTLVTVSSGTGGGGSGGGGSGGGGSEFQIVLSQSPAILSASPGEKVTMTCRASSSVSYMHWYQQKPGSSPKPWIYATSNLASGVPARFSGSGSGTSYSFTISRVEAEDAATYYCQQWTFNPPTFGGGTRLEIKRTVAALEDLKNVFPPEVAVFEPSEAEISHTQKATLVCLATGFYPDHVELSWWVNGKEVHSGVCTDPQPLKEQPALNDSRYCLSSRLRVSATFWQNPRNHFRCQVQFYGLSENDEWTQDRAKPVTQIVSAEAWGRADCGFTSESYQQGVLSATILYEILLGKATLYAVLVSALVLMAMVKRKDSRGRAKRSGSGATNFSLLKQAGDVEENPGPTSMDWIWRILFLVGAATGAHSGPQLQLQESGPGLVKPSETLSLTCTVSGDSISSGDYYWGWIRQPPGKGLEWIGHIYYSGVTYYNPSLKSRVTISVDTSRNQFSLKLSSVTAADTAVYYCTREDSSNWRSRGQGTLVTVSSGSGGGGSGGGGSGGGGSFEQAYLQQSGAELVRPGASVKMSCKASGYTFTSYNMHWVKQTPRQGLEWIGGIYPGNGDTSYNQKFKGKATLTVGKSSSTAYMQLSSLTSEDSAVYFCARYDYNYAMDYWGQGTSVTVSSASTRIQNPDPAVYQLRDSKSSDKSVCLFTDFDSQTNVSQSKDSDVYITDKCVLDMRSMDFKSNSAVAWSNKSDFACANAFNNSIIPEDTFFPSPESSCDVKLVEKSFETDTNLNFQNLSVIGFRILLLKVAGFNLLMTLRLWSS

SEQ ID NO: 13156 - protein, 894 aa, Artificial Sequence
  Synthetic Polypeptide
MALPVTALLLPLALLLHAARPEVQLVESGGGLVQPGGSLRLSCAASGFSFSDFWMSWVRQAPGKGLEWVATISQAGSEKDYVDSVKGRFTISRDNAKKSLYLQMNSLRAEDTAVYYCASGVYSFDYRGQGTLVTVSSGTGGGGSGGGGSGGGGSEFEIVLTQSPATLSLSPGERATLSCRASQSVSSYLAWYQQKPGQAPRLLIYDASNRATGIPARFSGSGSGTDFTLTISSLEPEDFAVYYCQQRSNWPITFGQGTRLEIKLEDLKNVFPPEVAVFEPSEAEISHTQKATLVCLATGFYPDHVELSWWVNGKEVHSGVCTDPQPLKEQPALNDSRYCLSSRLRVSATFWQNPRNHFRCQVQFYGLSENDEWTQDRAKPVTQIVSAEAWGRADCGFTSESYQQGVLSATILYEILLGKATLYAVLVSALVLMAMVKRKDSRGRAKRSGSGATNFSLLKQAGDVEENPGPTSMDWIWRILFLVGAATGAHSGPQLQLQESGPGLVKPSETLSLTCTVSGDSISSGDYYWGWIRQPPGKGLEWIGHIYYSGVTYYNPSLKSRVTISVDTSRNQFSLKLSSVTAADTAVYYCTREDSSNWRSRGQGTLVTVSSGSGGGGSGGGGSGGGGSFEEVQLVESGGGLVQPDRSLRLSCAASGFTFHDYAMHWVRQAPGKGLEWVSTISWNSGTIGYADSVKGRFTISRDNAKNSLYLQMNSLRAEDTALYYCAKDIQYGNYYYGMDVWGQGTTVTVSSTRIQNPDPAVYQLRDSKSSDKSVCLFTDFDSQTNVSQSKDSDVYITDKCVLDMRSMDFKSNSAVAWSNKSDFACANAFNNSIIPEDTFFPSPESSCDVKLVEKSFETDTNLNFQNLSVIGFRILLLKVAGFNLLMTLRLWSS

SEQ ID NO: 13157 - protein, 889 aa, Artificial Sequence
  Synthetic Polypeptide
MALPVTALLLPLALLLHAARPEVQLVESGGGLVQPGGSLRLSCAASGFSFSDFWMSWVRQAPGKGLEWVATISQAGSEKDYVDSVKGRFTISRDNAKKSLYLQMNSLRAEDTAVYYCASGVYSFDYRGQGTLVTVSSGTGGGGSGGGGSGGGGSEFDIQMTQSPSSLSASVGDRVTINCKASQDINSYLSWFQQKPGKAPKTLIYRANRLVDGVPSRFSGSGSGQDYTLTISSLQPEDFATYYCLQYDEFPLTFGGGTKVEIKLEDLKNVFPPEVAVFEPSEAEISHTQKATLVCLATGFYPDHVELSWWVNGKEVHSGVCTDPQPLKEQPALNDSRYCLSSRLRVSATFWQNPRNHFRCQVQFYGLSENDEWTQDRAKPVTQIVSAEAWGRADCGFTSESYQQGVLSATILYEILLGKATLYAVLVSALVLMAMVKRKDSRGRAKRSGSGATNFSLLKQAGDVEENPGPTSMDWIWRILFLVGAATGAHSGPQLQLQESGPGLVKPSETLSLTCTVSGDSISSGDYYWGWIRQPPGKGLEWIGHIYYSGVTYYNPSLKSRVTISVDTSRNQFSLKLSSVTAADTAVYYCTREDSSNWRSRGQGTLVTVSSGSGGGGSGGGGSGGGGSFEQVQLVQSGAEVKKPGASVKVSCKASGYTFTNYDINWVRQAPGQGLEWIGWIYPGDGSTKYNEKFKAKATLTADTSTSTAYMELRSLRSDDTAVYYCASGYEDAMDYWGQGTTVTVSSTRIQNPDPAVYQLRDSKSSDKSVCLFTDFDSQTNVSQSKDSDVYITDKCVLDMRSMDFKSNSAVAWSNKSDFACANAFNNSIIPEDTFFPSPESSCDVKLVEKSFETDTNLNFQNLSVIGFRILLLKVAGFNLLMTLRLWSS

SEQ ID NO: 13158 - protein, 891 aa, Artificial Sequence
  Synthetic Polypeptide
MALPVTALLLPLALLLHAARPEVQLVESGGGLVQPGGSLRLSCAASGFSFSDFWMSWVRQAPGKGLEWVATISQAGSEKDYVDSVKGRFTISRDNAKKSLYLQMNSLRAEDTAVYYCASGVYSFDYRGQGTLVTVSSGTGGGGSGGGGSGGGGSEFDIVMTQTPLSLSVTPGQPASISCKSSQSLLDGDGKTYLNWLLQKPGQSPQRLIYLVSKLDSGVPDRFSGSGSGTDFTLKISRVEAEDVGVYYCWQGTHFPRTFGQGTKLEIKLEDLKNVFPPEVAVFEPSEAEISHTQKATLVCLATGFYPDHVELSWWVNGKEVHSGVCTDPQPLKEQPALNDSRYCLSSRLRVSATFWQNPRNHFRCQVQFYGLSENDEWTQDRAKPVTQIVSAEAWGRADCGFTSESYQQGVLSATILYEILLGKATLYAVLVSALVLMAMVKRKDSRGRAKRSGSGATNFSLLKQAGDVEENPGPTSMDWIWRILFLVGAATGAHSGPQLQLQESGPGLVKPSETLSLTCTVSGDSISSGDYYWGWIRQPPGKGLEWIGHIYYSGVTYYNPSLKSRVTISVDTSRNQFSLKLSSVTAADTAVYYCTREDSSNWRSRGQGTLVTVSSGSGGGGSGGGGSGGGGSFEQVQLVQSGAEVKKPGASVKVSCKASGYTFKDTYIHWVRQAPGQGLEWMGRIDPANGNTKYDPKFQGRVTMTRDTSISTAYMELSRLRSDDTAVYYCARRGGVDWGQGTLVTVSSTRIQNPDPAVYQLRDSKSSDKSVCLFTDFDSQTNVSQSKDSDVYITDKCVLDMRSMDFKSNSAVAWSNKSDFACANAFNNSIIPEDTFFPSPESSCDVKLVEKSFETDTNLNFQNLSVIGFRILLLKVAGFNLLMTLRLWSS

SEQ ID NO: 13159 - protein, 892 aa, Artificial Sequence
  Synthetic Polypeptide
MALPVTALLLPLALLLHAARPEVQLVESGGGLVQPGGSLRLSCAASGFSFSDFWMSWVRQAPGKGLEWVATISQAGSEKDYVDSVKGRFTISRDNAKKSLYLQMNSLRAEDTAVYYCASGVYSFDYRGQGTLVTVSSGTGGGGSGGGGSGGGGSEFDIQMTQSPSSLSASVGDRVTITCKASQDVSTAVAWFQQKPGKAPKLLIYSPSYRYTGVPSRFSGSGSGTDFTLTISSLQPEDFTYYCQQLYSTPYTFGQGTKVEIKLEDLKNVFPPEVAVFEPSEAEISHTQKATLVCLATGFYPDHVELSWWVNGKEVHSGVCTDPQPLKEQPALNDSRYCLSSRLRVSATFWQNPRNHFRCQVQFYGLSENDEWTQDRAKPVTQIVSAEAWGRADCGFTSESYQQGVLSATILYEILLGKATLYAVLVSALVLMAMVKRKDSRGRAKRSGSGATNFSLLKQAGDVEENPGPTSMDWIWRILFLVGAATGAHSGPQLQLQESGPGLVKPSETLSLTCTVSGDSISSGDYYWGWIRQPPGKGLEWIGHIYYSGVTYYNPSLKSRVTISVDTSRNQFSLKLSSVTAADTAVYYCTREDSSNWRSRGQGTLVTVSSGSGGGGSGGGGSGGGGSFEEVQLVQSGAEVKKPGASVKVSCKASGYTFTDYYLDVVVRQAPGQGLEWIGRVNPYNGGTIYNQKFKGRVTLTRDTSTSTAYLELSSLRSEDTAVYYCARDHYRYDPLLDYWGQGTLVTVSSTRIQNPDPAVYQLRDSKSSDKSVCLFTDFDSQTNVSQSKDSDVYITDKCVLDMRSMDFKSNSAVAWSNKSDFACANAFNNSIIPEDTFFPSPESSCDVKLVEKSFETDTNLNFQNLSVIGFRILLLKVAGFNLLMTLRLWSS

SEQ ID NO: 13160 - protein, 898 aa, Artificial Sequence
  Synthetic Polypeptide
MALPVTALLLPLALLLHAARPEVQLVESGGGLVQPGGSLRLSCAASGFSFSDFWMSWVRQAPGKGLEWVATISQAGSEKDYVDSVKGRFTISRDNAKKSLYLQMNSLRAEDTAVYYCASGVYSFDYRGQGTLVTVSSGTGGGGSGGGGSGGGGSEFDIQMTQSPSSLSASVGDRVTITCRASQSVSTSSYNYMHWYQQKPGKPPKLLIKYASNLESGVPSRFSGSGSGTDFTLTISSLQPEDFATYYCQHSWEIPLTFGQGTKVEIKLEDLKNVFPPEVAVFEPSEAEISHTQKATLVCLATGFYPDHVELSWWVNGKEVHSGVCTDPQPLKEQPALNDSRYCLSSRLRVSATFWQNPRNHFRCQVQFYGLSENDEWTQDRAKPVTQIVSAEAWGRADCGFTSESYQQGVLSATILYEILLGKATLYAVLVSALVLMAMVKRKDSRGRAKRSGSGATNFSLLKQAGDVEENPGPTSMDWIWRILFLVGAATGAHSGPQLQLQESGPGLVKPSETLSLTCTVSGDSISSGDYYWGWIRQPPGKGLEWIGHIYYSGVTYYNPSLKSRVTISVDTSRNQFSLKLSSVTAADTAVYYCTREDSSNWRSRGQGTLVTVSSGSGGGGSGGGGSGGGGSFEEVQLVQSGAEVKKPGASVKVSCKASGYSFTDYYMHWVRQAPGQGLEWIGRINPYNGAAFYSQNFKDRVTLTVDTSTSTAYLELSSLRSEDTAVYYCAIERGADLEGYAMDYWGQGTLVTVSSTRIQNPDPAVYQLRDSKSSDKSVCLFTDFDSQTNVSQSKDSDVYITDKCVLDMRSMDFKSNSAVAWSNKSDFACANAFNNSIIPEDTFFPSPESSCDVKLVEKSFETDTNLNFQNLSVIGFRILLLKVAGFNLLMTLRLWSS

SEQ ID NO: 13161 - protein, 896 aa, Artificial Sequence
  Synthetic Polypeptide
MALPVTALLLPLALLLHAARPEVQLVESGGGLVQPGGSLRLSCAASGFSFSDFWMSWVRQAPGKGLEWVATISQAGSEKDYVDSVKGRFTISRDNAKKSLYLQMNSLRAEDTAVYYCASGVYSFDYRGQGTLVTVSSGTGGGGSGGGGSGGGGSEFEIVLTQSPATLSASPGERVTLTCRASSNVISSYVHWYQQKPGSSPRLFLYSTSNLASGVPSRFSGSGSGTDFTFTISSLEAEDAATYYCQQYSGYPLTFGQGTRLEIKLEDLKNVFPPEVAVFEPSEAEISHTQKATLVCLATGFYPDHVELSWWVNGKEVHSGVCTDPQPLKEQPALNDSRYCLSSRLRVSATFWQNPRNHFRCQVQFYGLSENDEWTQDRAKPVTQIVSAEAWGRADCGFTSESYQQGVLSATILYEILLGKATLYAVLVSALVLMAMVKRKDSRGRAKRSGSGATNFSLLKQAGDVEENPGPTSMDWIWRILFLVGAATGAHSGPQLQLQESGPGLVKPSETLSLTCTVSGDSISSGDYYWGWIRQPPGKGLEWIGHIYYSGVTYYNPSLKSRVTISVDTSRNQFSLKLSSVTAADTAVYYCTREDSSNWRSRGQGTLVTVSSGSGGGGSGGGGSGGGGSFEQVQLQESGPGLVKPSETLSLTCAVSGYSITSAYYWNWIRQPPGKGLEWIGYISYDGRNNYNPSLKNRITINPDTSKNQFSLQLNSVTPEDTAVYYCAREGDYDVGNYYAMDYWGQGTLVTVSSTRIQNPDPAVYQLRDSKSSDKSVCLFTDFDSQTNVSQSKDSDVYITDKCVLDMRSMDFKSNSAVAWSNKSDFACANAFNNSIIPEDTFFPSPESSCDVKLVEKSFETDTNLNFQNLSVIGFRILLLKVAGFNLLMTLRLWSS

SEQ ID NO: 13162 - protein, 896 aa, Artificial Sequence
  Synthetic Polypeptide
MALPVTALLLPLALLLHAARPEVQLVESGGGLVQPGGSLRLSCAASGFSFSDFWMSWVRQAPGKGLEWVATISQAGSEKDYVDSVKGRFTISRDNAKKSLYLQMNSLRAEDTAVYYCASGVYSFDYRGQGTLVTVSSGTGGGGSGGGGSGGGGSEFEIVLTQSPATLSLSPGERATLSCRASSNVISSYVHWYQQKPGQAPRLLIYSTSNLASGIPARFSGSGSGTDFTLTISSLEPEDFAVYYCQQYSGYPLTFGQGTRLEIKLEDLKNVFPPEVAVFEPSEAEISHTQKATLVCLATGFYPDHVELSWWVNGKEVHSGVCTDPQPLKEQPALNDSRYCLSSRLRVSATFWQNPRNHFRCQVQFYGLSENDEWTQDRAKPVTQIVSAEAWGRADCGFTSESYQQGVLSATILYEILLGKATLYAVLVSALVLMAMVKRKDSRGRAKRSGSGATNFSLLKQAGDVEENPGPTSMDWIWRILFLVGAATGAHSGPQLQLQESGPGLVKPSETLSLTCTVSGDSISSGDYYWGWIRQPPGKGLEWIGHIYYSGVTYYNPSLKSRVTISVDTSRNQFSLKLSSVTAADTAVYYCTREDSSNWRSRGQGTLVTVSSGSGGGGSGGGGSGGGGSFEEVQLVESGGGLVQPGRSLRLSCAASGYSITSAYYWNWVRQAPGKGLEWVSYISYDGRNNYNPSLKNRFTISRDNAKKSLYLQMNSLRAEDTALYYCAKEGDYDVGNYYAMDYWGQGTTVTVSSTRIQNPDPAVYQLRDSKSSDKSVCLFTDFDSQTNVSQSKDSDVYITDKCVLDMRSMDFKSNSAVAWSNKSDFACANAFNNSIIPEDTFFPSPESSCDVKLVEKSFETDTNLNFQNLSVIGFRILLLKVAGFNLLMTLRLWSS

SEQ ID NO: 13163 - protein, 895 aa, Artificial Sequence
  Synthetic Polypeptide
MALPVTALLLPLALLLHAARPEVQLVESGGGLVQPGGSLRLSCAASGFSFSDFWMSWVRQAPGKGLEWVATISQAGSEKDYVDSVKGRFTISRDNAKKSLYLQMNSLRAEDTAVYYCASGVYSFDYRGQGTLVTVSSGTGGGGSGGGGSGGGGSEFDVVMTQTPLSLPVSLGDQASISCRSSQSLVHSNGNTYLRWYLQKPGQSPKVLIYKVSNRVSGVPDRFSGSGSGTDFTLKINRVEAEDLGVYFCSQSTHVPWTFGGGTKLEIKLEDLKNVFPPEVAVFEPSEAEISHTQKATLVCLATGFYPDHVELSWWVNGKEVHSGVCTDPQPLKEQPALNDSRYCLSSRLRVSATFWQNPRNHFRCQVQFYGLSENDEWTQDRAKPVTQIVSAEAWGRADCGFTSESYQQGVLSATILYEILLGKATLYAVLVSALVLMAMVKRKDSRGRAKRSGSGATNFSLLKQAGDVEENPGPTSMDWIWRILFLVGAATGAHSGPQLQLQESGPGLVKPSETLSLTCTVSGDSISSGDYYWGWIRQPPGKGLEWIGHIYYSGVTYYNPSLKSRVTISVDTSRNQFSLKLSSVTAADTAVYYCTREDSSNWRSRGQGTLVTVSSGSGGGGSGGGGSGGGGSFEGVKLDETGGGLVQPGGAMKLSCVTSGFTFGHYWMNWVRQSPEKGLEWVAQFRNKPYNYETYYSDSVKGRFTISRDDSKSSVYLQMNNLRVEDTGIYYCTGASYGMEYLGQGTSVTVSTTRIQNPDPAVYQLRDSKSSDKSVCLFTDFDSQTNVSQSKDSDVYITDKCVLDMRSMDFKSNSAVAWSNKSDFACANAFNNSIIPEDTFFPSPESSCDVKLVEKSFETDTNLNFQNLSVIGFRILLLKVAGFNLLMTLRLWSS

SEQ ID NO: 13164 - protein, 901 aa, Artificial Sequence
  Synthetic Polypeptide
MALPVTALLLPLALLLHAARPEVQLVESGGGLVQPGGSLRLSCAASGFSFSDFWMSWVRQAPGKGLEWVATISQAGSEKDYVDSVKGRFTISRDNAKKSLYLQMNSLRAEDTAVYYCASGVYSFDYRGQGTLVTVSSGTGGGGSGGGGSGGGGSEFQVQLVESGGNLVQPGGSLRLSCAASGFTFGSFSMSWVRQAPGGGLEWVAGLSARSSLTHYADSVKGRFTISRDNAKNSVYLQMNSLRVEDTAVYYCARRSYDSSGYWGHFYSYMDVWGQGTLVTVSLEDLKNVFPPEVAVFEPSEAEISHTQKATLVCLATGFYPDHVELSWWVNGKEVHSGVCTDPQPLKEQPALNDSRYCLSSRLRVSATFWQNPRNHFRCQVQFYGLSENDEWTQDRAKPVTQIVSAEAWGRADCGFTSESYQQGVLSATILYEILLGKATLYAVLVSALVLMAMVKRKDSRGRAKRSGSGATNFSLLKQAGDVEENPGPTSMDWIWRILFLVGAATGAHSGPQLQLQESGPGLVKPSETLSLTCTVSGDSISSGDYYWGWIRQPPGKGLEWIGHIYYSGVTYYNPSLKSRVTISVDTSRNQFSLKLSSVTAADTAVYYCTREDSSNWRSRGQGTLVTVSSGSGGGGSGGGGSGGGGSFESVLTQPSSVSAAPGQKVTISCSGSTSNIGNNYVSWYQQHPGKAPKLMIYDVSKRPSGVPDRFSGSKSGNSASLDISGLQSEDEADYYCAAWDDSLSEFLFGTGTKLTVLGTRIQNPDPAVYQLRDSKSSDKSVCLFTDFDSQTNVSQSKDSDVYITDKCVLDMRSMDFKSNSAVAWSNKSDFACANAFNNSIIPEDTFFPSPESSCDVKLVEKSFETDTNLNFQNLSVIGFRILLLKVAGFNLLMTLRLWSS

SEQ ID NO: 13165 - protein, 896 aa, Artificial Sequence
  Synthetic Polypeptide
MALPVTALLLPLALLLHAARPEVQLVESGGGLVQPGGSLRLSCAASGFSFSDFWMSWVRQAPGKGLEWVATISQAGSEKDYVDSVKGRFTISRDNAKKSLYLQMNSLRAEDTAVYYCASGVYSFDYRGQGTLVTVSSGTGGGGSGGGGSGGGGSEFDVVMTQSPSSLSASVGDRVTITCQSSLDISHYLNWYQQKPGKAPKLLIYDASNLETGVPSRFSGSGSGTHFTFTISSLQPEDFATYYCQQYDNLPLTFGGGTKLEIKRLEDLKNVFPPEVAVFEPSEAEISHTQKATLVCLATGFYPDHVELSWWVNGKEVHSGVCTDPQPLKEQPALNDSRYCLSSRLRVSATFWQNPRNHFRCQVQFYGLSENDEWTQDRAKPVTQIVSAEAWGRADCGFTSESYQQGVLSATILYEILLGKATLYAVLVSALVLMAMVKRKDSRGRAKRSGSGATNFSLLKQAGDVEENPGPTSMDWIWRILFLVGAATGAHSGPQLQLQESGPGLVKPSETLSLTCTVSGDSISSGDYYWGWIRQPPGKGLEWIGHIYYSGVTYYNPSLKSRVTISVDTSRNQFSLKLSSVTAADTAVYYCTREDSSNWRSRGQGTLVTVSSGSGGGGSGGGGSGGGGSFEQVQLVQSGGGVVQPGGSLRVSCAASGVTLSDYGMHWVRQAPGKGLEWVAFIRNDGSDKYYADSVKGRFTISRDNSEKTVSLQMSSLRAEDTAVYYCAKNGESGPLDYWYLDLWGRGTLVTVSSTRIQNPDPAVYQLRDSKSSDKSVCLFTDFDSQTNVSQSKDSDVYITDKCVLDMRSMDFKSNSAVAWSNKSDFACANAFNNSIIPEDTFFPSPESSCDVKLVEKSFETDTNLNFQNLSVIGFRILLLKVAGFNLLMTLRLWSS

SEQ ID NO: 13166 - protein, 900 aa, Artificial Sequence
  Synthetic Polypeptide
MALPVTALLLPLALLLHAARPEVQLVESGGGLVQPGGSLRLSCAASGFSFSDFWMSWVRQAPGKGLEWVATISQAGSEKDYVDSVKGRFTISRDNAKKSLYLQMNSLRAEDTAVYYCASGVYSFDYRGQGTLVTVSSGTGGGGSGGGGSGGGGSEFSYELTQPPSVSGTPGQRVAISCSGSSSNIGTRMVTWYQHVPGTAPKLLIFNNNQRPSGVPDRFSASKSGTSASLAIIGLQSDDEADYYCATWDDNVKSYVFGTGTKVTVLGSRLEDLKNVFPPEVAVFEPSEAEISHTQKATLVCLATGFYPDHVELSWWVNGKEVHSGVCTDPQPLKEQPALNDSRYCLSSRLRVSATFWQNPRNHFRCQVQFYGLSENDEWTQDRAKPVTQIVSAEAWGRADCGFTSESYQQGVLSATILYEILLGKATLYAVLVSALVLMAMVKRKDSRGRAKRSGSGATNFSLLKQAGDVEENPGPTSMDWIWRILFLVGAATGAHSGPQLQLQESGPGLVKPSETLSLTCTVSGDSISSGDYYWGWIRQPPGKGLEWIGHIYYSGVTYYNPSLKSRVTISVDTSRNQFSLKLSSVTAADTAVYYCTREDSSNWRSRGQGTLVTVSSGSGGGGSGGGGSGGGGSFELEMAQVQLQQWGAGLLKPSETLSLTCAVYGGSFSGYYWSWIRQPPGKGLEWIGEINHSGSTNYNPSLKSRVTISVDTSKNQFSLKLSSVTAADTAVYYCARAPQSWYVGDVWGQGTLVTVSSTRIQNPDPAVYQLRDSKSSDKSVCLFTDFDSQTNVSQSKDSDVYITDKCVLDMRSMDFKSNSAVAWSNKSDFACANAFNNSIIPEDTFFPSPESSCDVKLVEKSFETDTNLNFQNLSVIGFRILLLKVAGFNLLMTLRLWSS

SEQ ID NO: 13167 - protein, 897 aa, Artificial Sequence
  Synthetic Polypeptide
MALPVTALLLPLALLLHAARPEVQLVESGGGLVQPGGSLRLSCAASGFSFSDFWMSWVRQAPGKGLEWVATISQAGSEKDYVDSVKGRFTISRDNAKKSLYLQMNSLRAEDTAVYYCASGVYSFDYRGQGTLVTVSSGTGGGGSGGGGSGGGGSEFQSVLTQPPSLSVAPGKTASITCGGNNIGMKSVHWYQQRPGQAPVLVIYYDSDRPSGIPGRFSGSNSGNTATLTISRVEAGDEADYYCQVWDTTGDHPGYVFGTGTKVTVLLEDLKNVFPPEVAVFEPSEAEISHTQKATLVCLATGFYPDHVELSWWVNGKEVHSGVCTDPQPLKEQPALNDSRYCLSSRLRVSATFWQNPRNHFRCQVQFYGLSENDEWTQDRAKPVTQIVSAEAWGRADCGFTSESYQQGVLSATILYEILLGKATLYAVLVSALVLMAMVKRKDSRGRAKRSGSGATNFSLLKQAGDVEENPGPTSMDWIWRILFLVGAATGAHSGPQLQLQESGPGLVKPSETLSLTCTVSGDSISSGDYYWGWIRQPPGKGLEWIGHIYYSGVTYYNPSLKSRVTISVDTSRNQFSLKLSSVTAADTAVYYCTREDSSNWRSRGQGTLVTVSSGSGGGGSGGGGSGGGGSFEQVQLVQSGAEVKKPGSSVKVSCKASGGTFSSYAISWVRQAPGQGLEWMGGIIPIFGTANYAQKFQGRVTITADESTSTAYMELSSLRSEDTAVYYCARGVYGYSGSAPYDEWGQGTLVTVSSTRIQNPDPAVYQLRDSKSSDKSVCLFTDFDSQTNVSQSKDSDVYITDKCVLDMRSMDFKSNSAVAWSNKSDFACANAFNNSIIPEDTFFPSPESSCDVKLVEKSFETDTNLNFQNLSVIGFRILLLKVAGFNLLMTLRLWSS

SEQ ID NO: 13168 - protein, 895 aa, Artificial Sequence
  Synthetic Polypeptide
MALPVTALLLPLALLLHAARPEVQLVESGGGLVQPGGSLRLSCAASGFSFSDFWMSWVRQAPGKGLEWVATISQAGSEKDYVDSVKGRFTISRDNAKKSLYLQMNSLRAEDTAVYYCASGVYSFDYRGQGTLVTVSSGTGGGGSGGGGSGGGGSEFEVQLVESGGGLVQPGRSLRLSCAASGFTFDDYAMHWVRQAPGKGLEWVSGISWNSGSIGYADSVKGRFTISRDNAKNSLYLQMNSLRAEDTALYYCAKDKGGGYYDFWSGSDYWGQGTLVTVSSLEDLKNVFPPEVAVFEPSEAEISHTQKATLVCLATGFYPDHVELSWWVNGKEVHSGVCTDPQPLKEQPALNDSRYCLSSRLRVSATFWQNPRNHFRCQVQFYGLSENDEWTQDRAKPVTQIVSAEAWGRADCGFTSESYQQGVLSATILYEILLGKATLYAVLVSALVLMAMVKRKDSRGRAKRSGSGATNFSLLKQAGDVEENPGPTSMDWIWRILFLVGAATGAHSGPQLQLQESGPGLVKPSETLSLTCTVSGDSISSGDYYWGWIRQPPGKGLEWIGHIYYSGVTYYNPSLKSRVTISVDTSRNQFSLKLSSVTAADTAVYYCTREDSSNWRSRGQGTLVTVSSGSGGGGSGGGGSGGGGSFESSELTQDPAVSVALGQTVRITCQGDSLRSYYASWYQQKPGQAPVLVIYGKNNRPSGIPDRFSGSSSGNTASLTITGAQAEDEADYYCNSRDSSGWVFGGGTKLTVLTRIQNPDPAVYQLRDSKSSDKSVCLFTDFDSQTNVSQSKDSDVYITDKCVLDMRSMDFKSNSAVAWSNKSDFACANAFNNSIIPEDTFFPSPESSCDVKLVEKSFETDTNLNFQNLSVIGFRILLLKVAGFNLLMTLRLWSS

SEQ ID NO: 13169 - protein, 904 aa, Artificial Sequence
  Synthetic Polypeptide
MALPVTALLLPLALLLHAARPEVQLVESGGGLVQPGGSLRLSCAASGFSFSDFWMSWVRQAPGKGLEWVATISQAGSEKDYVDSVKGRFTISRDNAKKSLYLQMNSLRAEDTAVYYCASGVYSFDYRGQGTLVTVSSGTGGGGSGGGGSGGGGSEFEVQLQQSGPGLVKPSQTLSLTCAISGDSVLSNSDTWNWIRQSPSRGLEWLGRTYHRSTWYDDYASSVRGRVSINVDTSKNQYSLQLNAVTPEDTGVYYCARDRLQDGNSWSDAFDVWGQGTMVTVSSLEDLKNVFPPEVAVFEPSEAEISHTQKATLVCLATGFYPDHVELSWWVNGKEVHSGVCTDPQPLKEQPALNDSRYCLSSRLRVSATFWQNPRNHFRCQVQFYGLSENDEWTQDRAKPVTQIVSAEAWGRADCGFTSESYQQGVLSATILYEILLGKATLYAVLVSALVLMAMVKRKDSRGRAKRSGSGATNFSLLKQAGDVEENPGPTSMDWIWRILFLVGAATGAHSGPQLQLQESGPGLVKPSETLSLTCTVSGDSISSGDYYWGWIRQPPGKGLEWIGHIYYSGVTYYNPSLKSRVTISVDTSRNQFSLKLSSVTAADTAVYYCTREDSSNWRSRGQGTLVTVSSGSGGGGSGGGGSGGGGSFEQSALTQPASVSGSPGQSITISCTGTSSDVGGYNYVSWYQQHPGKAPKLMIYDVSNRPSGVSNRFSGSKSGNTASLTISGLQAEDEADYYCSSYTSSSTLVYVFGTGTKVTVLTRIQNPDPAVYQLRDSKSSDKSVCLFTDFDSQTNVSQSKDSDVYITDKCVLDMRSMDFKSNSAVAWSNKSDFACANAFNNSIIPEDTFFPSPESSCDVKLVEKSFETDTNLNFQNLSVIGFRILLLKVAGFNLLMTLRLWSS

SEQ ID NO: 13170 - protein, 882 aa, Artificial Sequence
  Synthetic Polypeptide
MALPVTALLLPLALLLHAARPEVQLVESGGGLVQPGGSLRLSCAASGFSFSDFWMSWVRQAPGKGLEWVATISQAGSEKDYVDSVKGRFTISRDNAKKSLYLQMNSLRAEDTAVYYCASGVYSFDYRGQGTLVTVSSGTGGGGSGGGGSGGGGSEFQVQLVQSGAEVKKPGASVKVSCKASGYTFTSYDINWVRQATGQGLEWMGWMNPNSGNTGYAQKFQGRVTMTRNTSISTAYMELSSLRSEDTAVYYCARGDSTKVEIKLEDLKNVFPPEVAVFEPSEAEISHTQKATLVCLATGFYPDHVELSWWVNGKEVHSGVCTDPQPLKEQPALNDSRYCLSSRLRVSATFWQNPRNHFRCQVQFYGLSENDEWTQDRAKPVTQIVSAEAWGRADCGFTSESYQQGVLSATILYEILLGKATLYAVLVSALVLMAMVKRKDSRGRAKRSGSGATNFSLLKQAGDVEENPGPTSMDWIWRILFLVGAATGAHSGPQLQLQESGPGLVKPSETLSLTCTVSGDSISSGDYYWGWIRQPPGKGLEWIGHIYYSGVTYYNPSLKSRVTISVDTSRNQFSLKLSSVTAADTAVYYCTREDSSNWRSRGQGTLVTVSSGSGGGGSGGGGSGGGGSFEQSVLTQPRSVSGSPGQSVTISCTGTSSDVGGYNYVSWYQQHPGEAPKLIIYDADKRPSGISNRFSSGKSGNTASLTISGLQVEDEADYYCCSYAGGSTWVFGGGTKVTVLTRIQNPDPAVYQLRDSKSSDKSVCLFTDFDSQTNVSQSKDSDVYITDKCVLDMRSMDFKSNSAVAWSNKSDFACANAFNNSIIPEDTFFPSPESSCDVKLVEKSFETDTNLNFQNLSVIGFRILLLKVAGFNLLMTLRLWSS

SEQ ID NO: 13171 - protein, 904 aa, Artificial Sequence
  Synthetic Polypeptide
MALPVTALLLPLALLLHAARPEVQLVESGGGLVQPGGSLRLSCAASGFSFSDFWMSWVRQAPGKGLEWVATISQAGSEKDYVDSVKGRFTISRDNAKKSLYLQMNSLRAEDTAVYYCASGVYSFDYRGQGTLVTVSSGTGGGGSGGGGSGGGGSEFEVQLQQSGPGLVKPSQTLSLTCAISGDSVSSNSAAWNWIRQSPSRGLEWLGRTYYRSKWYSDYAVSVKSRITINPDTSKNQFSLQLNSVTPEDTAVYYCARDPYDFWSGYPDAFDIWGQGTMVTVSSLEDLKNVFPPEVAVFEPSEAEISHTQKATLVCLATGFYPDHVELSWWVNGKEVHSGVCTDPQPLKEQPALNDSRYCLSSRLRVSATFWQNPRNHFRCQVQFYGLSENDEWTQDRAKPVTQIVSAEAWGRADCGFTSESYQQGVLSATILYEILLGKATLYAVLVSALVLMAMVKRKDSRGRAKRSGSGATNFSLLKQAGDVEENPGPTSMDWIWRILFLVGAATGAHSGPQLQLQESGPGLVKPSETLSLTCTVSGDSISSGDYYWGWIRQPPGKGLEWIGHIYYSGVTYYNPSLKSRVTISVDTSRNQFSLKLSSVTAADTAVYYCTREDSSNWRSRGQGTLVTVSSGSGGGGSGGGGSGGGGSFEQSALTQPASVSGSPGQSITISCTGTSSDVGGYNYVSWYQQHPGKAPKVIISEVNNRPSGVSHRFSGSKSGNTASLTISGLQAEDEADYFCSSYTSGRTLYVFGTGSKVTVLGTRIQNPDPAVYQLRDSKSSDKSVCLFTDFDSQTNVSQSKDSDVYITDKCVLDMRSMDFKSNSAVAWSNKSDFACANAFNNSIIPEDTFFPSPESSCDVKLVEKSFETDTNLNFQNLSVIGFRILLLKVAGFNLLMTLRLWSS

SEQ ID NO: 13172 - protein, 903 aa, Artificial Sequence
  Synthetic Polypeptide
MALPVTALLLPLALLLHAARPEVQLVESGGGLVQPGGSLRLSCAASGFSFSDFWMSWVRQAPGKGLEWVATISQAGSEKDYVDSVKGRFTISRDNAKKSLYLQMNSLRAEDTAVYYCASGVYSFDYRGQGTLVTVSSGTGGGGSGGGGSGGGGSEFQSALTQPASASGSPGQSVTISCTGTSSDVGGYNYVSWYQQHPGKAPKLMIYDVSNRPSGVSNRFSGSKSGNTASLTISGLQAEDEADYYCSSYTSSSTLYVFGTGTQLTVLLEDLKNVFPPEVAVFEPSEAEISHTQKATLVCLATGFYPDHVELSWWVNGKEVHSGVCTDPQPLKEQPALNDSRYCLSSRLRVSATFWQNPRNHFRCQVQFYGLSENDEWTQDRAKPVTQIVSAEAWGRADCGFTSESYQQGVLSATILYEILLGKATLYAVLVSALVLMAMVKRKDSRGRAKRSGSGATNFSLLKQAGDVEENPGPTSMDWIWRILFLVGAATGAHSGPQLQLQESGPGLVKPSETLSLTCTVSGDSISSGDYYWGWIRQPPGKGLEWIGHIYYSGVTYYNPSLKSRVTISVDTSRNQFSLKLSSVTAADTAVYYCTREDSSNWRSRGQGTLVTVSSGSGGGGSGGGGSGGGGSFEEVQLQQSGPGLVKPSQTLSLTCAISGDSMLSNSDTWNWIRQSPSRGLEWLGRTYHRSTWYDDYASSVRGRVSINVDTSKNQYSLQLNAVTPEDTGVYYCARVRLQDGNSWSDAFDVWGQGTMVTVSSTRIQNPDPAVYQLRDSKSSDKSVCLFTDFDSQTNVSQSKDSDVYITDKCVLDMRSMDFKSNSAVAWSNKSDFACANAFNNSIIPEDTFFPSPESSCDVKLVEKSFETDTNLNFQNLSVIGFRILLLKVAGFNLLMTLRLWSS

SEQ ID NO: 13173 - protein, 903 aa, Artificial Sequence
  Synthetic Polypeptide
MALPVTALLLPLALLLHAARPEVQLVESGGGLVQPGGSLRLSCAASGFSFSDFWMSWVRQAPGKGLEWVATISQAGSEKDYVDSVKGRFTISRDNAKKSLYLQMNSLRAEDTAVYYCASGVYSFDYRGQGTLVTVSSGTGGGGSGGGGSGGGGSEFDVMLTQTPLSLPVSLGDQASISCRSSQSILHSTGDTYLEWYLQKPGQSPKLLINKVSNRLSGVPDRFSGSGSGTDFTLKISRVEAEDLGVYYCFQGSHVPWTFGGGTKLEIKRADAAPTVSIFPLEDLKNVFPPEVAVFEPSEAEISHTQKATLVCLATGFYPDHVELSWWVNGKEVHSGVCTDPQPLKEQPALNDSRYCLSSRLRVSATFWQNPRNHFRCQVQFYGLSENDEWTQDRAKPVTQIVSAEAWGRADCGFTSESYQQGVLSATILYEILLGKATLYAVLVSALVLMAMVKRKDSRGRAKRSGSGATNFSLLKQAGDVEENPGPTSMDWIWRILFLVGAATGAHSGPQLQLQESGPGLVKPSETLSLTCTVSGDSISSGDYYWGWIRQPPGKGLEWIGHIYYSGVTYYNPSLKSRVTISVDTSRNQFSLKLSSVTAADTAVYYCTREDSSNWRSRGQGTLVTVSSGSGGGGSGGGGSGGGGSFEQVKLQQSGPSLVKPGASVKMSCKASGYTFTDFYMKWVKQSHGKSLEWIGDINPNIGDTFYNQKFKGKATLTVDKSSSTAYMQLNSLTSEDSAVYFCSVGYFDVWGAGTTVTVSSTRIQNPDPAVYQLRDSKSSDKSVCLFTDFDSQTNVSQSKDSDVYITDKCVLDMRSMDFKSNSAVAWSNKSDFACANAFNNSIIPEDTFFPSPESSCDVKLVEKSFETDTNLNFQNLSVIGFRILLLKVAGFNLLMTLRLWSS

SEQ ID NO: 13174 - protein, 899 aa, Artificial Sequence
  Synthetic Polypeptide
MALPVTALLLPLALLLHAARPEVQLVESGGGLVQPGGSLRLSCAASGFSFSDFWMSWVRQAPGKGLEWVATISQAGSEKDYVDSVKGRFTISRDNAKKSLYLQMNSLRAEDTAVYYCASGVYSFDYRGQGTLVTVSSGTGGGGSGGGGSGGGGSEFEIVLTQSPATLSLSPGERATLSCRASQSVSIYLAWYQQKPGQAPRLLIYDASNRATGIPARFSGSGSGTDFTLTISSLEPEDFAVYYCQQRSNWPPFTFGPGTKVDIKLEDLKNVFPPEVAVFEPSEAEISHTQKATLVCLATGFYPDHVELSWWVNGKEVHSGVCTDPQPLKEQPALNDSRYCLSSRLRVSATFWQNPRNHFRCQVQFYGLSENDEWTQDRAKPVTQIVSAEAWGRADCGFTSESYQQGVLSATILYEILLGKATLYAVLVSALVLMAMVKRKDSRGRAKRSGSGATNFSLLKQAGDVEENPGPTSMDWIWRILFLVGAATGAHSGPQLQLQESGPGLVKPSETLSLTCTVSGDSISSGDYYWGWIRQPPGKGLEWIGHIYYSGVTYYNPSLKSRVTISVDTSRNQFSLKLSSVTAADTAVYYCTREDSSNWRSRGQGTLVTVSSGSGGGGSGGGGSGGGGSFEQVQLVESGGGVVQPGRSLRLSCAASGFTFSSYGMHWVRQAPGKGLEWVAVIWDDGSNKYYVDSVKGRFTISRDNSKNTLYLQMNSLRAEDTAVYYCARDDYYGSGSFNSYYGTDVWGQGTTVTVSSTRIQNPDPAVYQLRDSKSSDKSVCLFTDFDSQTNVSQSKDSDVYITDKCVLDMRSMDFKSNSAVAWSNKSDFACANAFNNSIIPEDTFFPSPESSCDVKLVEKSFETDTNLNFQNLSVIGFRILLLKVAGFNLLMTLRLWSS

SEQ ID NO: 13175 - protein, 884 aa, Artificial Sequence
  Synthetic Polypeptide
MALPVTALLLPLALLLHAARPEVQLVESGGGLVQPGGSLRLSCAASGFSFSDFWMSWVRQAPGKGLEWVATISQAGSEKDYVDSVKGRFTISRDNAKKSLYLQMNSLRAEDTAVYYCASGVYSFDYRGQGTLVTVSSGTGGGGSGGGGSGGGGSEFDIQMTQSPSSLSASVGDRVTITCRASQGISSWLAWYQQKPEKAPKSLIYAASSLQSGVPSRFSGSGSGTDFTLTISSLQPEDFATYYCQQYNSYPYTFGQGTKLEIKLEDLKNVFPPEVAVFEPSEAEISHTQKATLVCLATGFYPDHVELSWWVNGKEVHSGVCTDPQPLKEQPALNDSRYCLSSRLRVSATFWQNPRNHFRCQVQFYGLSENDEWTQDRAKPVTQIVSAEAWGRADCGFTSESYQQGVLSATILYEILLGKATLYAVLVSALVLMAMVKRKDSRGRAKRSGSGATNFSLLKQAGDVEENPGPTSMDWIWRILFLVGAATGAHSGPQLQLQESGPGLVKPSETLSLTCTVSGDSISSGDYYWGWIRQPPGKGLEWIGHIYYSGVTYYNPSLKSRVTISVDTSRNQFSLKLSSVTAADTAVYYCTREDSSNWRSRGQGTLVTVSSGSGGGGSGGGGSGGGGSFEEVQLVQSGGGLVHPGGSLRLSCAGSGFTFSTYLMYWVRQAPGKTLEWVSAIGSGGDTYYADSVKGRFTISRDNAKNSLYLQMNSLRAEDMAVYYCARGLGYWGQGTLVTVSSTRIQNPDPAVYQLRDSKSSDKSVCLFTDFDSQTNVSQSKDSDVYITDKCVLDMRSMDFKSNSAVAWSNKSDFACANAFNNSIIPEDTFFPSPESSCDVKLVEKSFETDTNLNFQNLSVIGFRILLLKVAGFNLLMTLRLWSS

SEQ ID NO: 13176 - protein, 903 aa, Artificial Sequence
  Synthetic Polypeptide
MALPVTALLLPLALLLHAARPEVQLVESGGGLVQPGGSLRLSCAASGFSFSDFWMSWVRQAPGKGLEWVATISQAGSEKDYVDSVKGRFTISRDNAKKSLYLQMNSLRAEDTAVYYCASGVYSFDYRGQGTLVTVSSGTGGGGSGGGGSGGGGSEFLPVLTQPPSVSVAPGKTARITCGGNNIGSKSVHWYQQKPGQAPVLVVYDDSDRPSGIPERFSGSNSGNTATLTISRVEAGDEADYYCQVWDSSSDYVVFGGGTKLTVLLEDLKNVFPPEVAVFEPSEAEISHTQKATLVCLATGFYPDHVELSWWVNGKEVHSGVCTDPQPLKEQPALNDSRYCLSSRLRVSATFWQNPRNHFRCQVQFYGLSENDEWTQDRAKPVTQIVSAEAWGRADCGFTSESYQQGVLSATILYEILLGKATLYAVLVSALVLMAMVKRKDSRGRAKRSGSGATNFSLLKQAGDVEENPGPTSMDWIWRILFLVGAATGAHSGPQLQLQESGPGLVKPSETLSLTCTVSGDSISSGDYYWGWIRQPPGKGLEWIGHIYYSGVTYYNPSLKSRVTISVDTSRNQFSLKLSSVTAADTAVYYCTREDSSNWRSRGQGTLVTVSSGSGGGGSGGGGSGGGGSFEEVQLVQSGAEVKKPGESLKISCKGSGYSFTSYWIGWVRQMPGKGLEWMGIIYPGDSDTRYSPSFQGQVTISADKSISTAYLQWSSLKASDTAMYYCARQVWGWQGGMYPRSNWWYNLDSWGQGTLVTVSSTRIQNPDPAVYQLRDSKSSDKSVCLFTDFDSQTNVSQSKDSDVYITDKCVLDMRSMDFKSNSAVAWSNKSDFACANAFNNSIIPEDTFFPSPESSCDVKLVEKSFETDTNLNFQNLSVIGFRILLLKVAGFNLLMTLRLWSS

SEQ ID NO: 13177 - protein, 896 aa, Artificial Sequence
  Synthetic Polypeptide
MALPVTALLLPLALLLHAARPEVQLVESGGGLVQPGGSLRLSCAASGFSFSDFWMSWVRQAPGKGLEWVATISQAGSEKDYVDSVKGRFTISRDNAKKSLYLQMNSLRAEDTAVYYCASGVYSFDYRGQGTLVTVSSGTGGGGSGGGGSGGGGSEFELVMTQSPASLAVSLGQRATISCRASESVDSYGKSFMHWYQLKPGQPPKLLIYRASNLESGVPARFSGSGSRTDFTLTIDPVEADDAATYYCQQNNEDPWTFGGGTKLEIKLEDLKNVFPPEVAVFEPSEAEISHTQKATLVCLATGFYPDHVELSWWVNGKEVHSGVCTDPQPLKEQPALNDSRYCLSSRLRVSATFWQNPRNHFRCQVQFYGLSENDEWTQDRAKPVTQIVSAEAWGRADCGFTSESYQQGVLSATILYEILLGKATLYAVLVSALVLMAMVKRKDSRGRAKRSGSGATNFSLLKQAGDVEENPGPTSMDWIWRILFLVGAATGAHSGPQLQLQESGPGLVKPSETLSLTCTVSGDSISSGDYYWGWIRQPPGKGLEWIGHIYYSGVTYYNPSLKSRVTISVDTSRNQFSLKLSSVTAADTAVYYCTREDSSNWRSRGQGTLVTVSSGSGGGGSGGGGSGGGGSFEEVQLEQSGPELVKPGASVKMSCKASGYTFTNYYMKWVKQSHGKSLEWIGDLNPNNGDTFYNQKFKGKATLTVDKSSNTAYMQLNSLTSEDSAVYYCARTGRYEENAMDYWGQGTSVTVSSTRIQNPDPAVYQLRDSKSSDKSVCLFTDFDSQTNVSQSKDSDVYITDKCVLDMRSMDFKSNSAVAWSNKSDFACANAFNNSIIPEDTFFPSPESSCDVKLVEKSFETDTNLNFQNLSVIGFRILLLKVAGFNLLMTLRLWSS

SEQ ID NO: 13178 - protein, 890 aa, Artificial Sequence
  Synthetic Polypeptide
MALPVTALLLPLALLLHAARPEVQLVESGGGLVQPGGSLRLSCAASGFSFSDFWMSWVRQAPGKGLEWVATISQAGSEKDYVDSVKGRFTISRDNAKKSLYLQMNSLRAEDTAVYYCASGVYSFDYRGQGTLVTVSSGTGGGGSGGGGSGGGGSEFDVVMTQSPSSLSASVGDRVTITCMASEDIYIRLAWYQQKPGNAPKLLIYAATSLETGVPSRFSGSGSGTDFTLTISSLQPEDFATYYCQQYWSSPWTFGGGTKVEIKLEDLKNVFPPEVAVFEPSEAEISHTQKATLVCLATGFYPDHVELSWWVNGKEVHSGVCTDPQPLKEQPALNDSRYCLSSRLRVSATFWQNPRNHFRCQVQFYGLSENDEWTQDRAKPVTQIVSAEAWGRADCGFTSESYQQGVLSATILYEILLGKATLYAVLVSALVLMAMVKRKDSRGRAKRSGSGATNFSLLKQAGDVEENPGPTSMDWIWRILFLVGAATGAHSGPQLQLQESGPGLVKPSETLSLTCTVSGDSISSGDYYWGWIRQPPGKGLEWIGHIYYSGVTYYNPSLKSRVTISVDTSRNQFSLKLSSVTAADTAVYYCTREDSSNWRSRGQGTLVTVSSGSGGGGSGGGGSGGGGSFEQVQLQESGPGLVKPSQTLSLTCTVSGYSITSDYTWNWIRQPPGNGLEWIGYITYSGSTSYNPSLKSRVLISVDTSKNQVSLKLSSVTAADTAVYYCARLGRRYTMDYWGQGTTVTVSSTRIQNPDPAVYQLRDSKSSDKSVCLFTDFDSQTNVSQSKDSDVYITDKCVLDMRSMDFKSNSAVAWSNKSDFACANAFNNSIIPEDTFFPSPESSCDVKLVEKSFETDTNLNFQNLSVIGFRILLLKVAGFNLLMTLRLWSS

SEQ ID NO: 13179 - protein, 894 aa, Artificial Sequence; identical to SEQ ID NO: 13042
  Synthetic Polypeptide

SEQ ID NO: 13180 - protein, 894 aa, Artificial Sequence
  Synthetic Polypeptide
MALPVTALLLPLALLLHAARPEVQLVESGGGLVQPGGSLRLSCAASGFSFSDFWMSWVRQAPGKGLEWVATISQAGSEKDYVDSVKGRFTISRDNAKKSLYLQMNSLRAEDTAVYYCASGVYSFDYRGQGTLVTVSSGTGGGGSGGGGSGGGGSEFDIVLTQSPATLSLSPGDRATLSCRASESVTILGSHLIYWYQQKPGQAPRLLIQLASNVQTGIPARFSGSGSRTDFTLTISSLEPEDFAVYYCLQSRTIPRTFGQGTKLEIKRLEDLKNVFPPEVAVFEPSEAEISHTQKATLVCLATGFYPDHVELSWWVNGKEVHSGVCTDPQPLKEQPALNDSRYCLSSRLRVSATFWQNPRNHFRCQVQFYGLSENDEWTQDRAKPVTQIVSAEAWGRADCGFTSESYQQGVLSATILYEILLGKATLYAVLVSALVLMAMVKRKDSRGRAKRSGSGATNFSLLKQAGDVEENPGPTSMDWIWRILFLVGAATGAHSGPQLQLQESGPGLVKPSETLSLTCTVSGDSISSGDYYWGWIRQPPGKGLEWIGHIYYSGVTYYNPSLKSRVTISVDTSRNQFSLKLSSVTAADTAVYYCTREDSSNWRSRGQGTLVTVSSGSGGGGSGGGGSGGGGSFEQVQLVQSGSELKKPGESVKISCKASGYTFTHYSMNWVRQAPGQGLEWMGRINTETGEPLYADDFKGRFVFSLDTSASTAYLQISSLKAEDTAVYYCSNDYLYSLDYWGQGTLVTVSSTRIQNPDPAVYQLRDSKSSDKSVCLFTDFDSQTNVSQSKDSDVYITDKCVLDMRSMDFKSNSAVAWSNKSDFACANAFNNSIIPEDTFFPSPESSCDVKLVEKSFETDTNLNFQNLSVIGFRILLLKVAGFNLLMTLRLWSS

SEQ ID NO: 13181 - protein, 895 aa, Artificial Sequence
  Synthetic Polypeptide
MALPVTALLLPLALLLHAARPEVQLVESGGGLVQPGGSLRLSCAASGFSFSDFWMSWVRQAPGKGLEWVATISQAGSEKDYVDSVKGRFTISRDNAKKSLYLQMNSLRAEDTAVYYCASGVYSFDYRGQGTLVTVSSGTGGGGSGGGGSGGGGSEFDIQLTQSPSFLSASVGDRVTITCRASQGISTDLNWYQQKPGKAPKLLIYAASNLESGVPSRFSGSGSGTEFTLTISSLQPEDFATYYCQQSYNWPYTFGGGTKVEIKRLEDLKNVFPPEVAVFEPSEAEISHTQKATLVCLATGFYPDHVELSWWVNGKEVHSGVCTDPQPLKEQPALNDSRYCLSSRLRVSATFWQNPRNHFRCQVQFYGLSENDEWTQDRAKPVTQIVSAEAWGRADCGFTSESYQQGVLSATILYEILLGKATLYAVLVSALVLMAMVKRKDSRGRAKRSGSGATNFSLLKQAGDVEENPGPTSMDWIWRILFLVGAATGAHSGPQLQLQESGPGLVKPSETLSLTCTVSGDSISSGDYYWGWIRQPPGKGLEWIGHIYYSGVTYYNPSLKSRVTISVDTSRNQFSLKLSSVTAADTAVYYCTREDSSNWRSRGQGTLVTVSSGSGGGGSGGGGSGGGGSFEEVQLVESGGGLVKPGGSLRLSCAASGFTFSNFEMNWVRQAPGKGLEWVSGISSNGRYINYADSVKGRFTISRDNAKNSLYLQMNSLRAEDTAVYYCARVVDFDQDYNGFDYWGQGTLVTVSSTRIQNPDPAVYQLRDSKSSDKSVCLFTDFDSQTNVSQSKDSDVYITDKCVLDMRSMDFKSNSAVAWSNKSDFACANAFNNSIIPEDTFFPSPESSCDVKLVEKSFETDTNLNFQNLSVIGFRILLLKVAGFNLLMTLRLWSS

SEQ ID NO: 13182 - protein, 893 aa, Artificial Sequence
  Synthetic Polypeptide
MALPVTALLLPLALLLHAARPEVQLVESGGGLVQPGGSLRLSCAASGFSFSDFWMSWVRQAPGKGLEWVATISQAGSEKDYVDSVKGRFTISRDNAKKSLYLQMNSLRAEDTAVYYCASGVYSFDYRGQGTLVTVSSGTGGGGSGGGGSGGGGSEFDIQLTQSPSFLSASVGDRVTITCSLSLGISTWRDWFPPRLGRGLEPLTYAASTLQSGVPSRFSGSGSGTEFTLTISSLQPEDFATYYCQQLNSYPLTFGGGTKVEIKRLEDLKNVFPPEVAVFEPSEAEISHTQKATLVCLATGFYPDHVELSWWVNGKEVHSGVCTDPQPLKEQPALNDSRYCLSSRLRVSATFWQNPRNHFRCQVQFYGLSENDEWTQDRAKPVTQIVSAEAWGRADCGFTSESYQQGVLSATILYEILLGKATLYAVLVSALVLMAMVKRKDSRGRAKRSGSGATNFSLLKQAGDVEENPGPTSMDWIWRILFLVGAATGAHSGPQLQLQESGPGLVKPSETLSLTCTVSGDSISSGDYYWGWIRQPPGKGLEWIGHIYYSGVTYYNPSLKSRVTISVDTSRNQFSLKLSSVTAADTAVYYCTREDSSNWRSRGQGTLVTVSSGSGGGGSGGGGSGGGGSFEEVQLVESGGGLVKPGGSLRLSCAASGFTFSTYGMSWVRQAPGKGLEWVAYINNGSGYIYYADSVKGRFTISRDNAKNSLYLQMNSLRAEDTAVYYCARGQWWSGGDFDYWGQGTLVTVSSTRIQNPDPAVYQLRDSKSSDKSVCLFTDFDSQTNVSQSKDSDVYITDKCVLDMRSMDFKSNSAVAWSNKSDFACANAFNNSIIPEDTFFPSPESSCDVKLVEKSFETDTNLNFQNLSVIGFRILLLKVAGFNLLMTLRLWSS

SEQ ID NO: 13183 - protein, 894 aa, Artificial Sequence
  Synthetic Polypeptide
MALPVTALLLPLALLLHAARPEVQLVESGGGLVQPGGSLRLSCAASGFSFSDFWMSWVRQAPGKGLEWVATISQAGSEKDYVDSVKGRFTISRDNAKKSLYLQMNSLRAEDTAVYYCASGVYSFDYRGQGTLVTVSSGTGGGGSGGGGSGGGGSEFEIVLTQSPATLSLSPGERATLSCSASSSVSYMYWYQQKPGQAPRLLIYRTSNLASGIPARFSGSGSGTDFTLTISSLEPEDFAVYYCQQYHSYPTTFGQGTKVEIKRTVLEDLKNVFPPEVAVFEPSEAEISHTQKATLVCLATGFYPDHVELSWWVNGKEVHSGVCTDPQPLKEQPALNDSRYCLSSRLRVSATFWQNPRNHFRCQVQFYGLSENDEWTQDRAKPVTQIVSAEAWGRADCGFTSESYQQGVLSATILYEILLGKATLYAVLVSALVLMAMVKRKDSRGRAKRSGSGATNFSLLKQAGDVEENPGPTSMDWIWRILFLVGAATGAHSGPQLQLQESGPGLVKPSETLSLTCTVSGDSISSGDYYWGWIRQPPGKGLEWIGHIYYSGVTYYNPSLKSRVTISVDTSRNQFSLKLSSVTAADTAVYYCTREDSSNWRSRGQGTLVTVSSGSGGGGSGGGGSGGGGSFEEVQLVESGGGLVQPGGSLRLSCAASGFSFNTYAMNWVRQAPGKGLEWVSHIRSKSNNFATYYADSVKDRFTISRDNAKNSLYLQMNSLRAEDTAVYYCARQGGDFPMDYWGQGTLVTVSSTRIQNPDPAVYQLRDSKSSDKSVCLFTDFDSQTNVSQSKDSDVYITDKCVLDMRSMDFKSNSAVAWSNKSDFACANAFNNSIIPEDTFFPSPESSCDVKLVEKSFETDTNLNFQNLSVIGFRILLLKVAGFNLLMTLRLWSS

SEQ ID NO: 13184 - protein, 890 aa, Artificial Sequence
  Synthetic Polypeptide
MALPVTALLLPLALLLHAARPEVQLVESGGGLVQPGGSLRLSCAASGFSFSDFWMSWVRQAPGKGLEWVATISQAGSEKDYVDSVKGRFTISRDNAKKSLYLQMNSLRAEDTAVYYCASGVYSFDYRGQGTLVTVSSGTGGGGSGGGGSGGGGSEFDVVMTQSPSSLSASVGDRVTITCKASEDIYIRLAWYQQKPGKAPKLLIYAATSLETGVPSRFSGSGSGTDFTLTISSLQPEDFATYYCQQYWTTPWTFGGGTKVEIKLEDLKNVFPPEVAVFEPSEAEISHTQKATLVCLATGFYPDHVELSWWVNGKEVHSGVCTDPQPLKEQPALNDSRYCLSSRLRVSATFWQNPRNHFRCQVQFYGLSENDEWTQDRAKPVTQIVSAEAWGRADCGFTSESYQQGVLSATILYEILLGKATLYAVLVSALVLMAMVKRKDSRGRAKRSGSGATNFSLLKQAGDVEENPGPTSMDWIWRILFLVGAATGAHSGPQLQLQESGPGLVKPSETLSLTCTVSGDSISSGDYYWGWIRQPPGKGLEWIGHIYYSGVTYYNPSLKSRVTISVDTSRNQFSLKLSSVTAADTAVYYCTREDSSNWRSRGQGTLVTVSSGSGGGGSGGGGSGGGGSFEQVQLQESGPGLVKPSQTLSLTCTVSGYSITIDYTWNWIRQPPGKGLEWIGYITYSGSTDYNPSLKSRVLISVDTSKNQVSLKLSSVTAADTAVYYCARLGRRYALDYWGQGTTVTVSSTRIQNPDPAVYQLRDSKSSDKSVCLFTDFDSQTNVSQSKDSDVYITDKCVLDMRSMDFKSNSAVAWSNKSDFACANAFNNSIIPEDTFFPSPESSCDVKLVEKSFETDTNLNFQNLSVIGFRILLLKVAGFNLLMTLRLWSS

SEQ ID NO: 13185 - protein, 895 aa, Artificial Sequence
  Synthetic Polypeptide
MALPVTALLLPLALLLHAARPEVQLVESGGGLVQPGGSLRLSCAASGFSFSDFWMSWVRQAPGKGLEWVATISQAGSEKDYVDSVKGRFTISRDNAKKSLYLQMNSLRAEDTAVYYCASGVYSFDYRGQGTLVTVSSGTGGGGSGGGGSGGGGSEFDIQMTQTTSSLSASLGDRVTISCRASQDISNYLNWYQQKPDGTVKLLIYYTSILHSGVPSRFSGSGSGTDYSLTISNLEQEDFATYFCQQGNTLPWTFGGGTKLEIKALEDLKNVFPPEVAVFEPSEAEISHTQKATLVCLATGFYPDHVELSWWVNGKEVHSGVCTDPQPLKEQPALNDSRYCLSSRLRVSATFWQNPRNHFRCQVQFYGLSENDEWTQDRAKPVTQIVSAEAWGRADCGFTSESYQQGVLSATILYEILLGKATLYAVLVSALVLMAMVKRKDSRGRAKRSGSGATNFSLLKQAGDVEENPGPTSMDWIWRILFLVGAATGAHSGPQLQLQESGPGLVKPSETLSLTCTVSGDSISSGDYYWGWIRQPPGKGLEWIGHIYYSGVTYYNPSLKSRVTISVDTSRNQFSLKLSSVTAADTAVYYCTREDSSNWRSRGQGTLVTVSSGSGGGGSGGGGSGGGGSFEEVQLVESGGGLVKPGGSLKLSCAASGFAFSIYDMSWVRQTPEKRLEWVAYISSGGGTYYPDTVKGRFTISRDNAKNTLYLQMSSLKSEDTAMYYCARHSGYGTHWGVLFAYWGQGTLVTVSATRIQNPDPAVYQLRDSKSSDKSVCLFTDFDSQTNVSQSKDSDVYITDKCVLDMRSMDFKSNSAVAWSNKSDFACANAFNNSIIPEDTFFPSPESSCDVKLVEKSFETDTNLNFQNLSVIGFRILLLKVAGFNLLMTLRLWSS

SEQ ID NO: 13186 - protein, 905 aa, Artificial Sequence
  Synthetic Polypeptide
MALPVTALLLPLALLLHAARPEVQLVESGGGLVQPGGSLRLSCAASGFSFSDFWMSWVRQAPGKGLEWVATISQAGSEKDYVDSVKGRFTISRDNAKKSLYLQMNSLRAEDTAVYYCASGVYSFDYRGQGTLVTVSSGTGGGGSGGGGSGGGGSEFDIVMTQSPDSLAVSLGERATINCKSSQSLLYRSNQKNYLAWYQQKPGQPPKLLIYWASTRESGVPDRFSGSGSGTDFTLTISSLQAEDVAVYYCQQYYNYPRTFGQGTKVEIKRTVLEDLKNVFPPEVAVFEPSEAEISHTQKATLVCLATGFYPDHVELSWWVNGKEVHSGVCTDPQPLKEQPALNDSRYCLSSRLRVSATFWQNPRNHFRCQVQFYGLSENDEWTQDRAKPVTQIVSAEAWGRADCGFTSESYQQGVLSATILYEILLGKATLYAVLVSALVLMAMVKRKDSRGRAKRSGSGATNFSLLKQAGDVEENPGPTSMDWIWRILFLVGAATGAHSGPQLQLQESGPGLVKPSETLSLTCTVSGDSISSGDYYWGWIRQPPGKGLEWIGHIYYSGVTYYNPSLKSRVTISVDTSRNQFSLKLSSVTAADTAVYYCTREDSSNWRSRGQGTLVTVSSGSGGGGSGGGGSGGGGSFEEVQLLESGGGLVQPGGSLRLSCAASGYSITSDYAWNWVRQAPGKGLEWVSYISNSGSTSYNPSLKSRFTISRDNSKNTLYLQMNSLRAEDTAVYYCAKERNYDYDDYYYAMDYWGQGTLVTVSSTRIQNPDPAVYQLRDSKSSDKSVCLFTDFDSQTNVSQSKDSDVYITDKCVLDMRSMDFKSNSAVAWSNKSDFACANAFNNSIIPEDTFFPSPESSCDVKLVEKSFETDTNLNFQNLSVIGFRILLLKVAGFNLLMTLRLWSS

SEQ ID NO: 13187 - protein, 898 aa, Artificial Sequence
  Synthetic Polypeptide
MALPVTALLLPLALLLHAARPEVQLVESGGGLVQPGGSLRLSCAASGFSFSDFWMSWVRQAPGKGLEWVATISQAGSEKDYVDSVKGRFTISRDNAKKSLYLQMNSLRAEDTAVYYCASGVYSFDYRGQGTLVTVSSGTGGGGSGGGGSGGGGSEFDVVMTQSPLSLPVTLGQPASISCRSSQSLLHSSGNTYLEWYQQRPGQSPRPLIYKISTRFSGVPDRFSGSGSGTDFTLKISRVEAEDVGVYYCFQGSHVPYTFGGGTKVEIKRLEDLKNVFPPEVAVFEPSEAEISHTQKATLVCLATGFYPDHVELSWWVNGKEVHSGVCTDPQPLKEQPALNDSRYCLSSRLRVSATFWQNPRNHFRCQVQFYGLSENDEWTQDRAKPVTQIVSAEAWGRADCGFTSESYQQGVLSATILYEILLGKATLYAVLVSALVLMAMVKRKDSRGRAKRSGSGATNFSLLKQAGDVEENPGPTSMDWIWRILFLVGAATGAHSGPQLQLQESGPGLVKPSETLSLTCTVSGDSISSGDYYWGWIRQPPGKGLEWIGHIYYSGVTYYNPSLKSRVTISVDTSRNQFSLKLSSVTAADTAVYYCTREDSSNWRSRGQGTLVTVSSGSGGGGSGGGGSGGGGSFEQVQLVQSGAEVKKPGASVKVSCKASGLTIEDYYMHWVRQAPGQGLEWMGWIDPENGDTEYGPKFQGRVTMTRDTSINTAYMELSRLRSDDTAVYYCAVHNAHYGTWFAYWGQGTLVTVSSTRIQNPDPAVYQLRDSKSSDKSVCLFTDFDSQTNVSQSKDSDVYITDKCVLDMRSMDFKSNSAVAWSNKSDFACANAFNNSIIPEDTFFPSPESSCDVKLVEKSFETDTNLNFQNLSVIGFRILLLKVAGFNLLMTLRLWSS

SEQ ID NO: 13188 - protein, 890 aa, Artificial Sequence
  Synthetic Polypeptide
MALPVTALLLPLALLLHAARPEVQLVESGGGLVQPGGSLRLSCAASGFSFSDFWMSWVRQAPGKGLEWVATISQAGSEKDYVDSVKGRFTISRDNAKKSLYLQMNSLRAEDTAVYYCASGVYSFDYRGQGTLVTVSSGTGGGGSGGGGSGGGGSEFDIQMTQSPSSLSASVGDRVTITCRASENIYSNLAWYQQKPGKAPKLLIYAATNLADGVPSRFSGSGSGTDFTLTISSLQPEDFATYYCQHFWGTPTFGQGTKVEIKRTVLEDLKNVFPPEVAVFEPSEAEISHTQKATLVCLATGFYPDHVELSWWVNGKEVHSGVCTDPQPLKEQPALNDSRYCLSSRLRVSATFWQNPRNHFRCQVQFYGLSENDEWTQDRAKPVTQIVSAEAWGRADCGFTSESYQQGVLSATILYEILLGKATLYAVLVSALVLMAMVKRKDSRGRAKRSGSGATNFSLLKQAGDVEENPGPTSMDWIWRILFLVGAATGAHSGPQLQLQESGPGLVKPSETLSLTCTVSGDSISSGDYYWGWIRQPPGKGLEWIGHIYYSGVTYYNPSLKSRVTISVDTSRNQFSLKLSSVTAADTAVYYCTREDSSNWRSRGQGTLVTVSSGSGGGGSGGGGSGGGGSFEEVQLVESGGGLVQPGGSLRLSCAASGFSLTNYGVHWVRQAPGKGLEWVSVIWSGGSTDYNAAFISRFTISADTSKNTAYLQMNSLRAEDTAVYYCARELIHAMDNWGQGTLVTVSSTRIQNPDPAVYQLRDSKSSDKSVCLFTDFDSQTNVSQSKDSDVYITDKCVLDMRSMDFKSNSAVAWSNKSDFACANAFNNSIIPEDTFFPSPESSCDVKLVEKSFETDTNLNFQNLSVIGFRILLLKVAGFNLLMTLRLWSS

SEQ ID NO: 13189 - protein, 897 aa, Artificial Sequence
  Synthetic Polypeptide
MALPVTALLLPLALLLHAARPEVQLVESGGGLVQPGGSLRLSCAASGFSFSDFWMSWVRQAPGKGLEWVATISQAGSEKDYVDSVKGRFTISRDNAKKSLYLQMNSLRAEDTAVYYCASGVYSFDYRGQGTLVTVSSGTGGGGSGGGGSGGGGSEFDFVMTQSPLSLPVTPGEPASISCRSSQSIVHSNGNTYLEWYLQKPGQSPQLLIYKVSNRFSGVPDRFSGSGSGTDFTLKISRVEAEDVGVYYCFQGSHVPLTFGQGTKLEIKRLEDLKNVFPPEVAVFEPSEAEISHTQKATLVCLATGFYPDHVELSWWVNGKEVHSGVCTDPQPLKEQPALNDSRYCLSSRLRVSATFWQNPRNHFRCQVQFYGLSENDEWTQDRAKPVTQIVSAEAWGRADCGFTSESYQQGVLSATILYEILLGKATLYAVLVSALVLMAMVKRKDSRGRAKRSGSGATNFSLLKQAGDVEENPGPTSMDWIWRILFLVGAATGAHSGPQLQLQESGPGLVKPSETLSLTCTVSGDSISSGDYYWGWIRQPPGKGLEWIGHIYYSGVTYYNPSLKSRVTISVDTSRNQFSLKLSSVTAADTAVYYCTREDSSNWRSRGQGTLVTVSSGSGGGGSGGGGSGGGGSFEEVQLVESGAEVKKPGASVKVSCKASGYTFTSYWIHWVRQAPGQGLEWMGENDPSNGRTNYNEKFKNRVTLTVDTSISTAYMELSRLRSDDTAVYYCARGPNYFYSMDYWGQGTMVTVSSTRIQNPDPAVYQLRDSKSSDKSVCLFTDFDSQTNVSQSKDSDVYITDKCVLDMRSMDFKSNSAVAWSNKSDFACANAFNNSIIPEDTFFPSPESSCDVKLVEKSFETDTNLNFQNLSVIGFRILLLKVAGFNLLMTLRLWSS

SEQ ID NO: 13190 - protein, 890 aa, Artificial Sequence
  Synthetic Polypeptide
MALPVTALLLPLALLLHAARPEVQLVESGGGLVQPGGSLRLSCAASGFSFSDFWMSWVRQAPGKGLEWVATISQAGSEKDYVDSVKGRFTISRDNAKKSLYLQMNSLRAEDTAVYYCASGVYSFDYRGQGTLVTVSSGTGGGGSGGGGSGGGGSEFDIQLTQSPSFLSASVGDRVTITCSARSSISFMYWYQQKPGKAPKLLIYDTSNLASGVPSRFSGSGSGTEFTLTISSLEAEDAATYYCQQWSSYPLTFGQGTKLEIKLEDLKNVFPPEVAVFEPSEAEISHTQKATLVCLATGFYPDHVELSWWVNGKEVHSGVCTDPQPLKEQPALNDSRYCLSSRLRVSATFWQNPRNHFRCQVQFYGLSENDEWTQDRAKPVTQIVSAEAWGRADCGFTSESYQQGVLSATILYEILLGKATLYAVLVSALVLMAMVKRKDSRGRAKRSGSGATNFSLLKQAGDVEENPGPTSMDWIWRILFLVGAATGAHSGPQLQLQESGPGLVKPSETLSLTCTVSGDSISSGDYYWGWIRQPPGKGLEWIGHIYYSGVTYYNPSLKSRVTISVDTSRNQFSLKLSSVTAADTAVYYCTREDSSNWRSRGQGTLVTVSSGSGGGGSGGGGSGGGGSFEQVQLVQSGAEVKKPGASVKVSCKASGYTFTGSWMNWVRQAPGQGLEWIGRIYPGDGETNYNGKFKDRVTITADKSTSTAYMELSSLRSEDTAVYYCARIYGNNVYFDVWGQGTTVTVSSTRIQNPDPAVYQLRDSKSSDKSVCLFTDFDSQTNVSQSKDSDVYITDKCVLDMRSMDFKSNSAVAWSNKSDFACANAFNNSIIPEDTFFPSPESSCDVKLVEKSFETDTNLNFQNLSVIGFRILLLKVAGFNLLMTLRLWSS

SEQ ID NO: 13191 - protein, 898 aa, Artificial Sequence
  Synthetic Polypeptide
MALPVTALLLPLALLLHAARPEVQLVESGGGLVQPGGSLRLSCAASGFSFSDFWMSWVRQAPGKGLEWVATISQAGSEKDYVDSVKGRFTISRDNAKKSLYLQMNSLRAEDTAVYYCASGVYSFDYRGQGTLVTVSSGTGGGGSGGGGSGGGGSEFQLVLTQSPSASASLGSSVKLTCTLSSGHKTDTIDWYQQQPGKAPRYLMKLEGSGSYNKGSGVPDRFSGSSSGADWYLTISSLQSEDEADYYCGTDYPGNYLFGGGTQLTVLGLEDLKNVFPPEVAVFEPSEAEISHTQKATLVCLATGFYPDHVELSWWVNGKEVHSGVCTDPQPLKEQPALNDSRYCLSSRLRVSATFWQNPRNHFRCQVQFYGLSENDEWTQDRAKPVTQIVSAEAWGRADCGFTSESYQQGVLSATILYEILLGKATLYAVLVSALVLMAMVKRKDSRGRAKRSGSGATNFSLLKQAGDVEENPGPTSMDWIWRILFLVGAATGAHSGPQLQLQESGPGLVKPSETLSLTCTVSGDSISSGDYYWGWIRQPPGKGLEWIGHIYYSGVTYYNPSLKSRVTISVDTSRNQFSLKLSSVTAADTAVYYCTREDSSNWRSRGQGTLVTVSSGSGGGGSGGGGSGGGGSFEQEQLVESGGGLVQPGGSLRLSCAASGFTFSDYYMSWIRQAPGKGLEWVATIYPSSGKTYYADSAKGRLTISSDNAKDSLYLQMNSLRAEDTAVYYCTRDSYADDAALFDIWGQGTTVTVSSTRIQNPDPAVYQLRDSKSSDKSVCLFTDFDSQTNVSQSKDSDVYITDKCVLDMRSMDFKSNSAVAWSNKSDFACANAFNNSIIPEDTFFPSPESSCDVKLVEKSFETDTNLNFQNLSVIGFRILLLKVAGFNLLMTLRLWSS

SEQ ID NO: 13192 - protein, 868 aa, Artificial Sequence
  Synthetic Polypeptide
MALPVTALLLPLALLLHAARPEVQLVESGGGLVQPGGSLRLSCAASGFSFSDFWMSWVRQAPGKGLEWVATISQAGSEKDYVDSVKGRFTISRDNAKKSLYLQMNSLRAEDTAVYYCASGVYSFDYRGQGTLVTVSSGTGGGGSGGGGSGGGGSEFEIVLTQSPDTLSLSPGEKATLSCRASQSVSSSFLAWYQQKPGQAPSLLIYVASRRAAGIPDRFSGSGSGTDFTLTISRLEPEDFGMFYCQHYGRTPFTFGPARGPEERVPTGGRVRARGRDQPHPESHPRVPGYRLLPRPCGTVLVGQRQRGAQRRVYRPPATERTARPERQPVLPEQQTESVRHLLAEPPEPLQMPGAVLRPERERRVDPGQSQARDPDRVCRSLGQSRLRLYQRELPAGRAERHHPVRDPAGQGHPVRRAGVCPGADGYGQAEGQPGKGQAIWIWSNKLLTTQTSRRGGESRAYYGLDLAHPFPCRRCYRRAFRAPAPAARVWTWPGQARDTEPDLYRVRRHQQRRLLLGLDQTASWQRTGMDRPHLLQRRDLLQPQPEVQSDHQRGHQPEPVLPEAVRDSRRYRRVLLHQRGQQQLAERPGNTGHSLWIRRRRKWRRRIWRRRLFRTDPVGGIRGRCGAAGEPETVMRGVWLHIQELRHALGATGPRKGFGVGRRDLVRRIVLRRSCEGKVHHLPRQQKYALPANELTQGGYGGLLLRSLRDCCGRRIRLLGTGYPGDSIKHAYPEPSCRVPAAGQEQRQERVSVHRLRQPDQRVPEQGLRRVHHRVRAGHAEHGLQEQLRRGLVQQVRFRLRQRLQQQHYPRGHILPKPREQLRREAGGKELRDRHQPELPEPERDRLQNPAAESGRLPADDPAAVVQ

SEQ ID NO: 13193 - protein, 885 aa, Artificial Sequence
  Synthetic Polypeptide
MALPVTALLLPLALLLHAARPEVQLVESGGGLVQPGGSLRLSCAASGFSFSDFWMSWVRQAPGKGLEWVATISQAGSEKDYVDSVKGRFTISRDNAKKSLYLQMNSLRAEDTAVYYCASGVYSFDYRGQGTLVTVSSGTGGGGSGGGGSGGGGSEFDIQMTQSPSSLSASLGDRVTITCRASQGIRNDLGWYQQKPGKAPKRLIYASSTLQSGVPSRFSGSGSGTEFTLTISSLQPEDFATYYCLQHNNFPWTFGQGTKVEIKRLEDLKNVFPPEVAVFEPSEAEISHTQKATLVCLATGFYPDHVELSWWVNGKEVHSGVCTDPQPLKEQPALNDSRYCLSSRLRVSATFWQNPRNHFRCQVQFYGLSENDEWTQDRAKPVTQIVSAEAWGRADCGFTSESYQQGVLSATILYEILLGKATLYAVLVSALVLMAMVKRKDSRGRAKRSGSGATNFSLLKQAGDVEENPGPTSMDWIWRILFLVGAATGAHSGPQLQLQESGPGLVKPSETLSLTCTVSGDSISSGDYYWGWIRQPPGKGLEWIGHIYYSGVTYYNPSLKSRVTISVDTSRNQFSLKLSSVTAADTAVYYCTREDSSNWRSRGQGTLVTVSSGSGGGGSGGGGSGGGGSFEHARKLLRSLDLYWSQPRHHSRVQVVFPSTQGWASAGSGNPLARLWNGSLTYSAMPKKATGQANPALFPRTLLSLRWCPPTWTRWTPPPITAQESLGMVGMVTTIIMGWMCGGKAQPRSQARVSRTLILPCTSCGIARAATRACVCSPTSTARPTCPRARTPTCTSPISACWTCGAWTSRATPPWPGPTSPISPAPTPSTTALSPRTHSSQAPRAAATSWWKRASRQTPTTSRTASASESCCKWPALTCPCGCGP

SEQ ID NO: 13194 - protein, 893 aa, Artificial Sequence
  Synthetic Polypeptide
MALPVTALLLPLALLLHAARPEVQLVESGGGLVQPGGSLRLSCAASGFSFSDFWMSWVRQAPGKGLEWVATISQAGSEKDYVDSVKGRFTISRDNAKKSLYLQMNSLRAEDTAVYYCASGVYSFDYRGQGTLVTVSSGTGGGGSGGGGSGGGGSEFDIVLTQSPPSLAMSLGKRATISCRASESVTILGSHLIHWYQQKPGQPPTLLIQLASNVQTGVPARFSGSGSRTDFTLTIDPVEEDDVAVYYCLQSRTIPRTFGGGTKLEIKLEDLKNVFPPEVAVFEPSEAEISHTQKATLVCLATGFYPDHVELSWWVNGKEVHSGVCTDPQPLKEQPALNDSRYCLSSRLRVSATFWQNPRNHFRCQVQFYGLSENDEWTQDRAKPVTQIVSAEAWGRADCGFTSESYQQGVLSATILYEILLGKATLYAVLVSALVLMAMVKRKDSRGRAKRSGSGATNFSLLKQAGDVEENPGPTSMDWIWRILFLVGAATGAHSGPQLQLQESGPGLVKPSETLSLTCTVSGDSISSGDYYWGWIRQPPGKGLEWIGHIYYSGVTYYNPSLKSRVTISVDTSRNQFSLKLSSVTAADTAVYYCTREDSSNWRSRGQGTLVTVSSGSGGGGSGGGGSGGGGSFEQIQLVQSGPELKKPGETVKISCKASGYTFTDYSINWVKRAPGKGLKWMGWINTETREPAYAYDFRGRFAFSLETSASTAYLQINNLKYEDTATYFCALDYSYAMDYWGQGTSVTVSSTRIQNPDPAVYQLRDSKSSDKSVCLFTDFDSQTNVSQSKDSDVYITDKCVLDMRSMDFKSNSAVAWSNKSDFACANAFNNSIIPEDTFFPSPESSCDVKLVEKSFETDTNLNFQNLSVIGFRILLLKVAGFNLLMTLRLWSS

SEQ ID NO: 13195 - protein, 864 aa, Artificial Sequence
  Synthetic Polypeptide
MALPVTALLLPLALLLHAARPEVQLVESGGGLVQPGGSLRLSCAASGFSFSDFWMSWVRQAPGKGLEWVATISQAGSEKDYVDSVKGRFTISRDNAKKSLYLQMNSLRAEDTAVYYCASGVYSFDYRGQGTLVTVSSGTGGGGSGGGGSGGGGSEFDIQLTQSPSSLSASVGDRVSFTCQASQDINNFLNWYQQKPGKAPKLLIYDASNLETGVPSRFSGSGSGTDFTFTISSLQPEDIATYYCQQYGNLPFTFGGGTKVEIKSSRTRTCSHLRWPCSSLARPRSATPRKPPSCAWLPASTPTMWNCLGGSTAKRCTAACVPTPSHKNSPPTTAGTAAADECPPPSGRTPGTTSDARCSSTAARTTSGPRTEPSPPRSCLPKPGAEPIAALPARATSRACAPPSCTRSCWARPPCTPCWCLPWCWLWSSGRTAGEGPSDLDLEQQTSHYSNKQVTWRRIPGLLVWTGFGASFSLSALLPARIPGPSSSCKSLDLAWSSLARHAPVPCPAIASAAAITTGAGSDSLLAKDWNGSATSTTAAPTTTPASPEPSAWTPAGTSSPSCLAQPPIPPCTTAPERTAATGGVEAREHWSQLALDPAEAEVEAEDLAAEALSNRSNCKKADPDWSLLRHLVRARSVAAPSPPIIGHGYDNPQVRAWNGLAISTIQEARTTIPASPEQFQIPVKTSSVLNCQAQLPTPLCITASHWCIVEGIVIAGSIIGDREPWLYLPRVSRTLILPCTSCGIARAATRACVCSPTSTARPTCPRARTPTCTSPISACWTCGAWTSRATPPWPGPTSPISPAPTPSTTALSPRTHSSQAPRAAATSWWKRASRQTPTTSRTASASESCCKWPALTCPCGCGP

SEQ ID NO: 13196 - protein, 897 aa, Artificial Sequence
  Synthetic Polypeptide
MALPVTALLLPLALLLHAARPEVQLVESGGGLVQPGGSLRLSCAASGFSFSDFWMSWVRQAPGKGLEWVATISQAGSEKDYVDSVKGRFTISRDNAKKSLYLQMNSLRAEDTAVYYCASGVYSFDYRGQGTLVTVSSGTGGGGSGGGGSGGGGSEFDIQLTQSPSSLSASVGDRVSFTCQASQDINNFLNWYQQKPGKAPKLLIYDASNLETGVPSRFSGSGSGTDFTFTISSLQPEDIATYYCQQYGNLPFTFGGGTKVEIKRLEDLKNVFPPEVAVFEPSEAEISHTQKATLVCLATGFYPDHVELSWWVNGKEVHSGVCTDPQPLKEQPALNDSRYCLSSRLRVSATFWQNPRNHFRCQVQFYGLSENDEWTQDRAKPVTQIVSAEAWGRADCGFTSESYQQGVLSATILYEILLGKATLYAVLVSALVLMAMVKRKDSRGRAKRSGSGATNFSLLKQAGDVEENPGPTSMDWIWRILFLVGAATGAHSGPQLQLQESGPGLVKPSETLSLTCTVSGDSISSGDYYWGWIRQPPGKGLEWIGHIYYSGVTYYNPSLKSRVTISVDTSRNQFSLKLSSVTAADTAVYYCTREDSSNWRSRGQGTLVTVSSGSGGGGSGGGGSGGGGSFEQVQLQESGPGLVKPSQTLSLTCTVSGGSISSGGFYWSWIRQHPGKGLEWIGYIHHSGSTHYNPSLKSRVTISIDTSKNLFSLRLSSVTAADTAVYYCASLVYCGGDCYSGFDYWGQGTLVTVSSTRIQNPDPAVYQLRDSKSSDKSVCLFTDFDSQTNVSQSKDSDVYITDKCVLDMRSMDFKSNSAVAWSNKSDFACANAFNNSIIPEDTFFPSPESSCDVKLVEKSFETDTNLNFQNLSVIGFRILLLKVAGFNLLMTLRLWSS

SEQ ID NO: 13197 - protein, 893 aa, Artificial Sequence
  Synthetic Polypeptide
MALPVTALLLPLALLLHAARPEVQLVESGGGLVQPGGSLRLSCAASGFSFSDFWMSWVRQAPGKGLEWVATISQAGSEKDYVDSVKGRFTISRDNAKKSLYLQMNSLRAEDTAVYYCASGVYSFDYRGQGTLVTVSSGTGGGGSGGGGSGGGGSEFDIQMTQSPSSLSASVGDRVTITCKSSQSVLYSSNQKNYLAWFQQKPGKAPKLLIYWASTRESGVPSRFSGSGSGTDFTLTISSLQPEDFATYFCHQYLSSYTFGQGTKVEIKRLEDLKNVFPPEVAVFEPSEAEISHTQKATLVCLATGFYPDHVELSWWVNGKEVHSGVCTDPQPLKEQPALNDSRYCLSSRLRVSATFWQNPRNHFRCQVQFYGLSENDEWTQDRAKPVTQIVSAEAWGRADCGFTSESYQQGVLSATILYEILLGKATLYAVLVSALVLMAMVKRKDSRGRAKRSGSGATNFSLLKQAGDVEENPGPTSMDWIWRILFLVGAATGAHSGPQLQLQESGPGLVKPSETLSLTCTVSGDSISSGDYYWGWIRQPPGKGLEWIGHIYYSGVTYYNPSLKSRVTISVDTSRNQFSLKLSSVTAADTAVYYCTREDSSNWRSRGQGTLVTVSSGSGGGGSGGGGSGGGGSFEEVQLVESGGGLVQPGGSLRLSCAASGYTFTTYWMHWVRQAPGKGLEWVGYIRPSTGYTEYNQKFKDRFTISADTSKNTAYLQMNSLRAEDTAVYYCARSRWLLDYWGQGTLVTVSTRIQNPDPAVYQLRDSKSSDKSVCLFTDFDSQTNVSQSKDSDVYITDKCVLDMRSMDFKSNSAVAWSNKSDFACANAFNNSIIPEDTFFPSPESSCDVKLVEKSFETDTNLNFQNLSVIGFRILLLKVAGFNLLMTLRLWSS

SEQ ID NO: 13198 - protein, 890 aa, Artificial Sequence
  Synthetic Polypeptide
MALPVTALLLPLALLLHAARPEVQLVESGGGLVQPGGSLRLSCAASGFSFSDFWMSWVRQAPGKGLEWVATISQAGSEKDYVDSVKGRFTISRDNAKKSLYLQMNSLRAEDTAVYYCASGVYSFDYRGQGTLVTVSSGTGGGGSGGGGSGGGGSEFDIQMTQSPSSLSASVGDRVTITCRASQDISNYLNWYQQKPGKAPKLLIYYTSRLHSGVPSRFSGSGSGTDFTLTISSLQPEDFATYYCQQGNTLPYTFGQGTKVEIKRLEDLKNVFPPEVAVFEPSEAEISHTQKATLVCLATGFYPDHVELSWWVNGKEVHSGVCTDPQPLKEQPALNDSRYCLSSRLRVSATFWQNPRNHFRCQVQFYGLSENDEWTQDRAKPVTQIVSAEAWGRADCGFTSESYQQGVLSATILYEILLGKATLYAVLVSALVLMAMVKRKDSRGRAKRSGSGATNFSLLKQAGDVEENPGPTSMDWIWRILFLVGAATGAHSGPQLQLQESGPGLVKPSETLSLTCTVSGDSISSGDYYWGWIRQPPGKGLEWIGHIYYSGVTYYNPSLKSRVTISVDTSRNQFSLKLSSVTAADTAVYYCTREDSSNWRSRGQGTLVTVSSGSGGGGSGGGGSGGGGSFEEVQLVESGGGLVQPGGSLRLSCAASGFTFSDYFMSWVRQAPGKGLEWVATISNGGTYTYYPDSVKGRFTISRDNSKNTLYLQMNSLRAEDTAVYYCARFDGYIFDYWGQGTLVTVSSTRIQNPDPAVYQLRDSKSSDKSVCLFTDFDSQTNVSQSKDSDVYITDKCVLDMRSMDFKSNSAVAWSNKSDFACANAFNNSIIPEDTFFPSPESSCDVKLVEKSFETDTNLNFQNLSVIGFRILLLKVAGFNLLMTLRLWSS

SEQ ID NO: 13199 - protein, 895 aa, Artificial Sequence
  Synthetic Polypeptide
MALPVTALLLPLALLLHAARPEVQLVESGGGLVQPGGSLRLSCAASGFSFSDFWMSWVRQAPGKGLEWVATISQAGSEKDYVDSVKGRFTISRDNAKKSLYLQMNSLRAEDTAVYYCASGVYSFDYRGQGTLVTVSSGTGGGGSGGGGSGGGGSEFDIQMTQTTSSLSASLGDRVTISCRASQDISKYLNWYQQKPDGTVKLLIYHTSRLHSGVPSRFSGSGSGTDYSLTISNLEQEDIATYFCQQGNTLPYTFGGGTKLEITLEIQNPDPAVYQLRDSKSSDKSVCLFTDFDSQTNVSQSKDSDVYITDKCVLDMRSMDFKSNSAVAWSNKSDFACANAFNNSIIPEDTFFPSPESSCDVKLVEKSFETDTNLNFQNLSVIGFRILLLKVAGFNLLMTLRLWSSRAKRSGSGVKQTLNFDLLKLAGDVESNPGPTSMDWIWRILFLVGAATGAHSGPQLQLQESGPGLVKPSETLSLTCTVSGDSISSGDYYWGWIRQPPGKGLEWIGHIYYSGVTYYNPSLKSRVTISVDTSRNQFSLKLSSVTAADTAVYYCTREDSSNWRSRGQGTLVTVSSGSGGGGSGGGGSGGGGSFEVKLQESGPGLVAPSQSLSVTCTVSGVSLPDYGVSWIRQPPRKGLEWLGVIWGSETTYYNSALKSRLTIIKDNSKSQVFLKMNSLQTDDTAIYYCAKHYYYGGSYAMDYWGQGTSVTVSSTREDLKNVFPPEVAVFEPSEAEISHTQKATLVCLATGFYPDHVELSWWVNGKEVHSGVCTDPQPLKEQPALNDSRYCLSSRLRVSATFWQNPRNHFRCQVQFYGLSENDEWTQDRAKPVTQIVSAEAWGRADCGFTSESYQQGVLSATILYEILLGKATLYAVLVSALVLMAMVKRKDSRG

SEQ ID NO: 13200 - protein, 896 aa, Artificial Sequence
  Synthetic Polypeptide
MALPVTALLLPLALLLHAARPEVQLVESGGGLVQPGGSLRLSCAASGFSFSDFWMSWVRQAPGKGLEWVATISQAGSEKDYVDSVKGRFTISRDNAKKSLYLQMNSLRAEDTAVYYCASGVYSFDYRGQGTLVTVSSGTGGGGSGGGGSGGGGSEFEIVMTQSPATLSLSPGERATLSCRASQDISKYLNWYQQKPGQAPRLLIYHTSRLHSGIPARFSGSGSGTDYTLTISSLQPEDFAVYFCQQGNTLPYTFGQGTKLEIKLEIQNPDPAVYQLRDSKSSDKSVCLFTDFDSQTNVSQSKDSDVYITDKCVLDMRSMDFKSNSAVAWSNKSDFACANAFNNSIIPEDTFFPSPESSCDVKLVEKSFETDTNLNFQNLSVIGFRILLLKVAGFNLLMTLRLWSSRAKRSGSGVKQTLNFDLLKLAGDVESNPGPTSMDWIWRILFLVGAATGAHSGPQLQLQESGPGLVKPSETLSLTCTVSGDSISSGDYYWGWIRQPPGKGLEWIGHIYYSGVTYYNPSLKSRVTISVDTSRNQFSLKLSSVTAADTAVYYCTREDSSNWRSRGQGTLVTVSSGSGGGGSGGGGSGGGGSFEQVQLQESGPGLVKPSETLSLTCTVSGVSLPDYGVSWIRQPPGKGLEWIGVIWGSETTYYNSSLKSRVTISKDNSKNQVSLKLSSVTAADTAVYYCAKHYYYGGSYAMDYWGQGTLVTVSSTREDLKNVFPPEVAVFEPSEAEISHTQKATLVCLATGFYPDHVELSWWVNGKEVHSGVCTDPQPLKEQPALNDSRYCLSSRLRVSATFWQNPRNHFRCQVQFYGLSENDEWTQDRAKPVTQIVSAEAWGRADCGFTSESYQQGVLSATILYEILLGKATLYAVLVSALVLMAMVKRKDSRG

SEQ ID NO: 13201 - protein, 897 aa, Artificial Sequence
  Synthetic Polypeptide
MALPVTALLLPLALLLHAARPEVQLVESGGGLVQPGGSLRLSCAASGFSFSDFWMSWVRQAPGKGLEWVATISQAGSEKDYVDSVKGRFTISRDNAKKSLYLQMNSLRAEDTAVYYCASGVYSFDYRGQGTLVTVSSGTGGGGSGGGGSGGGGSEFDEIVLTQSPATLSLSPGERATLSCSASSSVSYMHWYQQKPGQAPRLLIYDTSKLASGIPARFSGSGSGTDFTLTISSLEPEDVAVYYCFQGSVYPFTFGQGTKLEIKRLEIQNPDPAVYQLRDSKSSDKSVCLFTDFDSQTNVSQSKDSDVYITDKCVLDMRSMDFKSNSAVAWSNKSDFACANAFNNSIIPEDTFFPSPESSCDVKLVEKSFETDTNLNFQNLSVIGFRILLLKVAGFNLLMTLRLWSSRAKRSGSGVKQTLNFDLLKLAGDVESNPGPTSMDWIWRILFLVGAATGAHSGPQLQLQESGPGLVKPSETLSLTCTVSGDSISSGDYYWGWIRQPPGKGLEWIGHIYYSGVTYYNPSLKSRVTISVDTSRNQFSLKLSSVTAADTAVYYCTREDSSNWRSRGQGTLVTVSSGSGGGGSGGGGSGGGGSFEQVQLQESGPGLVKPSQTLSLTCTVSGGSISTSGMGVGWIRQHPGKGLEWIGHIWWDDDKRYNPALKSRVTISVDTSKNQFSLKLSSVTAADTAVYYCARMELWSYYFDYWGQGTLVTVSSTREDLKNVFPPEVAVFEPSEAEISHTQKATLVCLATGFYPDHVELSWWVNGKEVHSGVCTDPQPLKEQPALNDSRYCLSSRLRVSATFWQNPRNHFRCQVQFYGLSENDEWTQDRAKPVTQIVSAEAWGRADCGFTSESYQQGVLSATILYEILLGKATLYAVLVSALVLMAMVKRKDSRG

SEQ ID NO: 13202 - protein, 895 aa, Artificial Sequence
  Synthetic Polypeptide
MALPVTALLLPLALLLHAARPEVQLVESGGGLVQPGGSLRLSCAASGFSFSDFWMSWVRQAPGKGLEWVATISQAGSEKDYVDSVKGRFTISRDNAKKSLYLQMNSLRAEDTAVYYCASGVYSFDYRGQGTLVTVSSGTGGGGSGGGGSGGGGSEFDYIHVTQSPSSLSVSIGDRVTINCQTSQGVGSDLHWYQHKPGRAPKLLIHHASSVEDGVPSRFSGTGFHTSFNLTINDLQADDIGTYYCQVLQSFGRGSRLDTKLEIQNPDPAVYQLRDSKSSDKSVCLFTDFDSQTNVSQSKDSDVYITDKCVLDMRSMDFKSNSAVAWSNKSDFACANAFNNSIIPEDTFFPSPESSCDVKLVEKSFETDTNLNFQNLSVIGFRILLLKVAGFNLLMTLRLWSSRAKRSGSGVKQTLNFDLLKLAGDVESNPGPTSMDWIWRILFLVGAATGAHSGPQLQLQESGPGLVKPSETLSLTCTVSGDSISSGDYYWGWIRQPPGKGLEWIGHIYYSGVTYYNPSLKSRVTISVDTSRNQFSLKLSSVTAADTAVYYCTREDSSNWRSRGQGTLVTVSSGSGGGGSGGGGSGGGGSFERAHLVQSGTAMKKPGASVRVSCQTSGYTFTAHILFWFRQAPGRGLEWVGWIKPQYGAVNFGGGFRDRVTLTRDVYREIAYMDIRGLKPDDTAVYYCARDRSYGDSSWALDAWGQGTTVVVSATREDLKNVFPPEVAVFEPSEAEISHTQKATLVCLATGFYPDHVELSWWVNGKEVHSGVCTDPQPLKEQPALNDSRYCLSSRLRVSATFWQNPRNHFRCQVQFYGLSENDEWTQDRAKPVTQIVSAEAWGRADCGFTSESYQQGVLSATILYEILLGKATLYAVLVSALVLMAMVKRKDSRG

SEQ ID NO: 13203 - protein, 905 aa, Artificial Sequence
  Synthetic Polypeptide
MALPVTALLLPLALLLHAARPEVQLVESGGGLVQPGGSLRLSCAASGFSFSDFWMSWVRQAPGKGLEWVATISQAGSEKDYVDSVKGRFTISRDNAKKSLYLQMNSLRAEDTAVYYCASGVYSFDYRGQGTLVTVSSGTGGGGSGGGGSGGGGSEFDVQMIQTPDSLAVSLGQRATISCRASESVDNYGISFMHWYQQKPGQSPKLLIYRASNLESGIPARFSGSGSRTDFTLTINPVETDDVATYYCQQNNKDPPTFGGGTKLEIKLEIQNPDPAVYQLRDSKSSDKSVCLFTDFDSQTNVSQSKDSDVYITDKCVLDMRSMDFKSNSAVAWSNKSDFACANAFNNSIIPEDTFFPSPESSCDVKLVEKSFETDTNLNFQNLSVIGFRILLLKVAGFNLLMTLRLWSSRAKRSGSGVKQTLNFDLLKLAGDVESNPGPTSMDWIWRILFLVGAATGAHSGPQLQLQESGPGLVKPSETLSLTCTVSGDSISSGDYYWGWIRQPPGKGLEWIGHIYYSGVTYYNPSLKSRVTISVDTSRNQFSLKLSSVTAADTAVYYCTREDSSNWRSRGQGTLVTVSSGSGGGGSGGGGSGGGGSFEGGGGSQVQLQQSGAELVKPGASVKISCKASGYAFSSYWMNWVKQRPGKGLEWIGQIYPGDGDTTYNGKFKGKATLTADKSSSTVYMQLNSLTSEDSAVYFCVRYYYGSSGYFDYWGQGTTLTVSSTREDLKNVFPPEVAVFEPSEAEISHTQKATLVCLATGFYPDHVELSWWVNGKEVHSGVCTDPQPLKEQPALNDSRYCLSSRLRVSATFWQNPRNHFRCQVQFYGLSENDEWTQDRAKPVTQIVSAEAWGRADCGFTSESYQQGVLSATILYEILLGKATLYAVLVSALVLMAMVKRKDSRG

SEQ ID NO: 13204 - protein, 896 aa, Artificial Sequence
  Synthetic Polypeptide
MALPVTALLLPLALLLHAARPEVQLVESGGGLVQPGGSLRLSCAASGFSFSDFWMSWVRQAPGKGLEWVATISQAGSEKDYVDSVKGRFTISRDNAKKSLYLQMNSLRAEDTAVYYCASGVYSFDYRGQGTLVTVSSGTGGGGSGGGGSGGGGSEFDVQMIQTPSSLSASLGDRVTISCRASQDIGNYLNWYQQKPDGTVKLLIYYTSRLHSGVPSRFSGSGSGTEYSLTISNLEQEDIATYFCQQGSALPPTFGGGTKLEINLEIQNPDPAVYQLRDSKSSDKSVCLFTDFDSQTNVSQSKDSDVYITDKCVLDMRSMDFKSNSAVAWSNKSDFACANAFNNSIIPEDTFFPSPESSCDVKLVEKSFETDTNLNFQNLSVIGFRILLLKVAGFNLLMTLRLWSSRAKRSGSGVKQTLNFDLLKLAGDVESNPGPTSMDWIWRILFLVGAATGAHSGPQLQLQESGPGLVKPSETLSLTCTVSGDSISSGDYYWGWIRQPPGKGLEWIGHIYYSGVTYYNPSLKSRVTISVDTSRNQFSLKLSSVTAADTAVYYCTREDSSNWRSRGQGTLVTVSSGSGGGGSGGGGSGGGGSFEALQLQQSGAELVRPGASVTLSCKASGYTFTDYEMHWVKQTPVHGLEWIGAIDPETGGTAYNQKFEGKAILTADKSSSTAYMELRSLTSEDSPVYYCARRRYYGSSSFDYWGQGTTLTVSSTREDLKNVFPPEVAVFEPSEAEISHTQKATLVCLATGFYPDHVELSWWVNGKEVHSGVCTDPQPLKEQPALNDSRYCLSSRLRVSATFWQNPRNHFRCQVQFYGLSENDEWTQDRAKPVTQIVSAEAWGRADCGFTSESYQQGVLSATILYEILLGKATLYAVLVSALVLMAMVKRKDSRG

SEQ ID NO: 13205 - protein, 900 aa, Artificial Sequence
  Synthetic Polypeptide
MALPVTALLLPLALLLHAARPEVQLVESGGGLVQPGGSLRLSCAASGFSFSDFWMSWVRQAPGKGLEWVATISQAGSEKDYVDSVKGRFTISRDNAKKSLYLQMNSLRAEDTAVYYCASGVYSFDYRGQGTLVTVSSGTGGGGSGGGGSGGGGSEFDIVLTQSPASLAVSLGQRATISCRASKSVSTSGYSYLHWYQQKPGQPPKLLIYLASNLESGVPARFSGSGSGTDFTLNIHPVEEEDAATYYCQHSRELPFTFGSGTKLEIKLEIQNPDPAVYQLRDSKSSDKSVCLFTDFDSQTNVSQSKDSDVYITDKCVLDMRSMDFKSNSAVAWSNKSDFACANAFNNSIIPEDTFFPSPESSCDVKLVEKSFETDTNLNFQNLSVIGFRILLLKVAGFNLLMTLRLWSSRAKRSGSGVKQTLNFDLLKLAGDVESNPGPTSMDWIWRILFLVGAATGAHSGPQLQLQESGPGLVKPSETLSLTCTVSGDSISSGDYYWGWIRQPPGKGLEWIGHIYYSGVTYYNPSLKSRVTISVDTSRNQFSLKLSSVTAADTAVYYCTREDSSNWRSRGQGTLVTVSSGSGGGGSGGGGSGGGGSFEQVQLVESGGGLVQPGGSLKLSCAASGFDFSRYWMSWVRQAPGKGLEWIGEINPTSSTINFTPSLKDKVFISRDNAKNTLYLQMSKVRSEDTALYYCARGNYYRYGDAMDYWGQGTSVTVSTREDLKNVFPPEVAVFEPSEAEISHTQKATLVCLATGFYPDHVELSWWVNGKEVHSGVCTDPQPLKEQPALNDSRYCLSSRLRVSATFWQNPRNHFRCQVQFYGLSENDEWTQDRAKPVTQIVSAEAWGRADCGFTSESYQQGVLSATILYEILLGKATLYAVLVSALVLMAMVKRKDSRG

SEQ ID NO: 13206 - protein, 898 aa, Artificial Sequence
  Synthetic Polypeptide
MALPVTALLLPLALLLHAARPEVQLVESGGGLVQPGGSLRLSCAASGFSFSDFWMSWVRQAPGKGLEWVATISQAGSEKDYVDSVKGRFTISRDNAKKSLYLQMNSLRAEDTAVYYCASGVYSFDYRGQGTLVTVSSGTGGGGSGGGGSGGGGSEFDIQMTQSPSSLSASVGDRVTITCSASQDISNYLNWYQQKPGKAPKLLIYYTSNLHSGVPSRFSGSGSGTDFTLTISSLQPEDFATYYCQQYRKLPWTFGQGTKLEIKRLEIQNPDPAVYQLRDSKSSDKSVCLFTDFDSQTNVSQSKDSDVYITDKCVLDMRSMDFKSNSAVAWSNKSDFACANAFNNSIIPEDTFFPSPESSCDVKLVEKSFETDTNLNFQNLSVIGFRILLLKVAGFNLLMTLRLWSSRAKRSGSGVKQTLNFDLLKLAGDVESNPGPTSMDWIWRILFLVGAATGAHSGPQLQLQESGPGLVKPSETLSLTCTVSGDSISSGDYYWGWIRQPPGKGLEWIGHIYYSGVTYYNPSLKSRVTISVDTSRNQFSLKLSSVTAADTAVYYCTREDSSNWRSRGQGTLVTVSSGSGGGGSGGGGSGGGGSFEQVQLVQSGAEVKKPGSSVKVSCKASGGTFSNYWMHWVRQAPGQGLEWMGATYRGHSDTYYNQKFKGRVTITADKSTSTAYMELSSLRSEDTAVYYCARGAIYDGYDVLDNWGQGTLVTVSSTREDLKNVFPPEVAVFEPSEAEISHTQKATLVCLATGFYPDHVELSWWVNGKEVHSGVCTDPQPLKEQPALNDSRYCLSSRLRVSATFWQNPRNHFRCQVQFYGLSENDEWTQDRAKPVTQIVSAEAWGRADCGFTSESYQQGVLSATILYEILLGKATLYAVLVSALVLMAMVKRKDSRG

SEQ ID NO: 13207 - protein, 898 aa, Artificial Sequence
  Synthetic Polypeptide
MALPVTALLLPLALLLHAARPEVQLVESGGGLVQPGGSLRLSCAASGFSFSDFWMSWVRQAPGKGLEWVATISQAGSEKDYVDSVKGRFTISRDNAKKSLYLQMNSLRAEDTAVYYCASGVYSFDYRGQGTLVTVSSGTGGGGSGGGGSGGGGSEFDIVLTQSPATLSLSPGDRATISCRASESVTILGSHLIYWYQQKPGQPPRLLIQLASNVQTGVPARFSGSGSRTDFTLTISSVEPEDFAVYYCLQSRTIPRTFGQGTKLEIKRLEIQNPDPAVYQLRDSKSSDKSVCLFTDFDSQTNVSQSKDSDVYITDKCVLDMRSMDFKSNSAVAWSNKSDFACANAFNNSIIPEDTFFPSPESSCDVKLVEKSFETDTNLNFQNLSVIGFRILLLKVAGFNLLMTLRLWSSRAKRSGSGVKQTLNFDLLKLAGDVESNPGPTSMDWIWRILFLVGAATGAHSGPQLQLQESGPGLVKPSETLSLTCTVSGDSISSGDYYWGWIRQPPGKGLEWIGHIYYSGVTYYNPSLKSRVTISVDTSRNQFSLKLSSVTAADTAVYYCTREDSSNWRSRGQGTLVTVSSGSGGGGSGGGGSGGGGSFEQVQLVQSGPEVKKPGESVKISCKASGYTFRHYSMNWVKQAPGQGLKWMGRINTESGVPIYADDFKGRFSFTVDTSASTAYLEISSLTSEDTAVYFCSNDYLYSLDFWGQGTTLTVSSTREDLKNVFPPEVAVFEPSEAEISHTQKATLVCLATGFYPDHVELSWWVNGKEVHSGVCTDPQPLKEQPALNDSRYCLSSRLRVSATFWQNPRNHFRCQVQFYGLSENDEWTQDRAKPVTQIVSAEAWGRADCGFTSESYQQGVLSATILYEILLGKATLYAVLVSALVLMAMVKRKDSRG

SEQ ID NO: 13208 - protein, 899 aa, Artificial Sequence
  Synthetic Polypeptide
MALPVTALLLPLALLLHAARPEVQLVESGGGLVQPGGSLRLSCAASGFSFSDFWMSWVRQAPGKGLEWVATISQAGSEKDYVDSVKGRFTISRDNAKKSLYLQMNSLRAEDTAVYYCASGVYSFDYRGQGTLVTVSSGTGGGGSGGGGSGGGGSEFQSVLTQPPSVSGAPGQRVTISCTGSSSNIGAGFDVHWYQQLPGTAPKLLIYGNSNRPSGVPDRFSGSKSGTSASLAITGLQAEDEADYYCQSYDSSLSGYVFGTGTKVTVLGLEIQNPDPAVYQLRDSKSSDKSVCLFTDFDSQTNVSQSKDSDVYITDKCVLDMRSMDFKSNSAVAWSNKSDFACANAFNNSIIPEDTFFPSPESSCDVKLVEKSFETDTNLNFQNLSVIGFRILLLKVAGFNLLMTLRLWSSRAKRSGSGVKQTLNFDLLKLAGDVESNPGPTSMDWIWRILFLVGAATGAHSGPQLQLQESGPGLVKPSETLSLTCTVSGDSISSGDYYWGWIRQPPGKGLEWIGHIYYSGVTYYNPSLKSRVTISVDTSRNQFSLKLSSVTAADTAVYYCTREDSSNWRSRGQGTLVTVSSGSGGGGSGGGGSGGGGSFEQVQLVQSGAEVKKPGASVKVSCKASGYTFTDYYMHWVRQAPGQRLEWMGWINPNSGGTNYAQKFQDRITVTRDTSSNTGYMELTRLRSDDTAVYYCARSPYSGVLDKWGQGTLVTVSSTREDLKNVFPPEVAVFEPSEAEISHTQKATLVCLATGFYPDHVELSWWVNGKEVHSGVCTDPQPLKEQPALNDSRYCLSSRLRVSATFWQNPRNHFRCQVQFYGLSENDEWTQDRAKPVTQIVSAEAWGRADCGFTSESYQQGVLSATILYEILLGKATLYAVLVSALVLMAMVKRKDSRG

SEQ ID NO: 13209 - protein, 896 aa, Artificial Sequence
  Synthetic Polypeptide
MALPVTALLLPLALLLHAARPEVQLVESGGGLVQPGGSLRLSCAASGFSFSDFWMSWVRQAPGKGLEWVATISQAGSEKDYVDSVKGRFTISRDNAKKSLYLQMNSLRAEDTAVYYCASGVYSFDYRGQGTLVTVSSGTGGGGSGGGGSGGGGSEFQAVLTQPPSASGTPGQRVTISCSGSSSNIGSYTVSWYQQLPGTAPKFLIYSNNQRPSGVPDRFSGSKSGTSASLAISGLQSEDEADYYCAAWDDSLNGYVFGTGTKVTVLGLEIQNPDPAVYQLRDSKSSDKSVCLFTDFDSQTNVSQSKDSDVYITDKCVLDMRSMDFKSNSAVAWSNKSDFACANAFNNSIIPEDTFFPSPESSCDVKLVEKSFETDTNLNFQNLSVIGFRILLLKVAGFNLLMTLRLWSSRAKRSGSGVKQTLNFDLLKLAGDVESNPGPTSMDWIWRILFLVGAATGAHSGPQLQLQESGPGLVKPSETLSLTCTVSGDSISSGDYYWGWIRQPPGKGLEWIGHIYYSGVTYYNPSLKSRVTISVDTSRNQFSLKLSSVTAADTAVYYCTREDSSNWRSRGQGTLVTVSSGSGGGGSGGGGSGGGGSFEVQLVQSGAEVKKPGESLKISCKGSGYDFTTYWIGWVRQMPGKGLEWMGIIYPGDSDTRYSPSVRGRVTISADKSINTAYLQWSSLEASDTAMYYCARMWTFSQDGWGQGTLVTVSSTREDLKNVFPPEVAVFEPSEAEISHTQKATLVCLATGFYPDHVELSWWVNGKEVHSGVCTDPQPLKEQPALNDSRYCLSSRLRVSATFWQNPRNHFRCQVQFYGLSENDEWTQDRAKPVTQIVSAEAWGRADCGFTSESYQQGVLSATILYEILLGKATLYAVLVSALVLMAMVKRKDSRG

SEQ ID NO: 13210 - protein, 899 aa, Artificial Sequence
  Synthetic Polypeptide
MALPVTALLLPLALLLHAARPEVQLVESGGGLVQPGGSLRLSCAASGFSFSDFWMSWVRQAPGKGLEWVATISQAGSEKDYVDSVKGRFTISRDNAKKSLYLQMNSLRAEDTAVYYCASGVYSFDYRGQGTLVTVSSGTGGGGSGGGGSGGGGSEFDIVMTQSPDSLAVSLGERATINCKSSQSILYSSNQKNYLAWYQQKPGQSPKLLIYWASTRESGVPDRFSGSGSGTDFTLTISSLQAEDVAVYYCHQYISSYTFGQGTKLEIKLEIQNPDPAVYQLRDSKSSDKSVCLFTDFDSQTNVSQSKDSDVYITDKCVLDMRSMDFKSNSAVAWSNKSDFACANAFNNSIIPEDTFFPSPESSCDVKLVEKSFETDTNLNFQNLSVIGFRILLLKVAGFNLLMTLRLWSSRAKRSGSGVKQTLNFDLLKLAGDVESNPGPTSMDWIWRILFLVGAATGAHSGPQLQLQESGPGLVKPSETLSLTCTVSGDSISSGDYYWGWIRQPPGKGLEWIGHIYYSGVTYYNPSLKSRVTISVDTSRNQFSLKLSSVTAADTAVYYCTREDSSNWRSRGQGTLVTVSSGSGGGGSGGGGSGGGGSFEQVQLVQSGAEVKKPGASVKVSCKASGYTFASQWMHWMRQAPGQGLEWIGWINPGNVNTKYNEKFKGRATLTVDTSTNTAYMELSSLRSEDTAVYYCARSTWYRPLDYWGQGTLVTVSSTREDLKNVFPPEVAVFEPSEAEISHTQKATLVCLATGFYPDHVELSWWVNGKEVHSGVCTDPQPLKEQPALNDSRYCLSSRLRVSATFWQNPRNHFRCQVQFYGLSENDEWTQDRAKPVTQIVSAEAWGRADCGFTSESYQQGVLSATILYEILLGKATLYAVLVSALVLMAMVKRKDSRG

SEQ ID NO: 13211 - protein, 899 aa, Artificial Sequence
  Synthetic Polypeptide
MALPVTALLLPLALLLHAARPEVQLVESGGGLVQPGGSLRLSCAASGFSFSDFWMSWVRQAPGKGLEWVATISQAGSEKDYVDSVKGRFTISRDNAKKSLYLQMNSLRAEDTAVYYCASGVYSFDYRGQGTLVTVSSGTGGGGSGGGGSGGGGSEFDHIVLTQSPSSLSASLGDRVTISCRASQDISTYLNWYQQKPDGTVKLLIFYTSRLHAGVPSRFSGSGSGTHHSLTISNLEQEDIATYFCQQGNSLPFTFGSGTKLEIKRLEIQNPDPAVYQLRDSKSSDKSVCLFTDFDSQTNVSQSKDSDVYITDKCVLDMRSMDFKSNSAVAWSNKSDFACANAFNNSIIPEDTFFPSPESSCDVKLVEKSFETDTNLNFQNLSVIGFRILLLKVAGFNLLMTLRLWSSRAKRSGSGVKQTLNFDLLKLAGDVESNPGPTSMDWIWRILFLVGAATGAHSGPQLQLQESGPGLVKPSETLSLTCTVSGDSISSGDYYWGWIRQPPGKGLEWIGHIYYSGVTYYNPSLKSRVTISVDTSRNQFSLKLSSVTAADTAVYYCTREDSSNWRSRGQGTLVTVSSGSGGGGSGGGGSGGGGSFEQVQLKESGPELEKPGASVKISCKASGYSFTAYSMNWVKQNNGMSLEWIGSIDPYYGDTKYAQKFKGKATLTVDKASSTAYLQLKSLTSEDSAVYYCARRMITTGDWYFDVWGAGTTVTVSSTREDLKNVFPPEVAVFEPSEAEISHTQKATLVCLATGFYPDHVELSWWVNGKEVHSGVCTDPQPLKEQPALNDSRYCLSSRLRVSATFWQNPRNHFRCQVQFYGLSENDEWTQDRAKPVTQIVSAEAWGRADCGFTSESYQQGVLSATILYEILLGKATLYAVLVSALVLMAMVKRKDSRG

SEQ ID NO: 13212 - protein, 899 aa, Artificial Sequence; identical to SEQ ID NO: 13211
  Synthetic Polypeptide

SEQ ID NO: 13213 - protein, 899 aa, Artificial Sequence
  Synthetic Polypeptide
MALPVTALLLPLALLLHAARPEVQLVESGGGLVQPGGSLRLSCAASGFSFSDFWMSWVRQAPGKGLEWVATISQAGSEKDYVDSVKGRFTISRDNAKKSLYLQMNSLRAEDTAVYYCASGVYSFDYRGQGTLVTVSSGTGGGGSGGGGSGGGGSEFDEIVLTQSPATLSLSPGERATLSCRASQSVSSYLAWYQQKPGQAPRLLIYDASNRATGIPARFSGSGSGTDFTLTISSLEPEDFAVYYCQQRSNWPITFGQGTRLEIKLEIQNPDPAVYQLRDSKSSDKSVCLFTDFDSQTNVSQSKDSDVYITDKCVLDMRSMDFKSNSAVAWSNKSDFACANAFNNSIIPEDTFFPSPESSCDVKLVEKSFETDTNLNFQNLSVIGFRILLLKVAGFNLLMTLRLWSSRAKRSGSGVKQTLNFDLLKLAGDVESNPGPTSMDWIWRILFLVGAATGAHSGPQLQLQESGPGLVKPSETLSLTCTVSGDSISSGDYYWGWIRQPPGKGLEWIGHIYYSGVTYYNPSLKSRVTISVDTSRNQFSLKLSSVTAADTAVYYCTREDSSNWRSRGQGTLVTVSSGSGGGGSGGGGSGGGGSFEEVQLVESGGGLVQPGRSLRLSCAASGFTFNDYAMHWVRQAPGKGLEWVSTISWNSGSIGYADSVKGRFTISRDNAKKSLYLQMNSLRAEDTALYYCAKDIQYGNYYYGMDVWGQGTTVTVSSTREDLKNVFPPEVAVFEPSEAEISHTQKATLVCLATGFYPDHVELSWWVNGKEVHSGVCTDPQPLKEQPALNDSRYCLSSRLRVSATFWQNPRNHFRCQVQFYGLSENDEWTQDRAKPVTQIVSAEAWGRADCGFTSESYQQGVLSATILYEILLGKATLYAVLVSALVLMAMVKRKDSRG

SEQ ID NO: 13214 - protein, 901 aa, Artificial Sequence
  Synthetic Polypeptide
MALPVTALLLPLALLLHAARPEVQLVESGGGLVQPGGSLRLSCAASGFSFSDFWMSWVRQAPGKGLEWVATISQAGSEKDYVDSVKGRFTISRDNAKKSLYLQMNSLRAEDTAVYYCASGVYSFDYRGQGTLVTVSSGTGGGGSGGGGSGGGGSEFDIVMTQTPLSLPVTPGEPASISCRSSKSLLHSNGITYLYWYLQKPGQSPQLLIYQMSNLVSGVPDRFSGSGSGTDFTLKISRVEAEDVGVYYCAQNLELPYTFGGGTKVEIKRLEIQNPDPAVYQLRDSKSSDKSVCLFTDFDSQTNVSQSKDSDVYITDKCVLDMRSMDFKSNSAVAWSNKSDFACANAFNNSIIPEDTFFPSPESSCDVKLVEKSFETDTNLNFQNLSVIGFRILLLKVAGFNLLMTLRLWSSRAKRSGSGVKQTLNFDLLKLAGDVESNPGPTSMDWIWRILFLVGAATGAHSGPQLQLQESGPGLVKPSETLSLTCTVSGDSISSGDYYWGWIRQPPGKGLEWIGHIYYSGVTYYNPSLKSRVTISVDTSRNQFSLKLSSVTAADTAVYYCTREDSSNWRSRGQGTLVTVSSGSGGGGSGGGGSGGGGSFEQVQLVQSGAEVKKPGSSVKVSCKASGYAFSYSWINWVRQAPGQGLEWMGRIFPGDGDTDYNGKFKGRVTITADKSTSTAYMELSSLRSEDTAVYYCARNVFDGYWLVYWGQGTLVTVSSTREDLKNVFPPEVAVFEPSEAEISHTQKATLVCLATGFYPDHVELSWWVNGKEVHSGVCTDPQPLKEQPALNDSRYCLSSRLRVSATFWQNPRNHFRCQVQFYGLSENDEWTQDRAKPVTQIVSAEAWGRADCGFTSESYQQGVLSATILYEILLGKATLYAVLVSALVLMAMVKRKDSRG

SEQ ID NO: 13215 - protein, 902 aa, Artificial Sequence
  Synthetic Polypeptide
MALPVTALLLPLALLLHAARPEVQLVESGGGLVQPGGSLRLSCAASGFSFSDFWMSWVRQAPGKGLEWVATISQAGSEKDYVDSVKGRFTISRDNAKKSLYLQMNSLRAEDTAVYYCASGVYSFDYRGQGTLVTVSSGTGGGGSGGGGSGGGGSEFDIQMTQSPSSLSASVGDRVTITCRSSQSIVHSVGNTFLEWYQQKPGKAPKLLIYKVSNRFSGVPSRFSGSGSGTDFTLTISSLQPEDFATYYCFQGSQFPYTFGQGTKVEIKRLEIQNPDPAVYQLRDSKSSDKSVCLFTDFDSQTNVSQSKDSDVYITDKCVLDMRSMDFKSNSAVAWSNKSDFACANAFNNSIIPEDTFFPSPESSCDVKLVEKSFETDTNLNFQNLSVIGFRILLLKVAGFNLLMTLRLWSSRAKRSGSGVKQTLNFDLLKLAGDVESNPGPTSMDWIWRILFLVGAATGAHSGPQLQLQESGPGLVKPSETLSLTCTVSGDSISSGDYYWGWIRQPPGKGLEWIGHIYYSGVTYYNPSLKSRVTISVDTSRNQFSLKLSSVTAADTAVYYCTREDSSNWRSRGQGTLVTVSSGSGGGGSGGGGSGGGGSFEEVQLVESGGGLVQPGGSLRLSCAASGYEFSRSWMNWVRQAPGKGLEWVGRIYPGDGDTNYSGKFKGRFTISADTSKNTAYLQMNSLRAEDTAVYYCARDGSSWDWYFDVWGQGTLVTVSSTREDLKNVFPPEVAVFEPSEAEISHTQKATLVCLATGFYPDHVELSWWVNGKEVHSGVCTDPQPLKEQPALNDSRYCLSSRLRVSATFWQNPRNHFRCQVQFYGLSENDEWTQDRAKPVTQIVSAEAWGRADCGFTSESYQQGVLSATILYEILLGKATLYAVLVSALVLMAMVKRKDSRG

SEQ ID NO: 13216 - protein, 900 aa, Artificial Sequence
  Synthetic Polypeptide
MALPVTALLLPLALLLHAARPEVQLVESGGGLVQPGGSLRLSCAASGFSFSDFWMSWVRQAPGKGLEWVATISQAGSEKDYVDSVKGRFTISRDNAKKSLYLQMNSLRAEDTAVYYCASGVYSFDYRGQGTLVTVSSGTGGGGSGGGGSGGGGSEFDIQMTQSPSSLSASVGDRVTITCRASQTIWSYLNWYQQRPGKAPNLLIYAASSLQSGVPSRFSGRGSGTDFTLTISSLQAEDFATYYCQQSYSIPQIFGQGTKLEIKLEIQNPDPAVYQLRDSKSSDKSVCLFTDFDSQTNVSQSKDSDVYITDKCVLDMRSMDFKSNSAVAWSNKSDFACANAFNNSIIPEDTFFPSPESSCDVKLVEKSFETDTNLNFQNLSVIGFRILLLKVAGFNLLMTLRLWSSRAKRSGSGVKQTLNFDLLKLAGDVESNPGPTSMDWIWRILFLVGAATGAHSGPQLQLQESGPGLVKPSETLSLTCTVSGDSISSGDYYWGWIRQPPGKGLEWIGHIYYSGVTYYNPSLKSRVTISVDTSRNQFSLKLSSVTAADTAVYYCTREDSSNWRSRGQGTLVTVSSGSGGGGSGGGGSGGGGSFEQVQLQQSGPGLVKPSQTLSLTCAISGDSVSSNSAAWNWIRQSPSRGLEWLGRTYYRSKWYNDYAVSVKSRITINPDTSKNQFSLQLNSVTPEDTAVYYCAREVTGDLEDAFDIWGQGTMVTVSSTREDLKNVFPPEVAVFEPSEAEISHTQKATLVCLATGFYPDHVELSWWVNGKEVHSGVCTDPQPLKEQPALNDSRYCLSSRLRVSATFWQNPRNHFRCQVQFYGLSENDEWTQDRAKPVTQIVSAEAWGRADCGFTSESYQQGVLSATILYEILLGKATLYAVLVSALVLMAMVKRKDSRG

SEQ ID NO: 13217 - protein, 893 aa, Artificial Sequence
  Synthetic Polypeptide
MALPVTALLLPLALLLHAARPEVQLVESGGGLVQPGGSLRLSCAASGFSFSDFWMSWVRQAPGKGLEWVATISQAGSEKDYVDSVKGRFTISRDNAKKSLYLQMNSLRAEDTAVYYCASGVYSFDYRGQGTLVTVSSGTGGGGSGGGGSGGGGSEFDIQMTQSPATIENTSLSASVGDRVTITCRASQGISSWLTWYQQKPEKAPKSLIYAASSLQSGVPSRFSGSGSGTDFTLTISSLQPEDFATYYCQQYDSYPITFGQGTRLEIKLEIQNPDPAVYQLRDSKSSDKSVCLFTDFDSQTNVSQSKDSDVYITDKCVLDMRSMDFKSNSAVAWSNKSDFACANAFNNSIIPEDTFFPSPESSCDVKLVEKSFETDTNLNFQNLSVIGFRILLLKVAGFNLLMTLRLWSSRAKRSGSGVKQTLNFDLLKLAGDVESNPGPTSMDWIWRILFLVGAATGAHSGPQLQLQESGPGLVKPSETLSLTCTVSGDSISSGDYYWGWIRQPPGKGLEWIGHIYYSGVTYYNPSLKSRVTISVDTSRNQFSLKLSSVTAADTAVYYCTREDSSNWRSRGQGTLVTVSSGSGGGGSGGGGSGGGGSFEQVQLQQWGAGLLKPSETLSLTCAVYGGSFSAYYWSWIRQPPGKGLEWIGDINHGGGTNYNPSLKSRVTISVDTSKNQFSLKLNSVTAADTAVYYCASLTAYWGQGSLVTVSSTREDLKNVFPPEVAVFEPSEAEISHTQKATLVCLATGFYPDHVELSWWVNGKEVHSGVCTDPQPLKEQPALNDSRYCLSSRLRVSATFWQNPRNHFRCQVQFYGLSENDEWTQDRAKPVTQIVSAEAWGRADCGFTSESYQQGVLSATILYEILLGKATLYAVLVSALVLMAMVKRKDSRG

SEQ ID NO: 13218 - protein, 898 aa, Artificial Sequence
  Synthetic Polypeptide
MALPVTALLLPLALLLHAARPEVQLVESGGGLVQPGGSLRLSCAASGFSFSDFWMSWVRQAPGKGLEWVATISQAGSEKDYVDSVKGRFTISRDNAKKSLYLQMNSLRAEDTAVYYCASGVYSFDYRGQGTLVTVSSGTGGGGSGGGGSGGGGSEFDEIVLTQSPDSLAVSLGERATINCKASQSVDFDGDSYLNWYQQKPGQPPKVLIYAASTLQSGVPSRFSGSGSGTDFTLTINSLEAEDAATYYCQQSNEDPWTFGGGTKVEIKLEIQNPDPAVYQLRDSKSSDKSVCLFTDFDSQTNVSQSKDSDVYITDKCVLDMRSMDFKSNSAVAWSNKSDFACANAFNNSIIPEDTFFPSPESSCDVKLVEKSFETDTNLNFQNLSVIGFRILLLKVAGFNLLMTLRLWSSRAKRSGSGVKQTLNFDLLKLAGDVESNPGPTSMDWIWRILFLVGAATGAHSGPQLQLQESGPGLVKPSETLSLTCTVSGDSISSGDYYWGWIRQPPGKGLEWIGHIYYSGVTYYNPSLKSRVTISVDTSRNQFSLKLSSVTAADTAVYYCTREDSSNWRSRGQGTLVTVSSGSGGGGSGGGGSGGGGSFEQVQLVQSGAEVKKPGASVKVSCKVSGYTFTDYYITWVRQAPGQALEWMGWIYPGSGNTKYSQKFQGRFVFSVDTSASTAYLQLSSLKAEDTAVYYCANYGNYWFAYWGQGTLVTVSSTREDLKNVFPPEVAVFEPSEAEISHTQKATLVCLATGFYPDHVELSWWVNGKEVHSGVCTDPQPLKEQPALNDSRYCLSSRLRVSATFWQNPRNHFRCQVQFYGLSENDEWTQDRAKPVTQIVSAEAWGRADCGFTSESYQQGVLSATILYEILLGKATLYAVLVSALVLMAMVKRKDSRG

SEQ ID NO: 13219 - protein, 895 aa, Artificial Sequence
  Synthetic Polypeptide
MALPVTALLLPLALLLHAARPEVQLVESGGGLVQPGGSLRLSCAASGFSFSDFWMSWVRQAPGKGLEWVATISQAGSEKDYVDSVKGRFTISRDNAKKSLYLQMNSLRAEDTAVYYCASGVYSFDYRGQGTLVTVSSGTGGGGSGGGGSGGGGSEFDIQMTQSPSSLSASVGDRVTITCRASQGISSWLAWYQQKPEKAPKSLIYAASSLQSGVPSRFSGSGSGTDFTLTISSLQPEDFATYYCQQYNSYPPTFGGGTKVEIKLEIQNPDPAVYQLRDSKSSDKSVCLFTDFDSQTNVSQSKDSDVYITDKCVLDMRSMDFKSNSAVAWSNKSDFACANAFNNSIIPEDTFFPSPESSCDVKLVEKSFETDTNLNFQNLSVIGFRILLLKVAGFNLLMTLRLWSSRAKRSGSGVKQTLNFDLLKLAGDVESNPGPTSMDWIWRILFLVGAATGAHSGPQLQLQESGPGLVKPSETLSLTCTVSGDSISSGDYYWGWIRQPPGKGLEWIGHIYYSGVTYYNPSLKSRVTISVDTSRNQFSLKLSSVTAADTAVYYCTREDSSNWRSRGQGTLVTVSSGSGGGGSGGGGSGGGGSFEEVQLVQSGGGLVHPGGSLRLSCAGSGFAFSSSTMHWIRQAPGKGLEWISLIGSGGGIYYGDSVKGRFTISRDNAKNSLYLQMNSLRAEDMAVYYCVRGYFDWVDYFDYWGQGTLVTVSSTREDLKNVFPPEVAVFEPSEAEISHTQKATLVCLATGFYPDHVELSWWVNGKEVHSGVCTDPQPLKEQPALNDSRYCLSSRLRVSATFWQNPRNHFRCQVQFYGLSENDEWTQDRAKPVTQIVSAEAWGRADCGFTSESYQQGVLSATILYEILLGKATLYAVLVSALVLMAMVKRKDSRG

SEQ ID NO: 13220 - protein, 905 aa, Artificial Sequence
  Synthetic Polypeptide
MALPVTALLLPLALLLHAARPEVQLVESGGGLVQPGGSLRLSCAASGFSFSDFWMSWVRQAPGKGLEWVATISQAGSEKDYVDSVKGRFTISRDNAKKSLYLQMNSLRAEDTAVYYCASGVYSFDYRGQGTLVTVSSGTGGGGSGGGGSGGGGSEFDDIVMTQSPDSLTVSLGERTTINCKSSQSVLDSSKNKNSLAWYQQKPGQPPKLLLSWASTRESGIPDRFSGSGSGTDFTLTIDSLQPEDSATYYCQQSAHFPITFGQGTRLEIKLEIQNPDPAVYQLRDSKSSDKSVCLFTDFDSQTNVSQSKDSDVYITDKCVLDMRSMDFKSNSAVAWSNKSDFACANAFNNSIIPEDTFFPSPESSCDVKLVEKSFETDTNLNFQNLSVIGFRILLLKVAGFNLLMTLRLWSSRAKRSGSGVKQTLNFDLLKLAGDVESNPGPTSMDWIWRILFLVGAATGAHSGPQLQLQESGPGLVKPSETLSLTCTVSGDSISSGDYYWGWIRQPPGKGLEWIGHIYYSGVTYYNPSLKSRVTISVDTSRNQFSLKLSSVTAADTAVYYCTREDSSNWRSRGQGTLVTVSSGSGGGGSGGGGSGGGGSFEQVQLVQSGAEVKKPGASVKVSCKASGYTFTNYGMNWVKQAPGQGLKWMGWINTYTGEPTYADDFKGRVTMTSDTSTSTAYLELHNLRSDDTAVYYCARWSWSDGYYVYFDYWGQGTTVTVSSTREDLKNVFPPEVAVFEPSEAEISHTQKATLVCLATGFYPDHVELSWWVNGKEVHSGVCTDPQPLKEQPALNDSRYCLSSRLRVSATFWQNPRNHFRCQVQFYGLSENDEWTQDRAKPVTQIVSAEAWGRADCGFTSESYQQGVLSATILYEILLGKATLYAVLVSALVLMAMVKRKDSRG

SEQ ID NO: 13221 - protein, 901 aa, Artificial Sequence
  Synthetic Polypeptide
MALPVTALLLPLALLLHAARPEVQLVESGGGLVQPGGSLRLSCAASGFSFSDFWMSWVRQAPGKGLEWVATISQAGSEKDYVDSVKGRFTISRDNAKKSLYLQMNSLRAEDTAVYYCASGVYSFDYRGQGTLVTVSSGTGGGGSGGGGSGGGGSEFDEIVLTQSPGSLAVSPGERVTMSCKSSQSVFFSSSQKNYLAWYQQIPGQSPRLLIYWASTRESGVPDRFTGSGSGTDFTLTISSVQPEDLAIYYCHQYLSSRTFGQGTKLEIKRLEIQNPDPAVYQLRDSKSSDKSVCLFTDFDSQTNVSQSKDSDVYITDKCVLDMRSMDFKSNSAVAWSNKSDFACANAFNNSIIPEDTFFPSPESSCDVKLVEKSFETDTNLNFQNLSVIGFRILLLKVAGFNLLMTLRLWSSRAKRSGSGVKQTLNFDLLKLAGDVESNPGPTSMDWIWRILFLVGAATGAHSGPQLQLQESGPGLVKPSETLSLTCTVSGDSISSGDYYWGWIRQPPGKGLEWIGHIYYSGVTYYNPSLKSRVTISVDTSRNQFSLKLSSVTAADTAVYYCTREDSSNWRSRGQGTLVTVSSGSGGGGSGGGGSGGGGSFEQVQLQQPGAEVVKPGASVKMSCKASGYTFTSYYIHWIKQTPGQGLEWVGVIYPGNDDISYNQKFQGKATLTADKSSTTAYMQLSSLTSEDSAVYYCAREVRLRYFDVWGQGTTVTVSSTREDLKNVFPPEVAVFEPSEAEISHTQKATLVCLATGFYPDHVELSWWVNGKEVHSGVCTDPQPLKEQPALNDSRYCLSSRLRVSATFWQNPRNHFRCQVQFYGLSENDEWTQDRAKPVTQIVSAEAWGRADCGFTSESYQQGVLSATILYEILLGKATLYAVLVSALVLMAMVKRKDSRG

SEQ ID NO: 13222 - protein, 905 aa, Artificial Sequence
  Synthetic Polypeptide
MALPVTALLLPLALLLHAARPEVQLVESGGGLVQPGGSLRLSCAASGFSFSDFWMSWVRQAPGKGLEWVATISQAGSEKDYVDSVKGRFTISRDNAKKSLYLQMNSLRAEDTAVYYCASGVYSFDYRGQGTLVTVSSGTGGGGSGGGGSGGGGSEFDVLLTQSPLSLPVTLGQPASISCRSSQTIVHSNGNTYLEWFQQRPGQSPRLLIYQVSNRFSGVPDRFSGSGSGTDFTLKISRVEAEDVGVYYCFQGSHVPRTFGGGTKVEIKRALEIQNPDPAVYQLRDSKSSDKSVCLFTDFDSQTNVSQSKDSDVYITDKCVLDMRSMDFKSNSAVAWSNKSDFACANAFNNSIIPEDTFFPSPESSCDVKLVEKSFETDTNLNFQNLSVIGFRILLLKVAGFNLLMTLRLWSSRAKRSGSGVKQTLNFDLLKLAGDVESNPGPTSMDWIWRILFLVGAATGAHSGPQLQLQESGPGLVKPSETLSLTCTVSGDSISSGDYYWGWIRQPPGKGLEWIGHIYYSGVTYYNPSLKSRVTISVDTSRNQFSLKLSSVTAADTAVYYCTREDSSNWRSRGQGTLVTVSSGSGGGGSGGGGSGGGGSFEQIQLVQSGSELKKPGASVKVSCKASGYTFTNYGMNWVRQAPGQGLKWMGWINTNTGEPKYAEEFKGRFALSLDTSVSTAYLQINSLKAEDTAVYFCARGYGNYARGAWLAYWGQGTLVTVSSTREDLKNVFPPEVAVFEPSEAEISHTQKATLVCLATGFYPDHVELSWWVNGKEVHSGVCTDPQPLKEQPALNDSRYCLSSRLRVSATFWQNPRNHFRCQVQFYGLSENDEWTQDRAKPVTQIVSAEAWGRADCGFTSESYQQGVLSATILYEILLGKATLYAVLVSALVLMAMVKRKDSRG

SEQ ID NO: 13223 - protein, 890 aa, Artificial Sequence
  Synthetic Polypeptide
MALPVTALLLPLALLLHAARPEVQLVESGGGLVQPGGSLRLSCAASGFSFSDFWMSWVRQAPGKGLEWVATISQAGSEKDYVDSVKGRFTISRDNAKKSLYLQMNSLRAEDTAVYYCASGVYSFDYRGQGTLVTVSSGTGGGGSGGGGSGGGGSEFDEIVLTQSPATLSLSPGERATLSCSASSSINYIYWLQQKPGQAPRILIYLTSNLASGVPARFSGSGSGTDFTLTISSLEPEDFAVYYCLQWSSNPLTFGGGTKVEIKLEIQNPDPAVYQLRDSKSSDKSVCLFTDFDSQTNVSQSKDSDVYITDKCVLDMRSMDFKSNSAVAWSNKSDFACANAFNNSIIPEDTFFPSPESSCDVKLVEKSFETDTNLNFQNLSVIGFRILLLKVAGFNLLMTLRLWSSRAKRSGSGVKQTLNFDLLKLAGDVESNPGPTSMDWIWRILFLVGAATGAHSGPQLQLQESGPGLVKPSETLSLTCTVSGDSISSGDYYWGWIRQPPGKGLEWIGHIYYSGVTYYNPSLKSRVTISVDTSRNQFSLKLSSVTAADTAVYYCTREDSSNWRSRGQGTLVTVSSGSGGGGSGGGGSGGGGSFEEVQLVESGGGLVKPGGSLRLSCAASGFTFSSYDMSWVRQAPGKGLEWVSTISSGGSYTYYLDSIKGRFTISRDNAKNSLYLQMNSLRAEDTAVYYCARQGLDYWGRGTLVTVSSTREDLKNVFPPEVAVFEPSEAEISHTQKATLVCLATGFYPDHVELSWWVNGKEVHSGVCTDPQPLKEQPALNDSRYCLSSRLRVSATFWQNPRNHFRCQVQFYGLSENDEWTQDRAKPVTQIVSAEAWGRADCGFTSESYQQGVLSATILYEILLGKATLYAVLVSALVLMAMVKRKDSRG

SEQ ID NO: 13224 - protein, 899 aa, Artificial Sequence
  Synthetic Polypeptide
MALPVTALLLPLALLLHAARPEVQLVESGGGLVQPGGSLRLSCAASGFSFSDFWMSWVRQAPGKGLEWVATISQAGSEKDYVDSVKGRFTISRDNAKKSLYLQMNSLRAEDTAVYYCASGVYSFDYRGQGTLVTVSSGTGGGGSGGGGSGGGGSEFDIVMTQSPDSLAVSLGERATINCRASKSVSTSGYSFMHWYQQKPGQPPKLLIYLASNLESGVPDRFSGSGSGTDFTLTISSLQAEDVAVYYCQHSREVPWTFGQGTKVEIKRLEIQNPDPAVYQLRDSKSSDKSVCLFTDFDSQTNVSQSKDSDVYITDKCVLDMRSMDFKSNSAVAWSNKSDFACANAFNNSIIPEDTFFPSPESSCDVKLVEKSFETDTNLNFQNLSVIGFRILLLKVAGFNLLMTLRLWSSRAKRSGSGVKQTLNFDLLKLAGDVESNPGPTSMDWIWRILFLVGAATGAHSGPQLQLQESGPGLVKPSETLSLTCTVSGDSISSGDYYWGWIRQPPGKGLEWIGHIYYSGVTYYNPSLKSRVTISVDTSRNQFSLKLSSVTAADTAVYYCTREDSSNWRSRGQGTLVTVSSGSGGGGSGGGGSGGGGSFEQVQLVQSGAEVKKPGASVKVSCKASGYTFTNYGMNWVRQAPGQGLEWMGWINTYTGEPTYADAFKGRFAFSLDTSTSTAYLQINSLRSDDTAVYYCARDYGDYGMDYWGQGTTVTVSSTREDLKNVFPPEVAVFEPSEAEISHTQKATLVCLATGFYPDHVELSWWVNGKEVHSGVCTDPQPLKEQPALNDSRYCLSSRLRVSATFWQNPRNHFRCQVQFYGLSENDEWTQDRAKPVTQIVSAEAWGRADCGFTSESYQQGVLSATILYEILLGKATLYAVLVSALVLMAMVKRKDSRG

SEQ ID NO: 13225 - protein, 895 aa, Artificial Sequence
  Synthetic Polypeptide
MALPVTALLLPLALLLHAARPEVQLVESGGGLVQPGGSLRLSCAASGFSFSDFWMSWVRQAPGKGLEWVATISQAGSEKDYVDSVKGRFTISRDNAKKSLYLQMNSLRAEDTAVYYCASGVYSFDYRGQGTLVTVSSGTGGGGSGGGGSGGGGSEFDIVMTQTPLTLSVTIGQPASISCKSSQSLLDSDGKTYLNWLLQRPGQSPERLIYLVSKLDSGVPDRFTGSGSGTDFTLKISRVEAEDLGVYCCWQGTHFPYTFGGGTKVEIKGLEIQNPDPAVYQLRDSKSSDKSVCLFTDFDSQTNVSQSKDSDVYITDKCVLDMRSMDFKSNSAVAWSNKSDFACANAFNNSIIPEDTFFPSPESSCDVKLVEKSFETDTNLNFQNLSVIGFRILLLKVAGFNLLMTLRLWSSRAKRSGSGVKQTLNFDLLKLAGDVESNPGPTSMDWIWRILFLVGAATGAHSGPQLQLQESGPGLVKPSETLSLTCTVSGDSISSGDYYWGWIRQPPGKGLEWIGHIYYSGVTYYNPSLKSRVTISVDTSRNQFSLKLSSVTAADTAVYYCTREDSSNWRSRGQGTLVTVSSGSGGGGSGGGGSGGGGSFEQVQLQQPGAELVRPGASVKLSCKASGYTFTSYWMNWVKQRPGQGLEWIGMIDPSDSETHYNHIFKDKATLTVDKSSSTAYLQLSSLTSEDSAVYYCARNLYLWGQGTSVTVSSTREDLKNVFPPEVAVFEPSEAEISHTQKATLVCLATGFYPDHVELSWWVNGKEVHSGVCTDPQPLKEQPALNDSRYCLSSRLRVSATFWQNPRNHFRCQVQFYGLSENDEWTQDRAKPVTQIVSAEAWGRADCGFTSESYQQGVLSATILYEILLGKATLYAVLVSALVLMAMVKRKDSRG

SEQ ID NO: 13226 - protein, 903 aa, Artificial Sequence
  Synthetic Polypeptide
MALPVTALLLPLALLLHAARPEVQLVESGGGLVQPGGSLRLSCAASGFSFSDFWMSWVRQAPGKGLEWVATISQAGSEKDYVDSVKGRFTISRDNAKKSLYLQMNSLRAEDTAVYYCASGVYSFDYRGQGTLVTVSSGTGGGGSGGGGSGGGGSEFDIVMTQSPDSLAVSLGERATINCESSQSLLNSGNQKNYLTWYQQKPGQPPKPLIYWASTRESGVPDRFSGSGSGTDFTLTISSLQAEDVAVYYCQNDYSYPYTFGQGTKLEIKRLEIQNPDPAVYQLRDSKSSDKSVCLFTDFDSQTNVSQSKDSDVYITDKCVLDMRSMDFKSNSAVAWSNKSDFACANAFNNSIIPEDTFFPSPESSCDVKLVEKSFETDTNLNFQNLSVIGFRILLLKVAGFNLLMTLRLWSSRAKRSGSGVKQTLNFDLLKLAGDVESNPGPTSMDWIWRILFLVGAATGAHSGPQLQLQESGPGLVKPSETLSLTCTVSGDSISSGDYYWGWIRQPPGKGLEWIGHIYYSGVTYYNPSLKSRVTISVDTSRNQFSLKLSSVTAADTAVYYCTREDSSNWRSRGQGTLVTVSSGSGGGGSGGGGSGGGGSFEEVQLVQSGAEVKKPGESLKISCKGSGYSFTDYYMKWARQMPGKGLEWMGDIIPSNGATFYNQKFKGQVTISADKSISTTYLQWSSLKASDTAMYYCARSHLLRASWFAYWGQGTMVTVSSTREDLKNVFPPEVAVFEPSEAEISHTQKATLVCLATGFYPDHVELSWWVNGKEVHSGVCTDPQPLKEQPALNDSRYCLSSRLRVSATFWQNPRNHFRCQVQFYGLSENDEWTQDRAKPVTQIVSAEAWGRADCGFTSESYQQGVLSATILYEILLGKATLYAVLVSALVLMAMVKRKDSRG

SEQ ID NO: 13227 - protein, 898 aa, Artificial Sequence
  Synthetic Polypeptide
MALPVTALLLPLALLLHAARPEVQLVESGGGLVQPGGSLRLSCAASGFSFSDFWMSWVRQAPGKGLEWVATISQAGSEKDYVDSVKGRFTISRDNAKKSLYLQMNSLRAEDTAVYYCASGVYSFDYRGQGTLVTVSSGTGGGGSGGGGSGGGGSEFDIQMTQSTSSLSASLGDRVTISCSASQGINNYLNWYQQKPDGTVELLIYYTSTLQSGVPSRFSGSGSGTDYSLTISNLEPEDIGTYYCQQYSKLPRTFGGGTKLEIKLEIQNPDPAVYQLRDSKSSDKSVCLFTDFDSQTNVSQSKDSDVYITDKCVLDMRSMDFKSNSAVAWSNKSDFACANAFNNSIIPEDTFFPSPESSCDVKLVEKSFETDTNLNFQNLSVIGFRILLLKVAGFNLLMTLRLWSSRAKRSGSGVKQTLNFDLLKLAGDVESNPGPTSMDWIWRILFLVGAATGAHSGPQLQLQESGPGLVKPSETLSLTCTVSGDSISSGDYYWGWIRQPPGKGLEWIGHIYYSGVTYYNPSLKSRVTISVDTSRNQFSLKLSSVTAADTAVYYCTREDSSNWRSRGQGTLVTVSSGSGGGGSGGGGSGGGGSFEQVQLQQSGSELMMPGASVKISCKATGYTFSNYWIEWVKQRPGHGLEWIGEILPGTGRTIYNEKFKGKATFTADISSNTVQMQLSSLTSEDSAVYYCARRDYYGNFYYAMDYWGQGTSVTVSSTREDLKNVFPPEVAVFEPSEAEISHTQKATLVCLATGFYPDHVELSWWVNGKEVHSGVCTDPQPLKEQPALNDSRYCLSSRLRVSATFWQNPRNHFRCQVQFYGLSENDEWTQDRAKPVTQIVSAEAWGRADCGFTSESYQQGVLSATILYEILLGKATLYAVLVSALVLMAMVKRKDSRG

SEQ ID NO: 13228 - protein, 893 aa, Artificial Sequence
  Synthetic Polypeptide
MALPVTALLLPLALLLHAARPEVQLVESGGGLVQPGGSLRLSCAASGFSFSDFWMSWVRQAPGKGLEWVATISQAGSEKDYVDSVKGRFTISRDNAKKSLYLQMNSLRAEDTAVYYCASGVYSFDYRGQGTLVTVSSGTGGGGSGGGGSGGGGSEFDIQMTQSPASLSVSVGETVTITCRASENIYSNLAWYQQKQGKSPQLLVYAATNLADGVPSRFSGSGSGTQYSLKINSLQSEDFGSYYCQHFWGTWTFGGGTTLEIKLEIQNPDPAVYQLRDSKSSDKSVCLFTDFDSQTNVSQSKDSDVYITDKCVLDMRSMDFKSNSAVAWSNKSDFACANAFNNSIIPEDTFFPSPESSCDVKLVEKSFETDTNLNFQNLSVIGFRILLLKVAGFNLLMTLRLWSSRAKRSGSGVKQTLNFDLLKLAGDVESNPGPTSMDWIWRILFLVGAATGAHSGPQLQLQESGPGLVKPSETLSLTCTVSGDSISSGDYYWGWIRQPPGKGLEWIGHIYYSGVTYYNPSLKSRVTISVDTSRNQFSLKLSSVTAADTAVYYCTREDSSNWRSRGQGTLVTVSSGSGGGGSGGGGSGGGGSFEEVQLQQSGPELVKPGASVKMSCKASGYTFTDYYMKWMKQSHGKSLEWIGDINPNNGGTTYNQKFKGKATLTVDKSSSTAYMQLNSLTSEDSAVYYCARDYGYGYFDYWGQGTTLTVSSTREDLKNVFPPEVAVFEPSEAEISHTQKATLVCLATGFYPDHVELSWWVNGKEVHSGVCTDPQPLKEQPALNDSRYCLSSRLRVSATFWQNPRNHFRCQVQFYGLSENDEWTQDRAKPVTQIVSAEAWGRADCGFTSESYQQGVLSATILYEILLGKATLYAVLVSALVLMAMVKRKDSRG

SEQ ID NO: 13229 - protein, 896 aa, Artificial Sequence
  Synthetic Polypeptide
MALPVTALLLPLALLLHAARPEVQLVESGGGLVQPGGSLRLSCAASGFSFSDFWMSWVRQAPGKGLEWVATISQAGSEKDYVDSVKGRFTISRDNAKKSLYLQMNSLRAEDTAVYYCASGVYSFDYRGQGTLVTVSSGTGGGGSGGGGSGGGGSEFEIVLTQSPGTLSLSPGERATLSCRASQSVGGYLAWYQQKPGQAPRLLIYDASNRATGIPARFSGSGSGTDFTLTISSLEPEDFAVYYCQQRNNWPPMYTFGQGTKLEIKRLEIQNPDPAVYQLRDSKSSDKSVCLFTDFDSQTNVSQSKDSDVYITDKCVLDMRSMDFKSNSAVAWSNKSDFACANAFNNSIIPEDTFFPSPESSCDVKLVEKSFETDTNLNFQNLSVIGFRILLLKVAGFNLLMTLRLWSSRAKRSGSGVKQTLNFDLLKLAGDVESNPGPTSMDWIWRILFLVGAATGAHSGPQLQLQESGPGLVKPSETLSLTCTVSGDSISSGDYYWGWIRQPPGKGLEWIGHIYYSGVTYYNPSLKSRVTISVDTSRNQFSLKLSSVTAADTAVYYCTREDSSNWRSRGQGTLVTVSSGSGGGGSGGGGSGGGGSFEQVQLVQSGAEVKKPGSSVKVSCKASGGTFSSYAISWVRQAPGQGLEWMGGIIPILGTANYAQKFQGRVTITADESTSTAYMELSSLRSEDTAVYYCARWGGGAFDIWGQGTMVTVSSTREDLKNVFPPEVAVFEPSEAEISHTQKATLVCLATGFYPDHVELSWWVNGKEVHSGVCTDPQPLKEQPALNDSRYCLSSRLRVSATFWQNPRNHFRCQVQFYGLSENDEWTQDRAKPVTQIVSAEAWGRADCGFTSESYQQGVLSATILYEILLGKATLYAVLVSALVLMAMVKRKDSRG

SEQ ID NO: 13230 - protein, 891 aa, Artificial Sequence
  Synthetic Polypeptide
MALPVTALLLPLALLLHAARPEVQLVESGGGLVQPGGSLRLSCAASGFSFSDFWMSWVRQAPGKGLEWVATISQAGSEKDYVDSVKGRFTISRDNAKKSLYLQMNSLRAEDTAVYYCASGVYSFDYRGQGTLVTVSSGTGGGGSGGGGSGGGGSEFQIVLTQSPALMSASPGEKVTMTCSASSSVRYMYWYQQKPRSSPKPWIHLTSNLASGVPARFSGSGSGTSYSLTISSMEAEDAATYYCQQWSSHPFTFGSGTKLEIKLEIQNPDPAVYQLRDSKSSDKSVCLFTDFDSQTNVSQSKDSDVYITDKCVLDMRSMDFKSNSAVAWSNKSDFACANAFNNSIIPEDTFFPSPESSCDVKLVEKSFETDTNLNFQNLSVIGFRILLLKVAGFNLLMTLRLWSSRAKRSGSGVKQTLNFDLLKLAGDVESNPGPTSMDWIWRILFLVGAATGAHSGPQLQLQESGPGLVKPSETLSLTCTVSGDSISSGDYYWGWIRQPPGKGLEWIGHIYYSGVTYYNPSLKSRVTISVDTSRNQFSLKLSSVTAADTAVYYCTREDSSNWRSRGQGTLVTVSSGSGGGGSGGGGSGGGGSFEDVQLQESGPGLVKPSQSLSLTCTVTGFSITSDYSWNWIRQFPGNKLEWMGYISYSGHTSYNPSLESRISITRDTSKNQFFLQLNSVTTEDTATYYCTRGNWDVVYWGQGTLVTVSATREDLKNVFPPEVAVFEPSEAEISHTQKATLVCLATGFYPDHVELSWWVNGKEVHSGVCTDPQPLKEQPALNDSRYCLSSRLRVSATFWQNPRNHFRCQVQFYGLSENDEWTQDRAKPVTQIVSAEAWGRADCGFTSESYQQGVLSATILYEILLGKATLYAVLVSALVLMAMVKRKDSRG

SEQ ID NO: 13231 - protein, 901 aa, Artificial Sequence
  Synthetic Polypeptide
MALPVTALLLPLALLLHAARPEVQLVESGGGLVQPGGSLRLSCAASGFSFSDFWMSWVRQAPGKGLEWVATISQAGSEKDYVDSVKGRFTISRDNAKKSLYLQMNSLRAEDTAVYYCASGVYSFDYRGQGTLVTVSSGTGGGGSGGGGSGGGGSEFDVVMTQSPLSLPVTLGQPASISCRSSQSIVHSDGNTYLEWYQQRPGQSPRRLIYKVSNRFSGVPDRFSGSGSGTDFTLKISRVEAEDVGVYYCFQGSHAPWTFGGGTKVEIKLEIQNPDPAVYQLRDSKSSDKSVCLFTDFDSQTNVSQSKDSDVYITDKCVLDMRSMDFKSNSAVAWSNKSDFACANAFNNSIIPEDTFFPSPESSCDVKLVEKSFETDTNLNFQNLSVIGFRILLLKVAGFNLLMTLRLWSSRAKRSGSGVKQTLNFDLLKLAGDVESNPGPTSMDWIWRILFLVGAATGAHSGPQLQLQESGPGLVKPSETLSLTCTVSGDSISSGDYYWGWIRQPPGKGLEWIGHIYYSGVTYYNPSLKSRVTISVDTSRNQFSLKLSSVTAADTAVYYCTREDSSNWRSRGQGTLVTVSSGSGGGGSGGGGSGGGGSFEEVQLVESGGGLVQPGGSLRLSCAASGFTFSSYGMHWVRQAPGKGLEWVAYITTRSSTIYYADSVKGRFTISRDNAKNSLYLQMNSLRAEDTAVYYCTREPLTGYYAMDYWGQGTSVTVSSTREDLKNVFPPEVAVFEPSEAEISHTQKATLVCLATGFYPDHVELSWWVNGKEVHSGVCTDPQPLKEQPALNDSRYCLSSRLRVSATFWQNPRNHFRCQVQFYGLSENDEWTQDRAKPVTQIVSAEAWGRADCGFTSESYQQGVLSATILYEILLGKATLYAVLVSALVLMAMVKRKDSRG

SEQ ID NO: 13232 - protein, 893 aa, Artificial Sequence
  Synthetic Polypeptide
MALPVTALLLPLALLLHAARPEVQLVESGGGLVQPGGSLRLSCAASGFSFSDFWMSWVRQAPGKGLEWVATISQAGSEKDYVDSVKGRFTISRDNAKKSLYLQMNSLRAEDTAVYYCASGVYSFDYRGQGTLVTVSSGTGGGGSGGGGSGGGGSEFDIQMTQSPSSLSASVGDRVTITCRASQSISLWLNWYQQKPGKAPKLLIYAASTLQSGVPSRFSGSGSGTDFTLTISSLQPEDFATYYCQQYYTSPYTFGQGTKVEIKRLEIQNPDPAVYQLRDSKSSDKSVCLFTDFDSQTNVSQSKDSDVYITDKCVLDMRSMDFKSNSAVAWSNKSDFACANAFNNSIIPEDTFFPSPESSCDVKLVEKSFETDTNLNFQNLSVIGFRILLLKVAGFNLLMTLRLWSSRAKRSGSGVKQTLNFDLLKLAGDVESNPGPTSMDWIWRILFLVGAATGAHSGPQLQLQESGPGLVKPSETLSLTCTVSGDSISSGDYYWGWIRQPPGKGLEWIGHIYYSGVTYYNPSLKSRVTISVDTSRNQFSLKLSSVTAADTAVYYCTREDSSNWRSRGQGTLVTVSSGSGGGGSGGGGSGGGGSFEQVQLLESGGGLVQPGGSLRLSCAASGFTFSSYAMSWVRQAPGKGLEWVSVIRSSGSSTYYADSVKGRFTISRDNSKNTLYLQMNSLRAEDTAVYYCARGGGYFDYWGQGTLVTVSSTREDLKNVFPPEVAVFEPSEAEISHTQKATLVCLATGFYPDHVELSWWVNGKEVHSGVCTDPQPLKEQPALNDSRYCLSSRLRVSATFWQNPRNHFRCQVQFYGLSENDEWTQDRAKPVTQIVSAEAWGRADCGFTSESYQQGVLSATILYEILLGKATLYAVLVSALVLMAMVKRKDSRG

SEQ ID NO: 13233 - protein, 896 aa, Artificial Sequence
  Synthetic Polypeptide
MALPVTALLLPLALLLHAARPEVQLVESGGGLVQPGGSLRLSCAASGFSFSDFWMSWVRQAPGKGLEWVATISQAGSEKDYVDSVKGRFTISRDNAKKSLYLQMNSLRAEDTAVYYCASGVYSFDYRGQGTLVTVSSGTGGGGSGGGGSGGGGSEFDIQMTQSPSSLSASVGDRVTITCRASQSISSYLNWYQQKPGKAPKLLIYAVSTLQSGVPSRFSGSGSGTDFTLTISSLQPEDFATYYCQQSGTFPPTTFGQGTKVEIKRLEIQNPDPAVYQLRDSKSSDKSVCLFTDFDSQTNVSQSKDSDVYITDKCVLDMRSMDFKSNSAVAWSNKSDFACANAFNNSIIPEDTFFPSPESSCDVKLVEKSFETDTNLNFQNLSVIGFRILLLKVAGFNLLMTLRLWSSRAKRSGSGVKQTLNFDLLKLAGDVESNPGPTSMDWIWRILFLVGAATGAHSGPQLQLQESGPGLVKPSETLSLTCTVSGDSISSGDYYWGWIRQPPGKGLEWIGHIYYSGVTYYNPSLKSRVTISVDTSRNQFSLKLSSVTAADTAVYYCTREDSSNWRSRGQGTLVTVSSGSGGGGSGGGGSGGGGSFEQVQLLESGGGLVQPGGSLRLSCAASGFTFSSHGMHWVRQAPGKGLEWVSVISGSGSNTGYADSVKGRFTISRDNSKNTLYLQMNSLRAEDTAVYYCARQWGSYAFDSWGQGTLVTVSSTREDLKNVFPPEVAVFEPSEAEISHTQKATLVCLATGFYPDHVELSWWVNGKEVHSGVCTDPQPLKEQPALNDSRYCLSSRLRVSATFWQNPRNHFRCQVQFYGLSENDEWTQDRAKPVTQIVSAEAWGRADCGFTSESYQQGVLSATILYEILLGKATLYAVLVSALVLMAMVKRKDSRG

SEQ ID NO: 13234 - protein, 906 aa, Artificial Sequence
  Synthetic Polypeptide
MALPVTALLLPLALLLHAARPEVQLVESGGGLVQPGGSLRLSCAASGFSFSDFWMSWVRQAPGKGLEWVATISQAGSEKDYVDSVKGRFTISRDNAKKSLYLQMNSLRAEDTAVYYCASGVYSFDYRGQGTLVTVSSGTGGGGSGGGGSGGGGSEFDIVMSQSPSSLAVSVGEKVTMSCKSSQSLLHSSNQKNYLAWYQQKPGQSPKVLIYWASTRESGVPDRFTGSGSGTDFTLTITSVKSEDLAVYYCQQYYSYPWTFGGGTRLEIKRLEIQNPDPAVYQLRDSKSSDKSVCLFTDFDSQTNVSQSKDSDVYITDKCVLDMRSMDFKSNSAVAWSNKSDFACANAFNNSIIPEDTFFPSPESSCDVKLVEKSFETDTNLNFQNLSVIGFRILLLKVAGFNLLMTLRLWSSRAKRSGSGVKQTLNFDLLKLAGDVESNPGPTSMDWIWRILFLVGAATGAHSGPQLQLQESGPGLVKPSETLSLTCTVSGDSISSGDYYWGWIRQPPGKGLEWIGHIYYSGVTYYNPSLKSRVTISVDTSRNQFSLKLSSVTAADTAVYYCTREDSSNWRSRGQGTLVTVSSGSGGGGSGGGGSGGGGSFEEVQLQQSVAELVKPGASVKMSCKVSGYTLTDHTIHWMKQRPEQGLEWIGYIYPRDGITGYNEKFKGKATLTADTSSSTAYMQLNSLTSEDSAVYFCARWGYSYRNYAYYYDYWGQGTTLTVSSTREDLKNVFPPEVAVFEPSEAEISHTQKATLVCLATGFYPDHVELSWWVNGKEVHSGVCTDPQPLKEQPALNDSRYCLSSRLRVSATFWQNPRNHFRCQVQFYGLSENDEWTQDRAKPVTQIVSAEAWGRADCGFTSESYQQGVLSATILYEILLGKATLYAVLVSALVLMAMVKRKDSRG

SEQ ID NO: 13235 - protein, 903 aa, Artificial Sequence
  Synthetic Polypeptide
MALPVTALLLPLALLLHAARPEVQLVESGGGLVQPGGSLRLSCAASGFSFSDFWMSWVRQAPGKGLEWVATISQAGSEKDYVDSVKGRFTISRDNAKKSLYLQMNSLRAEDTAVYYCASGVYSFDYRGQGTLVTVSSGTGGGGSGGGGSGGGGSEFEIVLTQSPGTLSLSPGERATLSCRASQSVSSSYLAWYQQKPGQAPRLLIYGTSSRATGIPDRFSGSGSGTDFTLTISRLEPEDFAVYYCQQYGSSPFTFGGGTKVEIKRLEIQNPDPAVYQLRDSKSSDKSVCLFTDFDSQTNVSQSKDSDVYITDKCVLDMRSMDFKSNSAVAWSNKSDFACANAFNNSIIPEDTFFPSPESSCDVKLVEKSFETDTNLNFQNLSVIGFRILLLKVAGFNLLMTLRLWSSRAKRSGSGVKQTLNFDLLKLAGDVESNPGPTSMDWIWRILFLVGAATGAHSGPQLQLQESGPGLVKPSETLSLTCTVSGDSISSGDYYWGWIRQPPGKGLEWIGHIYYSGVTYYNPSLKSRVTISVDTSRNQFSLKLSSVTAADTAVYYCTREDSSNWRSRGQGTLVTVSSGSGGGGSGGGGSGGGGSFEQVQLQESGPGLAKPSETLSLTCTVSGDSITSYYWSWIRQPPGKGLEWIGYIYYSGSTNYNPSLKSRVTISVDTSKNQFSLKLSSVTAADTAVYYCARDQRRIAAAGTHFYGMDVWGQGTTVTVSSTREDLKNVFPPEVAVFEPSEAEISHTQKATLVCLATGFYPDHVELSWWVNGKEVHSGVCTDPQPLKEQPALNDSRYCLSSRLRVSATFWQNPRNHFRCQVQFYGLSENDEWTQDRAKPVTQIVSAEAWGRADCGFTSESYQQGVLSATILYEILLGKATLYAVLVSALVLMAMVKRKDSRG

SEQ ID NO: 13236 - protein, 895 aa, Artificial Sequence
  Synthetic Polypeptide
MALPVTALLLPLALLLHAARPEVQLVESGGGLVQPGGSLRLSCAASGFSFSDFWMSWVRQAPGKGLEWVATISQAGSEKDYVDSVKGRFTISRDNAKKSLYLQMNSLRAEDTAVYYCASGVYSFDYRGQGTLVTVSSGTGGGGSGGGGSGGGGSEFDILLTQSPVILSVSPGERVSFSCRASQSIGTNIHWYQQRTNGSPRLLIKYASESISGIPSRFSGSGSGTDFTLSINSVESEDIADYYCQQNNNWPTTFGAGTKLELKLEIQNPDPAVYQLRDSKSSDKSVCLFTDFDSQTNVSQSKDSDVYITDKCVLDMRSMDFKSNSAVAWSNKSDFACANAFNNSIIPEDTFFPSPESSCDVKLVEKSFETDTNLNFQNLSVIGFRILLLKVAGFNLLMTLRLWSSRAKRSGSGVKQTLNFDLLKLAGDVESNPGPTSMDWIWRILFLVGAATGAHSGPQLQLQESGPGLVKPSETLSLTCTVSGDSISSGDYYWGWIRQPPGKGLEWIGHIYYSGVTYYNPSLKSRVTISVDTSRNQFSLKLSSVTAADTAVYYCTREDSSNWRSRGQGTLVTVSSGSGGGGSGGGGSGGGGSFEQVQLKQSGPGLVQPSQSLSITCTVSGFSLTNYGVHWVRQSPGKGLEWLGVIWSGGNTDYNTPFTSRLSINKDNSKSQVFFKMNSLQSNDTAIYYCARALTYYDYEFAYWGQGTLVTVSATREDLKNVFPPEVAVFEPSEAEISHTQKATLVCLATGFYPDHVELSWWVNGKEVHSGVCTDPQPLKEQPALNDSRYCLSSRLRVSATFWQNPRNHFRCQVQFYGLSENDEWTQDRAKPVTQIVSAEAWGRADCGFTSESYQQGVLSATILYEILLGKATLYAVLVSALVLMAMVKRKDSRG

SEQ ID NO: 13237 - protein, 888 aa, Artificial Sequence
  Synthetic Polypeptide
MALPVTALLLPLALLLHAARPEVQLVESGGGLVQPGGSLRLSCAASGFSFSDFWMSWVRQAPGKGLEWVATISQAGSEKDYVDSVKGRFTISRDNAKKSLYLQMNSLRAEDTAVYYCASGVYSFDYRGQGTLVTVSSGTGGGGSGGGGSGGGGSEFMTQSPKFLLVSAGDRVTLTCKASQSVNNDVYWYQQEPGQSPKLLIYWASTRESGVPDRFTGSGSGTDFTLTISSVQAEDLAVYYCKQSYNLYTFGGGTKLEIKRLEIQNPDPAVYQLRDSKSSDKSVCLFTDFDSQTNVSQSKDSDVYITDKCVLDMRSMDFKSNSAVAWSNKSDFACANAFNNSIIPEDTFFPSPESSCDVKLVEKSFETDTNLNFQNLSVIGFRILLLKVAGFNLLMTLRLWSSRAKRSGSGVKQTLNFDLLKLAGDVESNPGPTSMDWIWRILFLVGAATGAHSGPQLQLQESGPGLVKPSETLSLTCTVSGDSISSGDYYWGWIRQPPGKGLEWIGHIYYSGVTYYNPSLKSRVTISVDTSRNQFSLKLSSVTAADTAVYYCTREDSSNWRSRGQGTLVTVSSGSGGGGSGGGGSGGGGSFEESGRGLVQPGGSRKLSCAASGFTFSTSGMHWVRQAPEKGLEWVAYISSGSTTIYHADTVKGRFTISRDNPKNTLFLQMTSLRSEDTAMYYCCARSGQFGNYFDYWGQGTTLTVSSTREDLKNVFPPEVAVFEPSEAEISHTQKATLVCLATGFYPDHVELSWWVNGKEVHSGVCTDPQPLKEQPALNDSRYCLSSRLRVSATFWQNPRNHFRCQVQFYGLSENDEWTQDRAKPVTQIVSAEAWGRADCGFTSESYQQGVLSATILYEILLGKATLYAVLVSALVLMAMVKRKDSRG

SEQ ID NO: 13238 - protein, 893 aa, Artificial Sequence
  Synthetic Polypeptide
MALPVTALLLPLALLLHAARPEVQLVESGGGLVQPGGSLRLSCAASGFSFSDFWMSWVRQAPGKGLEWVATISQAGSEKDYVDSVKGRFTISRDNAKKSLYLQMNSLRAEDTAVYYCASGVYSFDYRGQGTLVTVSSGTGGGGSGGGGSGGGGSEFQSPSSLAVSAGEKVTMSCKSSQSLLNSRTRKNYLAWYQQKPGQSPKLLIYWASTRESGVPDRFTGSGSGTDFTLTISSVQAEDLAVYYCKQSNLYTFGGGTKLEIKLEIQNPDPAVYQLRDSKSSDKSVCLFTDFDSQTNVSQSKDSDVYITDKCVLDMRSMDFKSNSAVAWSNKSDFACANAFNNSIIPEDTFFPSPESSCDVKLVEKSFETDTNLNFQNLSVIGFRILLLKVAGFNLLMTLRLWSSRAKRSGSGVKQTLNFDLLKLAGDVESNPGPTSMDWIWRILFLVGAATGAHSGPQLQLQESGPGLVKPSETLSLTCTVSGDSISSGDYYWGWIRQPPGKGLEWIGHIYYSGVTYYNPSLKSRVTISVDTSRNQFSLKLSSVTAADTAVYYCTREDSSNWRSRGQGTLVTVSSGSGGGGSGGGGSGGGGSFEQVQLEESGPELVKPGASVKLSCKASGYTFTEYIIHWVKQRSGQGLEWIGWFYPGSGSIKYNEKFKDKATLTADKSSSTVYMELSGLTSEDSAVYFCARHDGYSYFDYWGQGTTLTVSSTREDLKNVFPPEVAVFEPSEAEISHTQKATLVCLATGFYPDHVELSWWVNGKEVHSGVCTDPQPLKEQPALNDSRYCLSSRLRVSATFWQNPRNHFRCQVQFYGLSENDEWTQDRAKPVTQIVSAEAWGRADCGFTSESYQQGVLSATILYEILLGKATLYAVLVSALVLMAMVKRKDSRG

SEQ ID NO: 13239 - protein, 896 aa, Artificial Sequence
  Synthetic Polypeptide
MALPVTALLLPLALLLHAARPEVQLVESGGGLVQPGGSLRLSCAASGFSFSDFWMSWVRQAPGKGLEWVATISQAGSEKDYVDSVKGRFTISRDNAKKSLYLQMNSLRAEDTAVYYCASGVYSFDYRGQGTLVTVSSGTGGGGSGGGGSGGGGSEFDIQMTQSPSSLSASLGERVSLTCRATQELSGYLSWLQQKPDGTIKRLIYAASTLDSGVPKRFSGNRSGSDYSLTISSLESEDFADYYCLQYAIYPYTFGGGTKLEIKLEIQNPDPAVYQLRDSKSSDKSVCLFTDFDSQTNVSQSKDSDVYITDKCVLDMRSMDFKSNSAVAWSNKSDFACANAFNNSIIPEDTFFPSPESSCDVKLVEKSFETDTNLNFQNLSVIGFRILLLKVAGFNLLMTLRLWSSRAKRSGSGVKQTLNFDLLKLAGDVESNPGPTSMDWIWRILFLVGAATGAHSGPQLQLQESGPGLVKPSETLSLTCTVSGDSISSGDYYWGWIRQPPGKGLEWIGHIYYSGVTYYNPSLKSRVTISVDTSRNQFSLKLSSVTAADTAVYYCTREDSSNWRSRGQGTLVTVSSGSGGGGSGGGGSGGGGSFEEVQLQQSGPELVKPGASVKMSCKASGYTFTSYFIHWVKQKPGQGLEWIGFINPYNDGSKYNEKFKGKATLTSDKSSSTAYMELSSLTSEDSAVYYCTRDDGYYGYAMDYWGQGTSVTVSSTREDLKNVFPPEVAVFEPSEAEISHTQKATLVCLATGFYPDHVELSWWVNGKEVHSGVCTDPQPLKEQPALNDSRYCLSSRLRVSATFWQNPRNHFRCQVQFYGLSENDEWTQDRAKPVTQIVSAEAWGRADCGFTSESYQQGVLSATILYEILLGKATLYAVLVSALVLMAMVKRKDSRG

SEQ ID NO: 13240 - protein, 901 aa, Artificial Sequence
  Synthetic Polypeptide
MALPVTALLLPLALLLHAARPEVQLVESGGGLVQPGGSLRLSCAASGFSFSDFWMSWVRQAPGKGLEWVATISQAGSEKDYVDSVKGRFTISRDNAKKSLYLQMNSLRAEDTAVYYCASGVYSFDYRGQGTLVTVSSGTGGGGSGGGGSGGGGSEFDTIVLTQSPASLAVSLGQRATISCRASESVDSYGNSFMHWYQQKPGQPPKLLIYLASNLESGVPARFSGSGSRTDFTLTIDPVEADDAATYYCQQNNYDPWTFGGGTKLEIKLEIQNPDPAVYQLRDSKSSDKSVCLFTDFDSQTNVSQSKDSDVYITDKCVLDMRSMDFKSNSAVAWSNKSDFACANAFNNSIIPEDTFFPSPESSCDVKLVEKSFETDTNLNFQNLSVIGFRILLLKVAGFNLLMTLRLWSSRAKRSGSGVKQTLNFDLLKLAGDVESNPGPTSMDWIWRILFLVGAATGAHSGPQLQLQESGPGLVKPSETLSLTCTVSGDSISSGDYYWGWIRQPPGKGLEWIGHIYYSGVTYYNPSLKSRVTISVDTSRNQFSLKLSSVTAADTAVYYCTREDSSNWRSRGQGTLVTVSSGSGGGGSGGGGSGGGGSFEEVQLQQSGPELVKPGASVKMSCKASGYTFTSYVMHWVKQKPGQGLEWIGYINPYNDGTKYNEKFKGKATLTSDTSSSTAYMELNSLTSEDSAVYFCARPIYFDNDYFDYWGQGTTLKVSSTREDLKNVFPPEVAVFEPSEAEISHTQKATLVCLATGFYPDHVELSWWVNGKEVHSGVCTDPQPLKEQPALNDSRYCLSSRLRVSATFWQNPRNHFRCQVQFYGLSENDEWTQDRAKPVTQIVSAEAWGRADCGFTSESYQQGVLSATILYEILLGKATLYAVLVSALVLMAMVKRKDSRG

SEQ ID NO: 13241 - protein, 896 aa, Artificial Sequence
  Synthetic Polypeptide
MALPVTALLLPLALLLHAARPEVQLVESGGGLVQPGGSLRLSCAASGFSFSDFWMSWVRQAPGKGLEWVATISQAGSEKDYVDSVKGRFTISRDNAKKSLYLQMNSLRAEDTAVYYCASGVYSFDYRGQGTLVTVSSGTGGGGSGGGGSGGGGSEFDIQMTQSPSSLSASVGDRVTITCKASQDVGIAVAWYQQKPGKVPKLLIYWASTRHTGVPDRFSGSGSGTDFTLTISSLQPEDVATYYCQQYSSYPYTFGQGTKVEIKRLEIQNPDPAVYQLRDSKSSDKSVCLFTDFDSQTNVSQSKDSDVYITDKCVLDMRSMDFKSNSAVAWSNKSDFACANAFNNSIIPEDTFFPSPESSCDVKLVEKSFETDTNLNFQNLSVIGFRILLLKVAGFNLLMTLRLWSSRAKRSGSGVKQTLNFDLLKLAGDVESNPGPTSMDWIWRILFLVGAATGAHSGPQLQLQESGPGLVKPSETLSLTCTVSGDSISSGDYYWGWIRQPPGKGLEWIGHIYYSGVTYYNPSLKSRVTISVDTSRNQFSLKLSSVTAADTAVYYCTREDSSNWRSRGQGTLVTVSSGSGGGGSGGGGSGGGGSFEEVQLVESGGGLVQPGGSLRLSCAASGFDFSRYWMSWVRQAPGKGLEWIGEINPDSSTINYAPSLKDKFIISRDNAKNSLYLQMNSLRAEDTAVYYCARPDGNYWYFDVWGQGTLVTVSSTREDLKNVFPPEVAVFEPSEAEISHTQKATLVCLATGFYPDHVELSWWVNGKEVHSGVCTDPQPLKEQPALNDSRYCLSSRLRVSATFWQNPRNHFRCQVQFYGLSENDEWTQDRAKPVTQIVSAEAWGRADCGFTSESYQQGVLSATILYEILLGKATLYAVLVSALVLMAMVKRKDSRG

SEQ ID NO: 13242 - protein, 896 aa, Artificial Sequence
  Synthetic Polypeptide
MALPVTALLLPLALLLHAARPEVQLVESGGGLVQPGGSLRLSCAASGFSFSDFWMSWVRQAPGKGLEWVATISQAGSEKDYVDSVKGRFTISRDNAKKSLYLQMNSLRAEDTAVYYCASGVYSFDYRGQGTLVTVSSGTGGGGSGGGGSGGGGSEFDIVMTQSQKSMSTSVGDRVSITCKASQDVITGVAWYQQKPGQSPKLLIYSASYRYTGVPDRFTGSGSGTDFTFTISNVQAEDLAVYYCQQHYSTPLTFGAGTKLELKLEIQNPDPAVYQLRDSKSSDKSVCLFTDFDSQTNVSQSKDSDVYITDKCVLDMRSMDFKSNSAVAWSNKSDFACANAFNNSIIPEDTFFPSPESSCDVKLVEKSFETDTNLNFQNLSVIGFRILLLKVAGFNLLMTLRLWSSRAKRSGSGVKQTLNFDLLKLAGDVESNPGPTSMDWIWRILFLVGAATGAHSGPQLQLQESGPGLVKPSETLSLTCTVSGDSISSGDYYWGWIRQPPGKGLEWIGHIYYSGVTYYNPSLKSRVTISVDTSRNQFSLKLSSVTAADTAVYYCTREDSSNWRSRGQGTLVTVSSGSGGGGSGGGGSGGGGSFEQVQLQQPGAELVRPGASVKLSCKASGYSFTTYWMNWVKQRPGQGLEWIGMIHPSDSETRLNQKFKDKATLTVDKSSSTAYMQLSSPTSEDSAVYYCARSTMIATRAMDYWGQGTSVTVSSTREDLKNVFPPEVAVFEPSEAEISHTQKATLVCLATGFYPDHVELSWWVNGKEVHSGVCTDPQPLKEQPALNDSRYCLSSRLRVSATFWQNPRNHFRCQVQFYGLSENDEWTQDRAKPVTQIVSAEAWGRADCGFTSESYQQGVLSATILYEILLGKATLYAVLVSALVLMAMVKRKDSRG

SEQ ID NO: 13243 - protein, 902 aa, Artificial Sequence
  Synthetic Polypeptide
MALPVTALLLPLALLLHAARPEVQLVESGGGLVQPGGSLRLSCAASGFSFSDFWMSWVRQAPGKGLEWVATISQAGSEKDYVDSVKGRFTISRDNAKKSLYLQMNSLRAEDTAVYYCASGVYSFDYRGQGTLVTVSSGTGGGGSGGGGSGGGGSEFQSVLTQPPSVSGAPGQRVTISCTGSGSNIGAPYDVSWYQQLPGTAPKLLIYHNNKRPSGVPDRFSGSKSGTSASLAITGLQAEDEADYYCATVEAGLSGSVFGGGTKLTVLGALEIQNPDPAVYQLRDSKSSDKSVCLFTDFDSQTNVSQSKDSDVYITDKCVLDMRSMDFKSNSAVAWSNKSDFACANAFNNSIIPEDTFFPSPESSCDVKLVEKSFETDTNLNFQNLSVIGFRILLLKVAGFNLLMTLRLWSSRAKRSGSGVKQTLNFDLLKLAGDVESNPGPTSMDWIWRILFLVGAATGAHSGPQLQLQESGPGLVKPSETLSLTCTVSGDSISSGDYYWGWIRQPPGKGLEWIGHIYYSGVTYYNPSLKSRVTISVDTSRNQFSLKLSSVTAADTAVYYCTREDSSNWRSRGQGTLVTVSSGSGGGGSGGGGSGGGGSFEQVQLVQSGAEVKKPGASVKVSCKVSGYTLTELSIHWVRQAPGKGLEWMGGFDPEENEIVYAQRFQGRVTMTEDTSTDTAYMELSSLRSEDTAVYYCAIVGSFSPLTLGLWGQGTMVTVSSTREDLKNVFPPEVAVFEPSEAEISHTQKATLVCLATGFYPDHVELSWWVNGKEVHSGVCTDPQPLKEQPALNDSRYCLSSRLRVSATFWQNPRNHFRCQVQFYGLSENDEWTQDRAKPVTQIVSAEAWGRADCGFTSESYQQGVLSATILYEILLGKATLYAVLVSALVLMAMVKRKDSRG

SEQ ID NO: 13244 - protein, 902 aa, Artificial Sequence
  Synthetic Polypeptide
MALPVTALLLPLALLLHAARPEVQLVESGGGLVQPGGSLRLSCAASGFSFSDFWMSWVRQAPGKGLEWVATISQAGSEKDYVDSVKGRFTISRDNAKKSLYLQMNSLRAEDTAVYYCASGVYSFDYRGQGTLVTVSSGTGGGGSGGGGSGGGGSEFQSVLTQPPSVSGAPGQRVTISCTGSGSNIGAPYDVSWYQQLPGTAPKLLIYHNNKRPSGVPDRFSGSKSGTSASLAITGLQAEDEADYYCQSYDSSSISTIFGGGTKLTVLGALEIQNPDPAVYQLRDSKSSDKSVCLFTDFDSQTNVSQSKDSDVYITDKCVLDMRSMDFKSNSAVAWSNKSDFACANAFNNSIIPEDTFFPSPESSCDVKLVEKSFETDTNLNFQNLSVIGFRILLLKVAGFNLLMTLRLWSSRAKRSGSGVKQTLNFDLLKLAGDVESNPGPTSMDWIWRILFLVGAATGAHSGPQLQLQESGPGLVKPSETLSLTCTVSGDSISSGDYYWGWIRQPPGKGLEWIGHIYYSGVTYYNPSLKSRVTISVDTSRNQFSLKLSSVTAADTAVYYCTREDSSNWRSRGQGTLVTVSSGSGGGGSGGGGSGGGGSFEQVQLVQSGAEVKKPGASVKVSCKVSGYTLTELSIHWVRQAPGKGLEWMGGFDPEENEIVYAQRFQGRVTMTEDTSTDTAYMELSSLRSEDTAVYYCAIVGSFSGIAYRPWGQGTMVTVSSTREDLKNVFPPEVAVFEPSEAEISHTQKATLVCLATGFYPDHVELSWWVNGKEVHSGVCTDPQPLKEQPALNDSRYCLSSRLRVSATFWQNPRNHFRCQVQFYGLSENDEWTQDRAKPVTQIVSAEAWGRADCGFTSESYQQGVLSATILYEILLGKATLYAVLVSALVLMAMVKRKDSRG

SEQ ID NO: 13245 - protein, 890 aa, Artificial Sequence
  Synthetic Polypeptide
MALPVTALLLPLALLLHAARPEVQLVESGGGLVQPGGSLRLSCAASGFSFSDFWMSWVRQAPGKGLEWVATISQAGSEKDYVDSVKGRFTISRDNAKKSLYLQMNSLRAEDTAVYYCASGVYSFDYRGQGTLVTVSSGTGGGGSGGGGSGGGGSEFDIQMTQSPSSLSASVGDRVTITCRASQGIRNNLAWYQQKPGKAPKRLIYAASNLQSGVPSRFTGSGSGTEFTLIVSSLQPEDFATYYCLQHHSYPLTSGGGTKVELEIQNPDPAVYQLRDSKSSDKSVCLFTDFDSQTNVSQSKDSDVYITDKCVLDMRSMDFKSNSAVAWSNKSDFACANAFNNSIIPEDTFFPSPESSCDVKLVEKSFETDTNLNFQNLSVIGFRILLLKVAGFNLLMTLRLWSSRAKRSGSGVKQTLNFDLLKLAGDVESNPGPTSMDWIWRILFLVGAATGAHSGPQLQLQESGPGLVKPSETLSLTCTVSGDSISSGDYYWGWIRQPPGKGLEWIGHIYYSGVTYYNPSLKSRVTISVDTSRNQFSLKLSSVTAADTAVYYCTREDSSNWRSRGQGTLVTVSSGSGGGGSGGGGSGGGGSFEEVQVLESGGGLVQPGGSLRLSCAASGFTFSSYAMSWVRQAPGKGLEWVSAISGSGGSTNYADSVKGRFTISRDNSKNTLYLQMNSLRAEDTAVYYCAGSSGWSEYWGQGTLVTVSSTREDLKNVFPPEVAVFEPSEAEISHTQKATLVCLATGFYPDHVELSWWVNGKEVHSGVCTDPQPLKEQPALNDSRYCLSSRLRVSATFWQNPRNHFRCQVQFYGLSENDEWTQDRAKPVTQIVSAEAWGRADCGFTSESYQQGVLSATILYEILLGKATLYAVLVSALVLMAMVKRKDSRG

SEQ ID NO: 13246 - protein, 896 aa, Artificial Sequence
  Synthetic Polypeptide
MALPVTALLLPLALLLHAARPEVQLVESGGGLVQPGGSLRLSCAASGFSFSDFWMSWVRQAPGKGLEWVATISQAGSEKDYVDSVKGRFTISRDNAKKSLYLQMNSLRAEDTAVYYCASGVYSFDYRGQGTLVTVSSGTGGGGSGGGGSGGGGSEFDEIQLVQSGAEVKKPGESLRISCKGSGFNIEDYYIHWVRQMPGKGLEWMGRIDPENDETKYGPIFQGHVTISADTSINTVYLQWSSLKASDTAMYYCAFRGGVYWGQGTTVTVSSLEIQNPDPAVYQLRDSKSSDKSVCLFTDFDSQTNVSQSKDSDVYITDKCVLDMRSMDFKSNSAVAWSNKSDFACANAFNNSIIPEDTFFPSPESSCDVKLVEKSFETDTNLNFQNLSVIGFRILLLKVAGFNLLMTLRLWSSRAKRSGSGVKQTLNFDLLKLAGDVESNPGPTSMDWIWRILFLVGAATGAHSGPQLQLQESGPGLVKPSETLSLTCTVSGDSISSGDYYWGWIRQPPGKGLEWIGHIYYSGVTYYNPSLKSRVTISVDTSRNQFSLKLSSVTAADTAVYYCTREDSSNWRSRGQGTLVTVSSGSGGGGSGGGGSGGGGSFEDVVMTQSPDSLAVSLGERATINCKSSQSLLDSDGKTYLNWLQQKPGQPPKRLISLVSKLDSGVPDRFSGSGSGTDFTLTISSLQAEDVAVYYCWQGTHFPGTFGGGTKVEIKTREDLKNVFPPEVAVFEPSEAEISHTQKATLVCLATGFYPDHVELSWWVNGKEVHSGVCTDPQPLKEQPALNDSRYCLSSRLRVSATFWQNPRNHFRCQVQFYGLSENDEWTQDRAKPVTQIVSAEAWGRADCGFTSESYQQGVLSATILYEILLGKATLYAVLVSALVLMAMVKRKDSRG

SEQ ID NO: 13247 - protein, 903 aa, Artificial Sequence
  Synthetic Polypeptide
MALPVTALLLPLALLLHAARPEVQLVESGGGLVQPGGSLRLSCAASGFSFSDFWMSWVRQAPGKGLEWVATISQAGSEKDYVDSVKGRFTISRDNAKKSLYLQMNSLRAEDTAVYYCASGVYSFDYRGQGTLVTVSSGTGGGGSGGGGSGGGGSEFDELVMTQSPSSLTVTAGEKVTMSCKSSQSLLNSGNQKNYLTWYQQKPGQPPKLLIYWASTRESGVPDRFTGSGSGTDFTLTISSVQAEDLAVYYCQNDYSYPLTFGAGTKLEIKLEIQNPDPAVYQLRDSKSSDKSVCLFTDFDSQTNVSQSKDSDVYITDKCVLDMRSMDFKSNSAVAWSNKSDFACANAFNNSIIPEDTFFPSPESSCDVKLVEKSFETDTNLNFQNLSVIGFRILLLKVAGFNLLMTLRLWSSRAKRSGSGVKQTLNFDLLKLAGDVESNPGPTSMDWIWRILFLVGAATGAHSGPQLQLQESGPGLVKPSETLSLTCTVSGDSISSGDYYWGWIRQPPGKGLEWIGHIYYSGVTYYNPSLKSRVTISVDTSRNQFSLKLSSVTAADTAVYYCTREDSSNWRSRGQGTLVTVSSGSGGGGSGGGGSGGGGSFEEVQLLEQSGAELVRPGTSVKISCKASGYAFTNYWLGWVKQRPGHGLEWIGDIFPGSGNIHYNEKFKGKATLTADKSSSTAYMQLSSLTFEDSAVYFCARLRNWDEPMDYWGQGTTVTVSSTREDLKNVFPPEVAVFEPSEAEISHTQKATLVCLATGFYPDHVELSWWVNGKEVHSGVCTDPQPLKEQPALNDSRYCLSSRLRVSATFWQNPRNHFRCQVQFYGLSENDEWTQDRAKPVTQIVSAEAWGRADCGFTSESYQQGVLSATILYEILLGKATLYAVLVSALVLMAMVKRKDSRG

SEQ ID NO: 13248 - protein, 904 aa, Artificial Sequence
  Synthetic Polypeptide
MALPVTALLLPLALLLHAARPEVQLVESGGGLVQPGGSLRLSCAASGFSFSDFWMSWVRQAPGKGLEWVATISQAGSEKDYVDSVKGRFTISRDNAKKSLYLQMNSLRAEDTAVYYCASGVYSFDYRGQGTLVTVSSGTGGGGSGGGGSGGGGSEFDELQMTQSPSSLSASVGDRVTITCRASQSISSYLNWYQQKPGQPPKLLIYWASTRESGVPDRFSGSESGTNYTLTISSLQPEDFATYFCQQSDSLPITFGQGTRLDIQLEIQNPDPAVYQLRDSKSSDKSVCLFTDFDSQTNVSQSKDSDVYITDKCVLDMRSMDFKSNSAVAWSNKSDFACANAFNNSIIPEDTFFPSPESSCDVKLVEKSFETDTNLNFQNLSVIGFRILLLKVAGFNLLMTLRLWSSRAKRSGSGVKQTLNFDLLKLAGDVESNPGPTSMDWIWRILFLVGAATGAHSGPQLQLQESGPGLVKPSETLSLTCTVSGDSISSGDYYWGWIRQPPGKGLEWIGHIYYSGVTYYNPSLKSRVTISVDTSRNQFSLKLSSVTAADTAVYYCTREDSSNWRSRGQGTLVTVSSGSGGGGSGGGGSGGGGSFEEVQLLESGGGVVQPGRSLRLSCAASGFTFSSYGMHWVRQAPGKGLEWVAVISYDGSNKYYADSVKGRFTISRDNSKNTLYLQMNSLRAEDTAVYYCAKDMGWGSGWRPYYYYGMDVWGQGTTVTVSSTREDLKNVFPPEVAVFEPSEAEISHTQKATLVCLATGFYPDHVELSWWVNGKEVHSGVCTDPQPLKEQPALNDSRYCLSSRLRVSATFWQNPRNHFRCQVQFYGLSENDEWTQDRAKPVTQIVSAEAWGRADCGFTSESYQQGVLSATILYEILLGKATLYAVLVSALVLMAMVKRKDSRG

SEQ ID NO: 13249 - protein, 901 aa, Artificial Sequence
  Synthetic Polypeptide
MALPVTALLLPLALLLHAARPEVQLVESGGGLVQPGGSLRLSCAASGFSFSDFWMSWVRQAPGKGLEWVATISQAGSEKDYVDSVKGRFTISRDNAKKSLYLQMNSLRAEDTAVYYCASGVYSFDYRGQGTLVTVSSGTGGGGSGGGGSGGGGSEFDDIQMTQSPSSLSASVGDRVTITCRASQSISSYLNWYQQKPGKAPKLLIYAASSLQSGVPSRFSGSGSGTDFTLTISSLQPEDLATYYCQQSYSTPFTFGPGTKVDIKLEIQNPDPAVYQLRDSKSSDKSVCLFTDFDSQTNVSQSKDSDVYITDKCVLDMRSMDFKSNSAVAWSNKSDFACANAFNNSIIPEDTFFPSPESSCDVKLVEKSFETDTNLNFQNLSVIGFRILLLKVAGFNLLMTLRLWSSRAKRSGSGVKQTLNFDLLKLAGDVESNPGPTSMDWIWRILFLVGAATGAHSGPQLQLQESGPGLVKPSETLSLTCTVSGDSISSGDYYWGWIRQPPGKGLEWIGHIYYSGVTYYNPSLKSRVTISVDTSRNQFSLKLSSVTAADTAVYYCTREDSSNWRSRGQGTLVTVSSGSGGGGSGGGGSGGGGSFEVHEVQLVQSGAEVKKPGSSVKVSCKASGGTFSSYAISWVRQAPGQGLEWMGGIIPIFGTANYAQKFQGRVTITADKSTSTAYMELSSLRSEDTAVYYCATFALFGFREQAFDIWGQGTTVTVSSTREDLKNVFPPEVAVFEPSEAEISHTQKATLVCLATGFYPDHVELSWWVNGKEVHSGVCTDPQPLKEQPALNDSRYCLSSRLRVSATFWQNPRNHFRCQVQFYGLSENDEWTQDRAKPVTQIVSAEAWGRADCGFTSESYQQGVLSATILYEILLGKATLYAVLVSALVLMAMVKRKDSRG

SEQ ID NO: 13250 - protein, 899 aa, Artificial Sequence
  Synthetic Polypeptide
MALPVTALLLPLALLLHAARPEVQLVESGGGLVQPGGSLRLSCAASGFSFSDFWMSWVRQAPGKGLEWVATISQAGSEKDYVDSVKGRFTISRDNAKKSLYLQMNSLRAEDTAVYYCASGVYSFDYRGQGTLVTVSSGTGGGGSGGGGSGGGGSEFDIVLTQSPLSLAVSLGQPAIISCKASQSVSFAGTSLMHWYHQKPGQQPRLLIYRASNLEAGVPDRFSGSGSKTDFTLTISPVEAEDAATYYCQQSREYPYTFGGGTKLEIKRLEIQNPDPAVYQLRDSKSSDKSVCLFTDFDSQTNVSQSKDSDVYITDKCVLDMRSMDFKSNSAVAWSNKSDFACANAFNNSIIPEDTFFPSPESSCDVKLVEKSFETDTNLNFQNLSVIGFRILLLKVAGFNLLMTLRLWSSRAKRSGSGVKQTLNFDLLKLAGDVESNPGPTSMDWIWRILFLVGAATGAHSGPQLQLQESGPGLVKPSETLSLTCTVSGDSISSGDYYWGWIRQPPGKGLEWIGHIYYSGVTYYNPSLKSRVTISVDTSRNQFSLKLSSVTAADTAVYYCTREDSSNWRSRGQGTLVTVSSGSGGGGSGGGGSGGGGSFEQVQLVQSGAEVVKPGASVKISCKASGYTFTGYFMNWVKQSPGQSLEWIGRIHPYDGDTFYNQKFQGKATLTVDKSSNTAHMELLSLTSEDFAVYYCTRYDGSRAMDYWGQGTTVTVSSTREDLKNVFPPEVAVFEPSEAEISHTQKATLVCLATGFYPDHVELSWWVNGKEVHSGVCTDPQPLKEQPALNDSRYCLSSRLRVSATFWQNPRNHFRCQVQFYGLSENDEWTQDRAKPVTQIVSAEAWGRADCGFTSESYQQGVLSATILYEILLGKATLYAVLVSALVLMAMVKRKDSRG

SEQ ID NO: 13251 - protein, 896 aa, Artificial Sequence
  Synthetic Polypeptide
MALPVTALLLPLALLLHAARPEVQLVESGGGLVQPGGSLRLSCAASGFSFSDFWMSWVRQAPGKGLEWVATISQAGSEKDYVDSVKGRFTISRDNAKKSLYLQMNSLRAEDTAVYYCASGVYSFDYRGQGTLVTVSSGTGGGGSGGGGSGGGGSEFDDVVMTQTPLSLPVTPGEPASISCRSSQSLVHRNGNTYLHWYLQKPGQSPKLLIHKVSNRFSGVPDRFSGSGSGTDFTLKISRVEAEDLGVYFCSQSTHVPPLTFGAGTKLELKLEIQNPDPAVYQLRDSKSSDKSVCLFTDFDSQTNVSQSKDSDVYITDKCVLDMRSMDFKSNSAVAWSNKSDFACANAFNNSIIPEDTFFPSPESSCDVKLVEKSFETDTNLNFQNLSVIGFRILLLKVAGFNLLMTLRLWSSRAKRSGSGVKQTLNFDLLKLAGDVESNPGPTSMDWIWRILFLVGAATGAHSGPQLQLQESGPGLVKPSETLSLTCTVSGDSISSGDYYWGWIRQPPGKGLEWIGHIYYSGVTYYNPSLKSRVTISVDTSRNQFSLKLSSVTAADTAVYYCTREDSSNWRSRGQGTLVTVSSGSGGGGSGGGGSGGGGSFEEVQLVQSGAEVEKPGASVKISCKASGSSFTGYNMNWVRQNIGKSLEWIGAIDPYYGGTSYNQKFKGRATLTVDKSTSTAYMHLKSLRSEDTAVYYCVSGMEYWGQGTSVTVSSTREDLKNVFPPEVAVFEPSEAEISHTQKATLVCLATGFYPDHVELSWWVNGKEVHSGVCTDPQPLKEQPALNDSRYCLSSRLRVSATFWQNPRNHFRCQVQFYGLSENDEWTQDRAKPVTQIVSAEAWGRADCGFTSESYQQGVLSATILYEILLGKATLYAVLVSALVLMAMVKRKDSRG

SEQ ID NO: 13252 - protein, 894 aa, Artificial Sequence
  Synthetic Polypeptide
MALPVTALLLPLALLLHAARPEVQLVESGGGLVQPGGSLRLSCAASGFSFSDFWMSWVRQAPGKGLEWVATISQAGSEKDYVDSVKGRFTISRDNAKKSLYLQMNSLRAEDTAVYYCASGVYSFDYRGQGTLVTVSSGTGGGGSGGGGSGGGGSEFDEIVMTQTPATLSVSAGERVTITCKASQSVSNDVTWYQQKPGQAPRLLIYSASNRYSGVPARFSGSGYGTEFTFTISSVQSEDFAVYFCQQDYSSFGQGTKLEIKRLEIQNPDPAVYQLRDSKSSDKSVCLFTDFDSQTNVSQSKDSDVYITDKCVLDMRSMDFKSNSAVAWSNKSDFACANAFNNSIIPEDTFFPSPESSCDVKLVEKSFETDTNLNFQNLSVIGFRILLLKVAGFNLLMTLRLWSSRAKRSGSGVKQTLNFDLLKLAGDVESNPGPTSMDWIWRILFLVGAATGAHSGPQLQLQESGPGLVKPSETLSLTCTVSGDSISSGDYYWGWIRQPPGKGLEWIGHIYYSGVTYYNPSLKSRVTISVDTSRNQFSLKLSSVTAADTAVYYCTREDSSNWRSRGQGTLVTVSSGSGGGGSGGGGSGGGGSFEQVQLVESGPGVVQPGRSLRISCAVSGFSVTNYGVHWVRQPPGKGLEWLGVIWAGGITNYNSAFMSRLTISKDNSKNTVYLQMNSLRAEDTAMYYCASRGGHYGYALDYWGQGTLVTVSSTREDLKNVFPPEVAVFEPSEAEISHTQKATLVCLATGFYPDHVELSWWVNGKEVHSGVCTDPQPLKEQPALNDSRYCLSSRLRVSATFWQNPRNHFRCQVQFYGLSENDEWTQDRAKPVTQIVSAEAWGRADCGFTSESYQQGVLSATILYEILLGKATLYAVLVSALVLMAMVKRKDSRG

SEQ ID NO: 13253 - protein, 896 aa, Artificial Sequence
  Synthetic Polypeptide
MALPVTALLLPLALLLHAARPEVQLVESGGGLVQPGGSLRLSCAASGFSFSDFWMSWVRQAPGKGLEWVATISQAGSEKDYVDSVKGRFTISRDNAKKSLYLQMNSLRAEDTAVYYCASGVYSFDYRGQGTLVTVSSGTGGGGSGGGGSGGGGSEFDIQMTQTASSLPASLGDRVTISCSASQDISNYLNWYQQKPDGTVKLLIFYSSNLHSGVPSRFSGGGSGTDYSLTISNLEPEDIATYFCHQYSKLPWTFGGGTKLEIKRLEIQNPDPAVYQLRDSKSSDKSVCLFTDFDSQTNVSQSKDSDVYITDKCVLDMRSMDFKSNSAVAWSNKSDFACANAFNNSIIPEDTFFPSPESSCDVKLVEKSFETDTNLNFQNLSVIGFRILLLKVAGFNLLMTLRLWSSRAKRSGSGVKQTLNFDLLKLAGDVESNPGPTSMDWIWRILFLVGAATGAHSGPQLQLQESGPGLVKPSETLSLTCTVSGDSISSGDYYWGWIRQPPGKGLEWIGHIYYSGVTYYNPSLKSRVTISVDTSRNQFSLKLSSVTAADTAVYYCTREDSSNWRSRGQGTLVTVSSGSGGGGSGGGGSGGGGSFEEVTLVESGGDFVKPGGSLKVSCAASGFAFSHYAMSWVRQTPAKRLEWVAYISSGGSGTYYSDSVKGRFTISRDNAKNTLYLQMRSLRSEDSAMYFCTRVKLGTYYFDSWGQGTTLTVSSTREDLKNVFPPEVAVFEPSEAEISHTQKATLVCLATGFYPDHVELSWWVNGKEVHSGVCTDPQPLKEQPALNDSRYCLSSRLRVSATFWQNPRNHFRCQVQFYGLSENDEWTQDRAKPVTQIVSAEAWGRADCGFTSESYQQGVLSATILYEILLGKATLYAVLVSALVLMAMVKRKDSRG

SEQ ID NO: 13254 - protein, 898 aa, Artificial Sequence
  Synthetic Polypeptide
MALPVTALLLPLALLLHAARPEVQLVESGGGLVQPGGSLRLSCAASGFSFSDFWMSWVRQAPGKGLEWVATISQAGSEKDYVDSVKGRFTISRDNAKKSLYLQMNSLRAEDTAVYYCASGVYSFDYRGQGTLVTVSSGTGGGGSGGGGSGGGGSEFQFVLTQSPSASAALGASAKLTCTLSSAHKTYTIDWYQQQKGKAPRYLIQVKSDGTYTKATGVPDRFSGSSSGADRYLIIPSVQADDEADYYCGTDYTGGYVFGGGTQLTVTLEIQNPDPAVYQLRDSKSSDKSVCLFTDFDSQTNVSQSKDSDVYITDKCVLDMRSMDFKSNSAVAWSNKSDFACANAFNNSIIPEDTFFPSPESSCDVKLVEKSFETDTNLNFQNLSVIGFRILLLKVAGFNLLMTLRLWSSRAKRSGSGVKQTLNFDLLKLAGDVESNPGPTSMDWIWRILFLVGAATGAHSGPQLQLQESGPGLVKPSETLSLTCTVSGDSISSGDYYWGWIRQPPGKGLEWIGHIYYSGVTYYNPSLKSRVTISVDTSRNQFSLKLSSVTAADTAVYYCTREDSSNWRSRGQGTLVTVSSGSGGGGSGGGGSGGGGSFEEQLKESGGGLFKPTDTLTLTCTVSGFSLSYYGVNWVRQAPGNGLEWIGTIGGSGDTYYASWAKSRSTIIRNTNENTVTLKMTSLTAADTATYFCVRYANIGYEYFNVWGPGTLVTVSSTREDLKNVFPPEVAVFEPSEAEISHTQKATLVCLATGFYPDHVELSWWVNGKEVHSGVCTDPQPLKEQPALNDSRYCLSSRLRVSATFWQNPRNHFRCQVQFYGLSENDEWTQDRAKPVTQIVSAEAWGRADCGFTSESYQQGVLSATILYEILLGKATLYAVLVSALVLMAMVKRKDSRG

SEQ ID NO: 13255 - protein, 903 aa, Artificial Sequence
  Synthetic Polypeptide
MALPVTALLLPLALLLHAARPEVQLVESGGGLVQPGGSLRLSCAASGFSFSDFWMSWVRQAPGKGLEWVATISQAGSEKDYVDSVKGRFTISRDNAKKSLYLQMNSLRAEDTAVYYCASGVYSFDYRGQGTLVTVSSGTGGGGSGGGGSGGGGSEFQFVLTQSPSVSAALGASAKLTCTLSSAHKTYTIDWYQQQQGEAPRYLMQVKSDGSYTKGTGVPDRFSGSSSGADRYLIIPSVQADDEAGYVCGADDNGGYVFGGGTQLTVTLEIQNPDPAVYQLRDSKSSDKSVCLFTDFDSQTNVSQSKDSDVYITDKCVLDMRSMDFKSNSAVAWSNKSDFACANAFNNSIIPEDTFFPSPESSCDVKLVEKSFETDTNLNFQNLSVIGFRILLLKVAGFNLLMTLRLWSSRAKRSGSGVKQTLNFDLLKLAGDVESNPGPTSMDWIWRILFLVGAATGAHSGPQLQLQESGPGLVKPSETLSLTCTVSGDSISSGDYYWGWIRQPPGKGLEWIGHIYYSGVTYYNPSLKSRVTISVDTSRNQFSLKLSSVTAADTAVYYCTREDSSNWRSRGQGTLVTVSSGSGGGGSGGGGSGGGGSFEQSVKESEGGLFKPTDTLTLTCTVSGFSLSRHALTWVRQAPGNGLEWIGAIDNAGTTYYASWAKSRSTITRNTDLHTVTLKMTSLTASDTATYFCARVFYDINSGYYLDGMDLWGPGTLVTVSSTREDLKNVFPPEVAVFEPSEAEISHTQKATLVCLATGFYPDHVELSWWVNGKEVHSGVCTDPQPLKEQPALNDSRYCLSSRLRVSATFWQNPRNHFRCQVQFYGLSENDEWTQDRAKPVTQIVSAEAWGRADCGFTSESYQQGVLSATILYEILLGKATLYAVLVSALVLMAMVKRKDSRG

SEQ ID NO: 13256 - protein, 897 aa, Artificial Sequence
  Synthetic Polypeptide
MALPVTALLLPLALLLHAARPEVQLVESGGGLVQPGGSLRLSCAASGFSFSDFWMSWVRQAPGKGLEWVATISQAGSEKDYVDSVKGRFTISRDNAKKSLYLQMNSLRAEDTAVYYCASGVYSFDYRGQGTLVTVSSGTGGGGSGGGGSGGGGSEFDIQMTQSPSSLSASVGDRVTITCRASQGISSWLAWYQQKPEKAPKSLIYAASSLQSGVPSRFSGSGSGTDFTLTISSLQPEDFATYYCQQYNSYPPTFGGGTKVEIKLEIQNPDPAVYQLRDSKSSDKSVCLFTDFDSQTNVSQSKDSDVYITDKCVLDMRSMDFKSNSAVAWSNKSDFACANAFNNSIIPEDTFFPSPESSCDVKLVEKSFETDTNLNFQNLSVIGFRILLLKVAGFNLLMTLRLWSSRAKRSGSGVKQTLNFDLLKLAGDVESNPGPTSMDWIWRILFLVGAATGAHSGPQLQLQESGPGLVKPSETLSLTCTVSGDSISSGDYYWGWIRQPPGKGLEWIGHIYYSGVTYYNPSLKSRVTISVDTSRNQFSLKLSSVTAADTAVYYCTREDSSNWRSRGQGTLVTVSSGSGGGGSGGGGSGGGGSFEEVQLVESGGGLVQPGESLRLSCVASGFTFSRYKMNWVRQAPGKGLEWVSYISRSGRDIYYADSVKGRFTISRDNAKNSLYLQMNSLRDEDTAVYYCAGTVTTYYYFGMDVWGHGTTVTVSSTREDLKNVFPPEVAVFEPSEAEISHTQKATLVCLATGFYPDHVELSWWVNGKEVHSGVCTDPQPLKEQPALNDSRYCLSSRLRVSATFWQNPRNHFRCQVQFYGLSENDEWTQDRAKPVTQIVSAEAWGRADCGFTSESYQQGVLSATILYEILLGKATLYAVLVSALVLMAMVKRKDSRG

SEQ ID NO: 13257 - protein, 898 aa, Artificial Sequence
  Synthetic Polypeptide
MALPVTALLLPLALLLHAARPEVQLVESGGGLVQPGGSLRLSCAASGFSFSDFWMSWVRQAPGKGLEWVATISQAGSEKDYVDSVKGRFTISRDNAKKSLYLQMNSLRAEDTAVYYCASGVYSFDYRGQGTLVTVSSGTGGGGSGGGGSGGGGSEFDIQMTQSPSSLSASVGDRVTITCRASQGISSWLAWYQQKPEKAPKSLIYAASSLQSGVPSRFSGSGSGTDFTLTISSLQPEDFATYYCQQYNSYPPTFGGGTKVEIKLEIQNPDPAVYQLRDSKSSDKSVCLFTDFDSQTNVSQSKDSDVYITDKCVLDMRSMDFKSNSAVAWSNKSDFACANAFNNSIIPEDTFFPSPESSCDVKLVEKSFETDTNLNFQNLSVIGFRILLLKVAGFNLLMTLRLWSSRAKRSGSGVKQTLNFDLLKLAGDVESNPGPTSMDWIWRILFLVGAATGAHSGPQLQLQESGPGLVKPSETLSLTCTVSGDSISSGDYYWGWIRQPPGKGLEWIGHIYYSGVTYYNPSLKSRVTISVDTSRNQFSLKLSSVTAADTAVYYCTREDSSNWRSRGQGTLVTVSSGSGGGGSGGGGSGGGGSFEEVQLVESGGGSVQPGESLRLSCVASGFTFSRYKMNWVRQAPGKGLEWVSYISRSGRDIYYADSVKGRFTISRDNAKNSLYLQMNSLRDEDTAVYYCAGTVTTYYYDFGMDVWGQGTTVTVSSTREDLKNVFPPEVAVFEPSEAEISHTQKATLVCLATGFYPDHVELSWWVNGKEVHSGVCTDPQPLKEQPALNDSRYCLSSRLRVSATFWQNPRNHFRCQVQFYGLSENDEWTQDRAKPVTQIVSAEAWGRADCGFTSESYQQGVLSATILYEILLGKATLYAVLVSALVLMAMVKRKDSRG

SEQ ID NO: 13258 - protein, 896 aa, Artificial Sequence
  Synthetic Polypeptide
MALPVTALLLPLALLLHAARPEVQLVESGGGLVQPGGSLRLSCAASGFSFSDFWMSWVRQAPGKGLEWVATISQAGSEKDYVDSVKGRFTISRDNAKKSLYLQMNSLRAEDTAVYYCASGVYSFDYRGQGTLVTVSSGTGGGGSGGGGSGGGGSEFQSVLTQPPSASGTPGQRVTISCSGSRSNVGGNYVFWYQQVPGATPKLLIYRSNQRPSGVPDRFAGSKSGSSASLAISGLRSEDEADYYCATWDDSLSGFVFGTGTKVTVLGLEIQNPDPAVYQLRDSKSSDKSVCLFTDFDSQTNVSQSKDSDVYITDKCVLDMRSMDFKSNSAVAWSNKSDFACANAFNNSIIPEDTFFPSPESSCDVKLVEKSFETDTNLNFQNLSVIGFRILLLKVAGFNLLMTLRLWSSRAKRSGSGVKQTLNFDLLKLAGDVESNPGPTSMDWIWRILFLVGAATGAHSGPQLQLQESGPGLVKPSETLSLTCTVSGDSISSGDYYWGWIRQPPGKGLEWIGHIYYSGVTYYNPSLKSRVTISVDTSRNQFSLKLSSVTAADTAVYYCTREDSSNWRSRGQGTLVTVSSGSGGGGSGGGGSGGGGSFEVQLVESGGGLVKPGGSLRLSCAASGFTFSDYYMSWIRQAPGKGLEWVSYISSSGSTIYYADSVKGRFTISRDNAKNSLYLQMNSLRAEDTAVYYCARGYGKAYDQWGQGTLVTVSSTREDLKNVFPPEVAVFEPSEAEISHTQKATLVCLATGFYPDHVELSWWVNGKEVHSGVCTDPQPLKEQPALNDSRYCLSSRLRVSATFWQNPRNHFRCQVQFYGLSENDEWTQDRAKPVTQIVSAEAWGRADCGFTSESYQQGVLSATILYEILLGKATLYAVLVSALVLMAMVKRKDSRG

SEQ ID NO: 13259 - protein, 895 aa, Artificial Sequence
  Synthetic Polypeptide
MALPVTALLLPLALLLHAARPEVQLVESGGGLVQPGGSLRLSCAASGFSFSDFWMSWVRQAPGKGLEWVATISQAGSEKDYVDSVKGRFTISRDNAKKSLYLQMNSLRAEDTAVYYCASGVYSFDYRGQGTLVTVSSGTGGGGSGGGGSGGGGSEFQSVVTQPPSMSAAPGQQVTISCSGGNSNIERNYVSWYLQLPGTAPKLVIFDNDRRPSGIPDRFSGSKSGTSATLGITGLQTGDEADYYCGTWDSSLRGWVFGGGTKLTVLGLEIQNPDPAVYQLRDSKSSDKSVCLFTDFDSQTNVSQSKDSDVYITDKCVLDMRSMDFKSNSAVAWSNKSDFACANAFNNSIIPEDTFFPSPESSCDVKLVEKSFETDTNLNFQNLSVIGFRILLLKVAGFNLLMTLRLWSSRAKRSGSGVKQTLNFDLLKLAGDVESNPGPTSMDWIWRILFLVGAATGAHSGPQLQLQESGPGLVKPSETLSLTCTVSGDSISSGDYYWGWIRQPPGKGLEWIGHIYYSGVTYYNPSLKSRVTISVDTSRNQFSLKLSSVTAADTAVYYCTREDSSNWRSRGQGTLVTVSSGSGGGGSGGGGSGGGGSFEVQLVESGGGLIQPGGSLRLSCAASGFTFSNYAMNWVRQAPGKGLEWVSTINGRGSSTIYADSVKGRFTISRDNSKNTLYLQMNSLRAEDTATYYCARYISRGLGDSWGQGTLVTVTREDLKNVFPPEVAVFEPSEAEISHTQKATLVCLATGFYPDHVELSWWVNGKEVHSGVCTDPQPLKEQPALNDSRYCLSSRLRVSATFWQNPRNHFRCQVQFYGLSENDEWTQDRAKPVTQIVSAEAWGRADCGFTSESYQQGVLSATILYEILLGKATLYAVLVSALVLMAMVKRKDSRG

SEQ ID NO: 13260 - protein, 896 aa, Artificial Sequence
  Synthetic Polypeptide
MALPVTALLLPLALLLHAARPEVQLVESGGGLVQPGGSLRLSCAASGFSFSDFWMSWVRQAPGKGLEWVATISQAGSEKDYVDSVKGRFTISRDNAKKSLYLQMNSLRAEDTAVYYCASGVYSFDYRGQGTLVTVSSGTGGGGSGGGGSGGGGSEFDVVMTQTPLSLPVSLGDQASISCRSSQSLVHSNGNTYLHWYLQKPGQSPKLLIYKVSNRFSGVPDRFSGSGSGTDFTLKISRVEAEDLGVYFCSQNTPVPPKFGSGTKLEIKLEIQNPDPAVYQLRDSKSSDKSVCLFTDFDSQTNVSQSKDSDVYITDKCVLDMRSMDFKSNSAVAWSNKSDFACANAFNNSIIPEDTFFPSPESSCDVKLVEKSFETDTNLNFQNLSVIGFRILLLKVAGFNLLMTLRLWSSRAKRSGSGVKQTLNFDLLKLAGDVESNPGPTSMDWIWRILFLVGAATGAHSGPQLQLQESGPGLVKPSETLSLTCTVSGDSISSGDYYWGWIRQPPGKGLEWIGHIYYSGVTYYNPSLKSRVTISVDTSRNQFSLKLSSVTAADTAVYYCTREDSSNWRSRGQGTLVTVSSGSGGGGSGGGGSGGGGSFEQVQLQQSGAELVRPGASVKLSCKASGYTFNDYEMHWVKQTPVHGLKWIGALEPKTGDTAYSQKFKGKATLTADKSSSTAYMELRSLTSEDSAVYYCTSCYYYTYSGQGTLVTVSATREDLKNVFPPEVAVFEPSEAEISHTQKATLVCLATGFYPDHVELSWWVNGKEVHSGVCTDPQPLKEQPALNDSRYCLSSRLRVSATFWQNPRNHFRCQVQFYGLSENDEWTQDRAKPVTQIVSAEAWGRADCGFTSESYQQGVLSATILYEILLGKATLYAVLVSALVLMAMVKRKDSRG

SEQ ID NO: 13261 - protein, 895 aa, Artificial Sequence
  Synthetic Polypeptide
MALPVTALLLPLALLLHAARPEVQLVESGGGLVQPGGSLRLSCAASGFSFSDFWMSWVRQAPGKGLEWVATISQAGSEKDYVDSVKGRFTISRDNAKKSLYLQMNSLRAEDTAVYYCASGVYSFDYRGQGTLVTVSSGTGGGGSGGGGSGGGGSEFDIQLTQSPSSLSASVGDRVTITCRASQGIRNDLGWYQQKPGKAPKRLIYAASSLQNGVPSRFSGSGSGTEFTLTISSLQPEDFATYYCLQHNTYPAFGQGTKVEIKRLEIQNPDPAVYQLRDSKSSDKSVCLFTDFDSQTNVSQSKDSDVYITDKCVLDMRSMDFKSNSAVAWSNKSDFACANAFNNSIIPEDTFFPSPESSCDVKLVEKSFETDTNLNFQNLSVIGFRILLLKVAGFNLLMTLRLWSSRAKRSGSGVKQTLNFDLLKLAGDVESNPGPTSMDWIWRILFLVGAATGAHSGPQLQLQESGPGLVKPSETLSLTCTVSGDSISSGDYYWGWIRQPPGKGLEWIGHIYYSGVTYYNPSLKSRVTISVDTSRNQFSLKLSSVTAADTAVYYCTREDSSNWRSRGQGTLVTVSSGSGGGGSGGGGSGGGGSFEQVQLQESGPGLVKPSQTLSLTCTVSGGSISSFNYYWSWIRHHPGKGLEWIGYIYYSGSTYSNPSLKSRVTISVDTSKNQFSLTLSSVTAADTAVYYCARGYNWNYFDYWGQGTLVTVSSTREDLKNVFPPEVAVFEPSEAEISHTQKATLVCLATGFYPDHVELSWWVNGKEVHSGVCTDPQPLKEQPALNDSRYCLSSRLRVSATFWQNPRNHFRCQVQFYGLSENDEWTQDRAKPVTQIVSAEAWGRADCGFTSESYQQGVLSATILYEILLGKATLYAVLVSALVLMAMVKRKDSRG

SEQ ID NO: 13262 - protein, 897 aa, Artificial Sequence
  Synthetic Polypeptide
MALPVTALLLPLALLLHAARPEVQLVESGGGLVQPGGSLRLSCAASGFSFSDFWMSWVRQAPGKGLEWVATISQAGSEKDYVDSVKGRFTISRDNAKKSLYLQMNSLRAEDTAVYYCASGVYSFDYRGQGTLVTVSSGTGGGGSGGGGSGGGGSEFDDIVLTQSPASLAVSLGQSVTISCRASESVEYYGTSLMQWYQQKPGQPPKLLIYATSNVESGVPARFSGSGSGTDFSLNIHPVEEDDIAMYFCQQSRKLPSTFGGGTKLEIKLEIQNPDPAVYQLRDSKSSDKSVCLFTDFDSQTNVSQSKDSDVYITDKCVLDMRSMDFKSNSAVAWSNKSDFACANAFNNSIIPEDTFFPSPESSCDVKLVEKSFETDTNLNFQNLSVIGFRILLLKVAGFNLLMTLRLWSSRAKRSGSGVKQTLNFDLLKLAGDVESNPGPTSMDWIWRILFLVGAATGAHSGPQLQLQESGPGLVKPSETLSLTCTVSGDSISSGDYYWGWIRQPPGKGLEWIGHIYYSGVTYYNPSLKSRVTISVDTSRNQFSLKLSSVTAADTAVYYCTREDSSNWRSRGQGTLVTVSSGSGGGGSGGGGSGGGGSFEDVRLQESGPGQVKPSQTVSLTCSVTGYSITNGNHWWNWIRQVSGSKLEWIGYISSSGSTDSNPSLKSRISITRDTSKNQLFLQLNSVTTEDIATYYCARGYYFDYWGQGTTLTVSSTREDLKNVFPPEVAVFEPSEAEISHTQKATLVCLATGFYPDHVELSWWVNGKEVHSGVCTDPQPLKEQPALNDSRYCLSSRLRVSATFWQNPRNHFRCQVQFYGLSENDEWTQDRAKPVTQIVSAEAWGRADCGFTSESYQQGVLSATILYEILLGKATLYAVLVSALVLMAMVKRKDSRG

SEQ ID NO: 13263 - protein, 896 aa, Artificial Sequence
  Synthetic Polypeptide
MALPVTALLLPLALLLHAARPEVQLVESGGGLVQPGGSLRLSCAASGFSFSDFWMSWVRQAPGKGLEWVATISQAGSEKDYVDSVKGRFTISRDNAKKSLYLQMNSLRAEDTAVYYCASGVYSFDYRGQGTLVTVSSGTGGGGSGGGGSGGGGSEFDIQMTQSPSSLSASVGDRVTITCRASQDVNTAVAWYQQKPGKAPKLLIYSASFLESGVPSRFSGSRSGTDFTLTISSLQPEDFATYYCQQHYTTPPTFGQTKVEIKRLEIQNPDPAVYQLRDSKSSDKSVCLFTDFDSQTNVSQSKDSDVYITDKCVLDMRSMDFKSNSAVAWSNKSDFACANAFNNSIIPEDTFFPSPESSCDVKLVEKSFETDTNLNFQNLSVIGFRILLLKVAGFNLLMTLRLWSSRAKRSGSGVKQTLNFDLLKLAGDVESNPGPTSMDWIWRILFLVGAATGAHSGPQLQLQESGPGLVKPSETLSLTCTVSGDSISSGDYYWGWIRQPPGKGLEWIGHIYYSGVTYYNPSLKSRVTISVDTSRNQFSLKLSSVTAADTAVYYCTREDSSNWRSRGQGTLVTVSSGSGGGGSGGGGSGGGGSFEEVQLVESGGGLVQPGGSLRLSCAASGFNIKDTYIHWVRQAPGKGLEWVARIYPTNGYTRYADSVKGRFTISADTSKNTAYLQMNSLRAEDTAVYYCSRWGGDGFYAMDVWGQGTLVTVSSTREDLKNVFPPEVAVFEPSEAEISHTQKATLVCLATGFYPDHVELSWWVNGKEVHSGVCTDPQPLKEQPALNDSRYCLSSRLRVSATFWQNPRNHFRCQVQFYGLSENDEWTQDRAKPVTQIVSAEAWGRADCGFTSESYQQGVLSATILYEILLGKATLYAVLVSALVLMAMVKRKDSRG

SEQ ID NO: 13264 - protein, 895 aa, Artificial Sequence
  Synthetic Polypeptide
MALPVTALLLPLALLLHAARPEVQLVESGGGLVQPGGSLRLSCAASGFSFSDFWMSWVRQAPGKGLEWVATISQAGSEKDYVDSVKGRFTISRDNAKKSLYLQMNSLRAEDTAVYYCASGVYSFDYRGQGTLVTVSSGTGGGGSGGGGSGGGGSEFDQSVLTQPPSVSVAPGKTARIPCEGNYIGSSNVHWYQQKPGQAPVLVIHFDSDRPSGIPDRFSGSNSGNMATLTISRVEAGDEADYYCQVWENHGWVFGGGTKLTVLSLEIQNPDPAVYQLRDSKSSDKSVCLFTDFDSQTNVSQSKDSDVYITDKCVLDMRSMDFKSNSAVAWSNKSDFACANAFNNSIIPEDTFFPSPESSCDVKLVEKSFETDTNLNFQNLSVIGFRILLLKVAGFNLLMTLRLWSSRAKRSGSGVKQTLNFDLLKLAGDVESNPGPTSMDWIWRILFLVGAATGAHSGPQLQLQESGPGLVKPSETLSLTCTVSGDSISSGDYYWGWIRQPPGKGLEWIGHIYYSGVTYYNPSLKSRVTISVDTSRNQFSLKLSSVTAADTAVYYCTREDSSNWRSRGQGTLVTVSSGSGGGGSGGGGSGGGGSFEEVQLVETGGGLVQPGESLRLSCAASGFTFSDYEMNWVRQAPGKGLEWVSYISSSGSTIYYADSVKGRFTIYRDNAKNSLYLQMNSLRAEDTALYYCARAWGVGPPDYWGQGTLVTVSSTREDLKNVFPPEVAVFEPSEAEISHTQKATLVCLATGFYPDHVELSWWVNGKEVHSGVCTDPQPLKEQPALNDSRYCLSSRLRVSATFWQNPRNHFRCQVQFYGLSENDEWTQDRAKPVTQIVSAEAWGRADCGFTSESYQQGVLSATILYEILLGKATLYAVLVSALVLMAMVKRKDSRG

SEQ ID NO: 13265 - protein, 903 aa, Artificial Sequence
  Synthetic Polypeptide
MALPVTALLLPLALLLHAARPEVQLVESGGGLVQPGGSLRLSCAASGFSFSDFWMSWVRQAPGKGLEWVATISQAGSEKDYVDSVKGRFTISRDNAKKSLYLQMNSLRAEDTAVYYCASGVYSFDYRGQGTLVTVSSGTGGGGSGGGGSGGGGSEFDIQMTQSPSSLSASVGDTVTITCQANGYLNWYQQRRGKAPKLLIYDGSKLERGVPSRFSGRRWGQEYNLTINNLQPEDIATYFCQVYEFVVPGTRLDLKRTVAAPLEIQNPDPAVYQLRDSKSSDKSVCLFTDFDSQTNVSQSKDSDVYITDKCVLDMRSMDFKSNSAVAWSNKSDFACANAFNNSIIPEDTFFPSPESSCDVKLVEKSFETDTNLNFQNLSVIGFRILLLKVAGFNLLMTLRLWSSRAKRSGSGVKQTLNFDLLKLAGDVESNPGPTSMDWIWRILFLVGAATGAHSGPQLQLQESGPGLVKPSETLSLTCTVSGDSISSGDYYWGWIRQPPGKGLEWIGHIYYSGVTYYNPSLKSRVTISVDTSRNQFSLKLSSVTAADTAVYYCTREDSSNWRSRGQGTLVTVSSGSGGGGSGGGGSGGGGSFEQVQLLQSGAAVTKPGASVRVSCEASGYNIRDYFIHWWRQAPGQGLQWVGWINPKTGQPNNPRQFQGRVSLTRHASWDFDTFSFYMDLKALRSDDTAVYFCARQRSDYWDFDVWGSGTQVTVSSASTKGPTREDLKNVFPPEVAVFEPSEAEISHTQKATLVCLATGFYPDHVELSWWVNGKEVHSGVCTDPQPLKEQPALNDSRYCLSSRLRVSATFWQNPRNHFRCQVQFYGLSENDEWTQDRAKPVTQIVSAEAWGRADCGFTSESYQQGVLSATILYEILLGKATLYAVLVSALVLMAMVKRKDSRG

SEQ ID NO: 13266 - protein, 909 aa, Artificial Sequence
  Synthetic Polypeptide
MALPVTALLLPLALLLHAARPEVQLVESGGGLVQPGGSLRLSCAASGFSFSDFWMSWVRQAPGKGLEWVATISQAGSEKDYVDSVKGRFTISRDNAKKSLYLQMNSLRAEDTAVYYCASGVYSFDYRGQGTLVTVSSGTGGGGSGGGGSGGGGSEFQSALTQPPSASGSPGQSITISCTGTSNNFVSWYQQHAGKAPKLVIYDVNKRPSGVPDRFSGSKSGNTASLTVSGLQTDDEAVYYCGSLVGNWDVIFGGGTKLTVLLEIQNPDPAVYQLRDSKSSDKSVCLFTDFDSQTNVSQSKDSDVYITDKCVLDMRSMDFKSNSAVAWSNKSDFACANAFNNSIIPEDTFFPSPESSCDVKLVEKSFETDTNLNFQNLSVIGFRILLLKVAGFNLLMTLRLWSSRAKRSGSGVKQTLNFDLLKLAGDVESNPGPTSMDWIWRILFLVGAATGAHSGPQLQLQESGPGLVKPSETLSLTCTVSGDSISSGDYYWGWIRQPPGKGLEWIGHIYYSGVTYYNPSLKSRVTISVDTSRNQFSLKLSSVTAADTAVYYCTREDSSNWRSRGQGTLVTVSSGSGGGGSGGGGSGGGGSFEQPQLQESGPTLVEASETLSLTCAVSGDSTAACNSFWGWVRQPPGKGLEWVGSLSHCASYWNRGWTYHNPSLKSRLTLALDTPKNLVFLKLNSVTAADTATYYCARFGGEVLRYTDWPKPAWVDLWGRGTLVTVSSTREDLKNVFPPEVAVFEPSEAEISHTQKATLVCLATGFYPDHVELSWWVNGKEVHSGVCTDPQPLKEQPALNDSRYCLSSRLRVSATFWQNPRNHFRCQVQFYGLSENDEWTQDRAKPVTQIVSAEAWGRADCGFTSESYQQGVLSATILYEILLGKATLYAVLVSALVLMAMVKRKDSRG

SEQ ID NO: 13267 - protein, 894 aa, Artificial Sequence
  Synthetic Polypeptide
MALPVTALLLPLALLLHAARPEVQLVESGGGLVQPGGSLRLSCAASGFSFSDFWMSWVRQAPGKGLEWVATISQAGSEKDYVDSVKGRFTISRDNAKKSLYLQMNSLRAEDTAVYYCASGVYSFDYRGQGTLVTVSSGTGGGGSGGGGSGGGGSEFEIVLTQSPGTLSLSPGETAIISCRTSQYGSLAWYQQRPGQAPRLVIYSGSTRAAGIPDRFSGSRWGPDYNLTISNLESGDFGVYYCQQYEFFGQGTKVQVDIKRLEIQNPDPAVYQLRDSKSSDKSVCLFTDFDSQTNVSQSKDSDVYITDKCVLDMRSMDFKSNSAVAWSNKSDFACANAFNNSIIPEDTFFPSPESSCDVKLVEKSFETDTNLNFQNLSVIGFRILLLKVAGFNLLMTLRLWSSRAKRSGSGVKQTLNFDLLKLAGDVESNPGPTSMDWIWRILFLVGAATGAHSGPQLQLQESGPGLVKPSETLSLTCTVSGDSISSGDYYWGWIRQPPGKGLEWIGHIYYSGVTYYNPSLKSRVTISVDTSRNQFSLKLSSVTAADTAVYYCTREDSSNWRSRGQGTLVTVSSGSGGGGSGGGGSGGGGSFEQVQLVQSGGQMKKPGESMRISCRASGYEFIDCTLNWIRLAPGKRPEWMGWLKPRGGAVNYARPLQGRVTMTRDVYSDTAFLELRSLTVDDTAVYFCTRGKNCDYNWDFEHWGRGTPVIVSSTREDLKNVFPPEVAVFEPSEAEISHTQKATLVCLATGFYPDHVELSWWVNGKEVHSGVCTDPQPLKEQPALNDSRYCLSSRLRVSATFWQNPRNHFRCQVQFYGLSENDEWTQDRAKPVTQIVSAEAWGRADCGFTSESYQQGVLSATILYEILLGKATLYAVLVSALVLMAMVKRKDSRG

SEQ ID NO: 13268 - protein, 904 aa, Artificial Sequence
  Synthetic Polypeptide
MALPVTALLLPLALLLHAARPEVQLVESGGGLVQPGGSLRLSCAASGFSFSDFWMSWVRQAPGKGLEWVATISQAGSEKDYVDSVKGRFTISRDNAKKSLYLQMNSLRAEDTAVYYCASGVYSFDYRGQGTLVTVSSGTGGGGSGGGGSGGGGSEFELVLTQSPGTLSLSAGERATLSCRASQSVSSGSLAWYQQKPGQAPRLLIYGASTRATGIPDRFSGSGSGTDFTLTIGRLEPEDLAVYYCQQYGTSPYTFGQGTKLEILEIQNPDPAVYQLRDSKSSDKSVCLFTDFDSQTNVSQSKDSDVYITDKCVLDMRSMDFKSNSAVAWSNKSDFACANAFNNSIIPEDTFFPSPESSCDVKLVEKSFETDTNLNFQNLSVIGFRILLLKVAGFNLLMTLRLWSSRAKRSGSGVKQTLNFDLLKLAGDVESNPGPTSMDWIWRILFLVGAATGAHSGPQLQLQESGPGLVKPSETLSLTCTVSGDSISSGDYYWGWIRQPPGKGLEWIGHIYYSGVTYYNPSLKSRVTISVDTSRNQFSLKLSSVTAADTAVYYCTREDSSNWRSRGQGTLVTVSSGSGGGGSGGGGSGGGGSFELEQSGAEVKKPGSSVQVSCKASGGTFSMYGFNWVRQAPGHGLEWMGGIIPIFGTSNYAQKFRGRVTFTADQATSTAYMELTNLRSDDTAVYYCARDFGPDWEDGDSYDGSGRGFFDFWGQGTLVTVSSTREDLKNVFPPEVAVFEPSEAEISHTQKATLVCLATGFYPDHVELSWWVNGKEVHSGVCTDPQPLKEQPALNDSRYCLSSRLRVSATFWQNPRNHFRCQVQFYGLSENDEWTQDRAKPVTQIVSAEAWGRADCGFTSESYQQGVLSATILYEILLGKATLYAVLVSALVLMAMVKRKDSRG

SEQ ID NO: 13269 - protein, 884 aa, Artificial Sequence
  Synthetic Polypeptide
MALPVTALLLPLALLLHAARPEVQLVESGGGLVQPGGSLRLSCAASGFSFSDFWMSWVRQAPGKGLEWVATISQAGSEKDYVDSVKGRFTISRDNAKKSLYLQMNSLRAEDTAVYYCASGVYSFDYRGQGTLVTVSSGTGGGGSGGGGSGGGGSEFDIQMTQSPSSLSASVGDRVTITCQASQDINNYLNWYQQKPGKAPKLLIYDASNLQTGVPSRFSGSGSGTDFTFTIEDIATYYCQQYTFGPGTKVDIKLEIQNPDPAVYQLRDSKSSDKSVCLFTDFDSQTNVSQSKDSDVYITDKCVLDMRSMDFKSNSAVAWSNKSDFACANAFNNSIIPEDTFFPSPESSCDVKLVEKSFETDTNLNFQNLSVIGFRILLLKVAGFNLLMTLRLWSSRAKRSGSGVKQTLNFDLLKLAGDVESNPGPTSMDWIWRILFLVGAATGAHSGPQLQLQESGPGLVKPSETLSLTCTVSGDSISSGDYYWGWIRQPPGKGLEWIGHIYYSGVTYYNPSLKSRVTISVDTSRNQFSLKLSSVTAADTAVYYCTREDSSNWRSRGQGTLVTVSSGSGGGGSGGGGSGGGGSFEEVQLLESGGGLVQPGGSLRLSCAASGFTFSWYSMTWVRQAPGKGLEWVSSIVPWGDFTQYADSVKGRFTISRDNSKNTLYLQMNSLRAEDTAVYYCAKGPGWGSFDLWGRGTLVTVSSTREDLKNVFPPEVAVFEPSEAEISHTQKATLVCLATGFYPDHVELSWWVNGKEVHSGVCTDPQPLKEQPALNDSRYCLSSRLRVSATFWQNPRNHFRCQVQFYGLSENDEWTQDRAKPVTQIVSAEAWGRADCGFTSESYQQGVLSATILYEILLGKATLYAVLVSALVLMAMVKRKDSRG

SEQ ID NO: 13270 - protein, 894 aa, Artificial Sequence
  Synthetic Polypeptide
MALPVTALLLPLALLLHAARPEVQLVESGGGLVQPGGSLRLSCAASGFSFSDFWMSWVRQAPGKGLEWVATISQAGSEKDYVDSVKGRFTISRDNAKKSLYLQMNSLRAEDTAVYYCASGVYSFDYRGQGTLVTVSSGTGGGGSGGGGSGGGGSEFDIQMTQSPSSLSASVGDRVTITCTASLSVSSTYLHWYQQKPGSSPKLWIYSTSNLASGVPSRFSGSGSGTSYTLTISSLQPEDFATYYCHQYHRSPLTFGGGTKVEIKRLEIQNPDPAVYQLRDSKSSDKSVCLFTDFDSQTNVSQSKDSDVYITDKCVLDMRSMDFKSNSAVAWSNKSDFACANAFNNSIIPEDTFFPSPESSCDVKLVEKSFETDTNLNFQNLSVIGFRILLLKVAGFNLLMTLRLWSSRAKRSGSGVKQTLNFDLLKLAGDVESNPGPTSMDWIWRILFLVGAATGAHSGPQLQLQESGPGLVKPSETLSLTCTVSGDSISSGDYYWGWIRQPPGKGLEWIGHIYYSGVTYYNPSLKSRVTISVDTSRNQFSLKLSSVTAADTAVYYCTREDSSNWRSRGQGTLVTVSSGSGGGGSGGGGSGGGGSFEEVQLVESGGGLVQPGGSLRLSCAASGFSLTKYGVHWVRQAPGKGLEWVGVKWAGGSTDYNSALMSRFTISKDNAKNSLYLQMNSLRAEDTAVYYCARDHRDAMDYWGQGTLVTVSSTREDLKNVFPPEVAVFEPSEAEISHTQKATLVCLATGFYPDHVELSWWVNGKEVHSGVCTDPQPLKEQPALNDSRYCLSSRLRVSATFWQNPRNHFRCQVQFYGLSENDEWTQDRAKPVTQIVSAEAWGRADCGFTSESYQQGVLSATILYEILLGKATLYAVLVSALVLMAMVKRKDSRG

SEQ ID NO: 13271 - protein, 898 aa, Artificial Sequence
  Synthetic Polypeptide
MALPVTALLLPLALLLHAARPEVQLVESGGGLVQPGGSLRLSCAASGFSFSDFWMSWVRQAPGKGLEWVATISQAGSEKDYVDSVKGRFTISRDNAKKSLYLQMNSLRAEDTAVYYCASGVYSFDYRGQGTLVTVSSGTGGGGSGGGGSGGGGSEFDIQMTQSPSSLSASVGDRVTITCKASQDVGTAVAWYQQKPGKAPKLLIYSASYRSTGVPSRFSGSGSGTDFTLTISSLQPEDFATYYCQHHYSAPWTFGGGTKVEIKLEIQNPDPAVYQLRDSKSSDKSVCLFTDFDSQTNVSQSKDSDVYITDKCVLDMRSMDFKSNSAVAWSNKSDFACANAFNNSIIPEDTFFPSPESSCDVKLVEKSFETDTNLNFQNLSVIGFRILLLKVAGFNLLMTLRLWSSRAKRSGSGVKQTLNFDLLKLAGDVESNPGPTSMDWIWRILFLVGAATGAHSGPQLQLQESGPGLVKPSETLSLTCTVSGDSISSGDYYWGWIRQPPGKGLEWIGHIYYSGVTYYNPSLKSRVTISVDTSRNQFSLKLSSVTAADTAVYYCTREDSSNWRSRGQGTLVTVSSGSGGGGSGGGGSGGGGSFEEVQLVESGGGLVQPGGSLRLSCAASGFTFSRNGMSWVRQAPGKGLEWVATVSSGGSYIYYADSVKGRFTISRDNAKNSLYLQMNSLRAEDTAVYYCARQGTTALATRFFDVWGQGTLVTVSSTREDLKNVFPPEVAVFEPSEAEISHTQKATLVCLATGFYPDHVELSWWVNGKEVHSGVCTDPQPLKEQPALNDSRYCLSSRLRVSATFWQNPRNHFRCQVQFYGLSENDEWTQDRAKPVTQIVSAEAWGRADCGFTSESYQQGVLSATILYEILLGKATLYAVLVSALVLMAMVKRKDSRG

SEQ ID NO: 13272 - protein, 894 aa, Artificial Sequence
  Synthetic Polypeptide
MALPVTALLLPLALLLHAARPEVQLVESGGGLVQPGGSLRLSCAASGFSFSDFWMSWVRQAPGKGLEWVATISQAGSEKDYVDSVKGRFTISRDNAKKSLYLQMNSLRAEDTAVYYCASGVYSFDYRGQGTLVTVSSGTGGGGSGGGGSGGGGSEFDIQMTQSPPSLSASVGGKVTITCKASQDIDRYMAWYQDKPGKGPKLLIHDTSTLQPGIPSRFSGSGSGRDYSFSISNLEPEDIATYYCLQYDNLWTFGGGTKLEIKRLEIQNPDPAVYQLRDSKSSDKSVCLFTDFDSQTNVSQSKDSDVYITDKCVLDMRSMDFKSNSAVAWSNKSDFACANAFNNSIIPEDTFFPSPESSCDVKLVEKSFETDTNLNFQNLSVIGFRILLLKVAGFNLLMTLRLWSSRAKRSGSGVKQTLNFDLLKLAGDVESNPGPTSMDWIWRILFLVGAATGAHSGPQLQLQESGPGLVKPSETLSLTCTVSGDSISSGDYYWGWIRQPPGKGLEWIGHIYYSGVTYYNPSLKSRVTISVDTSRNQFSLKLSSVTAADTAVYYCTREDSSNWRSRGQGTLVTVSSGSGGGGSGGGGSGGGGSFEQVQLVQSGAELVKPGASVKMSCKASGYIFTNYNIHWVKKSPGQGLEWIGAIYPGNGDAPYSQKFQDRATLTADTSSSTTYMELSSLTSEDSAVYYCVRANWDVAFAYWGQGTLVSVSSTREDLKNVFPPEVAVFEPSEAEISHTQKATLVCLATGFYPDHVELSWWVNGKEVHSGVCTDPQPLKEQPALNDSRYCLSSRLRVSATFWQNPRNHFRCQVQFYGLSENDEWTQDRAKPVTQIVSAEAWGRADCGFTSESYQQGVLSATILYEILLGKATLYAVLVSALVLMAMVKRKDSRG

SEQ ID NO: 13273 - protein, 895 aa, Artificial Sequence
  Synthetic Polypeptide
MALPVTALLLPLALLLHAARPEVQLVESGGGLVQPGGSLRLSCAASGFSFSDFWMSWVRQAPGKGLEWVATISQAGSEKDYVDSVKGRFTISRDNAKKSLYLQMNSLRAEDTAVYYCASGVYSFDYRGQGTLVTVSSGTGGGGSGGGGSGGGGSEFDIQMTQSPASLSASVGETVTITCRVSGNIHNYLAWYQQKQGKSPQLLVYNAKTLADGVPSRFSGSGSGTQYSLKINSLQPEDFGSYYCQHFWSNPYTFGGGTKLEIKLEIQNPDPAVYQLRDSKSSDKSVCLFTDFDSQTNVSQSKDSDVYITDKCVLDMRSMDFKSNSAVAWSNKSDFACANAFNNSIIPEDTFFPSPESSCDVKLVEKSFETDTNLNFQNLSVIGFRILLLKVAGFNLLMTLRLWSSRAKRSGSGVKQTLNFDLLKLAGDVESNPGPTSMDWIWRILFLVGAATGAHSGPQLQLQESGPGLVKPSETLSLTCTVSGDSISSGDYYWGWIRQPPGKGLEWIGHIYYSGVTYYNPSLKSRVTISVDTSRNQFSLKLSSVTAADTAVYYCTREDSSNWRSRGQGTLVTVSSGSGGGGSGGGGSGGGGSFEQVQLQQSGASVKVSCKASELVRPGTGYAFTNYLIEWVKQRPGQGLEWIGVINPGSGGTNYNEKFKGKATLTADKSSSTAYMQLSSLTSDDSAVYFCARYRSYDWYFDVWGAGTTVTVSSTREDLKNVFPPEVAVFEPSEAEISHTQKATLVCLATGFYPDHVELSWWVNGKEVHSGVCTDPQPLKEQPALNDSRYCLSSRLRVSATFWQNPRNHFRCQVQFYGLSENDEWTQDRAKPVTQIVSAEAWGRADCGFTSESYQQGVLSATILYEILLGKATLYAVLVSALVLMAMVKRKDSRG

SEQ ID NO: 13274 - protein, 894 aa, Artificial Sequence
  Synthetic Polypeptide
MALPVTALLLPLALLLHAARPEVQLVESGGGLVQPGGSLRLSCAASGFSFSDFWMSWVRQAPGKGLEWVATISQAGSEKDYVDSVKGRFTISRDNAKKSLYLQMNSLRAEDTAVYYCASGVYSFDYRGQGTLVTVSSGTGGGGSGGGGSGGGGSEFDIQMTQSFSSLSASVGDRVTITCRASQDISNYLNWYQQKPGKAPKLLIYYTSRLHSGVPSRFSGSGSGTDYTLTISSLQPEDFATYFCQQGNTLPWTFGGGTKLEIKRLEIQNPDPAVYQLRDSKSSDKSVCLFTDFDSQTNVSQSKDSDVYITDKCVLDMRSMDFKSNSAVAWSNKSDFACANAFNNSIIPEDTFFPSPESSCDVKLVEKSFETDTNLNFQNLSVIGFRILLLKVAGFNLLMTLRLWSSRAKRSGSGVKQTLNFDLLKLAGDVESNPGPTSMDWIWRILFLVGAATGAHSGPQLQLQESGPGLVKPSETLSLTCTVSGDSISSGDYYWGWIRQPPGKGLEWIGHIYYSGVTYYNPSLKSRVTISVDTSRNQFSLKLSSVTAADTAVYYCTREDSSNWRSRGQGTLVTVSSGSGGGGSGGGGSGGGGSFEEVQLVQSGGGLVQSGGSLRLSCRASGYTFTRYWMLWVRQRPGKGLEWVAEINPRNDRTNYNEKFKTRFTISVDRSKNTLYLQMDSLRAEDTAVYFCALGGGYAMDYWGQGTLVTVSSTREDLKNVFPPEVAVFEPSEAEISHTQKATLVCLATGFYPDHVELSWWVNGKEVHSGVCTDPQPLKEQPALNDSRYCLSSRLRVSATFWQNPRNHFRCQVQFYGLSENDEWTQDRAKPVTQIVSAEAWGRADCGFTSESYQQGVLSATILYEILLGKATLYAVLVSALVLMAMVKRKDSRG

SEQ ID NO: 13275 - protein, 895 aa, Artificial Sequence
  Synthetic Polypeptide
MALPVTALLLPLALLLHAARPEVQLVESGGGLVQPGGSLRLSCAASGFSFSDFWMSWVRQAPGKGLEWVATISQAGSEKDYVDSVKGRFTISRDNAKKSLYLQMNSLRAEDTAVYYCASGVYSFDYRGQGTLVTVSSGTGGGGSGGGGSGGGGSEFDIQMTQSPASLSASVGETVTIICRASVNIYSYLAWYQQKQGKSPQLLVYNAKILAEGVPSRFSGSGSGTQFSLKINSLQPEDFGSYYCQHHYGTFTFGSGTKLEIKRLEIQNPDPAVYQLRDSKSSDKSVCLFTDFDSQTNVSQSKDSDVYITDKCVLDMRSMDFKSNSAVAWSNKSDFACANAFNNSIIPEDTFFPSPESSCDVKLVEKSFETDTNLNFQNLSVIGFRILLLKVAGFNLLMTLRLWSSRAKRSGSGVKQTLNFDLLKLAGDVESNPGPTSMDWIWRILFLVGAATGAHSGPQLQLQESGPGLVKPSETLSLTCTVSGDSISSGDYYWGWIRQPPGKGLEWIGHIYYSGVTYYNPSLKSRVTISVDTSRNQFSLKLSSVTAADTAVYYCTREDSSNWRSRGQGTLVTVSSGSGGGGSGGGGSGGGGSFEQVQLKESGPGLVAPSQSLSITCTISGFSLTSYGVHWVRQPPGKGLEWLVVIWSDGSTTYNSALKSRLSISKDNSKSQVFLKMNSLQTDDTAIYYCASHYGSTLAFASWGHGTLVTVSAATREDLKNVFPPEVAVFEPSEAEISHTQKATLVCLATGFYPDHVELSWWVNGKEVHSGVCTDPQPLKEQPALNDSRYCLSSRLRVSATFWQNPRNHFRCQVQFYGLSENDEWTQDRAKPVTQIVSAEAWGRADCGFTSESYQQGVLSATILYEILLGKATLYAVLVSALVLMAMVKRKDSRG

SEQ ID NO: 13276 - protein, 903 aa, Artificial Sequence
  Synthetic Polypeptide
MALPVTALLLPLALLLHAARPEVQLVESGGGLVQPGGSLRLSCAASGFSFSDFWMSWVRQAPGKGLEWVATISQAGSEKDYVDSVKGRFTISRDNAKKSLYLQMNSLRAEDTAVYYCASGVYSFDYRGQGTLVTVSSGTGGGGSGGGGSGGGGSEFDIVMTQSHKFMSTSVGDRVSVTCKASQNVGNNVAWYQQKPGQSPKVLIYSASYRYSGVPDRFTGSGSGTDFTLTISNVQSEDLAEYFCQQYNTYPFTFGSGTKLEIKLEIQNPDPAVYQLRDSKSSDKSVCLFTDFDSQTNVSQSKDSDVYITDKCVLDMRSMDFKSNSAVAWSNKSDFACANAFNNSIIPEDTFFPSPESSCDVKLVEKSFETDTNLNFQNLSVIGFRILLLKVAGFNLLMTLRLWSSRAKRSGSGVKQTLNFDLLKLAGDVESNPGPTSMDWIWRILFLVGAATGAHSGPQLQLQESGPGLVKPSETLSLTCTVSGDSISSGDYYWGWIRQPPGKGLEWIGHIYYSGVTYYNPSLKSRVTISVDTSRNQFSLKLSSVTAADTAVYYCTREDSSNWRSRGQGTLVTVSSGSGGGGSGGGGSGGGGSFEEVQLEESGGGLVQPGGSMKLSCVASGFTFSNYWMNWVRQSPEKGLEWVAEIRFKSHNYATHFAESVKGRFTISRDDSKSSVYLQMNNLRAEDTGIYYCTRRIGNSDYDWWYFDVWGAGTSVTVSSASTREDLKNVFPPEVAVFEPSEAEISHTQKATLVCLATGFYPDHVELSWWVNGKEVHSGVCTDPQPLKEQPALNDSRYCLSSRLRVSATFWQNPRNHFRCQVQFYGLSENDEWTQDRAKPVTQIVSAEAWGRADCGFTSESYQQGVLSATILYEILLGKATLYAVLVSALVLMAMVKRKDSRG

SEQ ID NO: 13277 - protein, 896 aa, Artificial Sequence
  Synthetic Polypeptide
MALPVTALLLPLALLLHAARPEVQLVESGGGLVQPGGSLRLSCAASGFSFSDFWMSWVRQAPGKGLEWVATISQAGSEKDYVDSVKGRFTISRDNAKKSLYLQMNSLRAEDTAVYYCASGVYSFDYRGQGTLVTVSSGTGGGGSGGGGSGGGGSEFDQIVLTQSPAIMSASPGEKVTISCSASSSVSYMYWYQQKPGSSPKPWIYRTSNLASGVPARFSGSGSGTSYSLTISNMEAEDAAAYYCQQYHSYPTTFGGGTKLEVKLEIQNPDPAVYQLRDSKSSDKSVCLFTDFDSQTNVSQSKDSDVYITDKCVLDMRSMDFKSNSAVAWSNKSDFACANAFNNSIIPEDTFFPSPESSCDVKLVEKSFETDTNLNFQNLSVIGFRILLLKVAGFNLLMTLRLWSSRAKRSGSGVKQTLNFDLLKLAGDVESNPGPTSMDWIWRILFLVGAATGAHSGPQLQLQESGPGLVKPSETLSLTCTVSGDSISSGDYYWGWIRQPPGKGLEWIGHIYYSGVTYYNPSLKSRVTISVDTSRNQFSLKLSSVTAADTAVYYCTREDSSNWRSRGQGTLVTVSSGSGGGGSGGGGSGGGGSFEEVQLVESGGGLVQPKGSLKLSCAASGFSFNTYAMNWVRQAPGKGLEWIAHIRSKSNNFATYYADSVKDRFSISRDASENILFLQMNNLKTEDTAMYYCVRQGGDFPMDYWGQGTSVTVSSTREDLKNVFPPEVAVFEPSEAEISHTQKATLVCLATGFYPDHVELSWWVNGKEVHSGVCTDPQPLKEQPALNDSRYCLSSRLRVSATFWQNPRNHFRCQVQFYGLSENDEWTQDRAKPVTQIVSAEAWGRADCGFTSESYQQGVLSATILYEILLGKATLYAVLVSALVLMAMVKRKDSRG

SEQ ID NO: 13278 - protein, 895 aa, Artificial Sequence
  Synthetic Polypeptide
MALPVTALLLPLALLLHAARPEVQLVESGGGLVQPGGSLRLSCAASGFSFSDFWMSWVRQAPGKGLEWVATISQAGSEKDYVDSVKGRFTISRDNAKKSLYLQMNSLRAEDTAVYYCASGVYSFDYRGQGTLVTVSSGTGGGGSGGGGSGGGGSEFDDIQMTQSSSSFSVSLGDRVTITCMASEDIYIRLAWYQQKPGNAPRLLISAATSLETGVPSRFSGSGSGKDYTLSITSLQTEDVGTYYCQQYWSSPWTFGGGTKLEINLEIQNPDPAVYQLRDSKSSDKSVCLFTDFDSQTNVSQSKDSDVYITDKCVLDMRSMDFKSNSAVAWSNKSDFACANAFNNSIIPEDTFFPSPESSCDVKLVEKSFETDTNLNFQNLSVIGFRILLLKVAGFNLLMTLRLWSSRAKRSGSGVKQTLNFDLLKLAGDVESNPGPTSMDWIWRILFLVGAATGAHSGPQLQLQESGPGLVKPSETLSLTCTVSGDSISSGDYYWGWIRQPPGKGLEWIGHIYYSGVTYYNPSLKSRVTISVDTSRNQFSLKLSSVTAADTAVYYCTREDSSNWRSRGQGTLVTVSSGSGGGGSGGGGSGGGGSFEDVQLQESGPGLVKPSQSLSLTCTVTGYSITSDYTWNWIRQFPGNKLEWMGYITYSGSTSYNPSLKSRNSITRDTSKNQFFLQLNSVTTEDTATYYCARLGRRYTMDYWGQGTSVTVSSTREDLKNVFPPEVAVFEPSEAEISHTQKATLVCLATGFYPDHVELSWWVNGKEVHSGVCTDPQPLKEQPALNDSRYCLSSRLRVSATFWQNPRNHFRCQVQFYGLSENDEWTQDRAKPVTQIVSAEAWGRADCGFTSESYQQGVLSATILYEILLGKATLYAVLVSALVLMAMVKRKDSRG

SEQ ID NO: 13279 - protein, 898 aa, Artificial Sequence
  Synthetic Polypeptide
MALPVTALLLPLALLLHAARPEVQLVESGGGLVQPGGSLRLSCAASGFSFSDFWMSWVRQAPGKGLEWVATISQAGSEKDYVDSVKGRFTISRDNAKKSLYLQMNSLRAEDTAVYYCASGVYSFDYRGQGTLVTVSSGTGGGGSGGGGSGGGGSEFDDIQMTQSPSSLSASVGDRVTITCRASQSISSYLNWYQQKPGKAPKLLIYDASNLETGVPSRFSGSGSGTDFTFTISSLQPEDIATYYCQQYDNLPLTFGGGTKVDIKRLEIQNPDPAVYQLRDSKSSDKSVCLFTDFDSQTNVSQSKDSDVYITDKCVLDMRSMDFKSNSAVAWSNKSDFACANAFNNSIIPEDTFFPSPESSCDVKLVEKSFETDTNLNFQNLSVIGFRILLLKVAGFNLLMTLRLWSSRAKRSGSGVKQTLNFDLLKLAGDVESNPGPTSMDWIWRILFLVGAATGAHSGPQLQLQESGPGLVKPSETLSLTCTVSGDSISSGDYYWGWIRQPPGKGLEWIGHIYYSGVTYYNPSLKSRVTISVDTSRNQFSLKLSSVTAADTAVYYCTREDSSNWRSRGQGTLVTVSSGSGGGGSGGGGSGGGGSFEQVQLVESGGGVVQPGRSLRLSCAASGFTFSSYAMHWVRQAPGKGLEWVAVISYDGSNKYYADSVKGRFTISRDNSKNTLYLQMNSLRAEDTAVYYCARAHNSSSWSFDYWGQGTLVTVSSTREDLKNVFPPEVAVFEPSEAEISHTQKATLVCLATGFYPDHVELSWWVNGKEVHSGVCTDPQPLKEQPALNDSRYCLSSRLRVSATFWQNPRNHFRCQVQFYGLSENDEWTQDRAKPVTQIVSAEAWGRADCGFTSESYQQGVLSATILYEILLGKATLYAVLVSALVLMAMVKRKDSRG

SEQ ID NO: 13280 - protein, 907 aa, Artificial Sequence
  Synthetic Polypeptide
MALPVTALLLPLALLLHAARPEVQLVESGGGLVQPGGSLRLSCAASGFSFSDFWMSWVRQAPGKGLEWVATISQAGSEKDYVDSVKGRFTISRDNAKKSLYLQMNSLRAEDTAVYYCASGVYSFDYRGQGTLVTVSSGTGGGGSGGGGSGGGGSEFDDVVMTQSPLSLPVSLGDQASISCRSSQRLVHSNGNTYLHWYLQKPGQSPKLLIYRVSNRFPGVPDRFSGSGSGTDFTLKISRVEAEDLGIYFCSQSTHVPYTFGGGTKLEIKRLEIQNPDPAVYQLRDSKSSDKSVCLFTDFDSQTNVSQSKDSDVYITDKCVLDMRSMDFKSNSAVAWSNKSDFACANAFNNSIIPEDTFFPSPESSCDVKLVEKSFETDTNLNFQNLSVIGFRILLLKVAGFNLLMTLRLWSSRAKRSGSGVKQTLNFDLLKLAGDVESNPGPTSMDWIWRILFLVGAATGAHSGPQLQLQESGPGLVKPSETLSLTCTVSGDSISSGDYYWGWIRQPPGKGLEWIGHIYYSGVTYYNPSLKSRVTISVDTSRNQFSLKLSSVTAADTAVYYCTREDSSNWRSRGQGTLVTVSSGSGGGGSGGGGSGGGGSFEEVRLQQSGPDLIKPGASVKMSCKASGYTFTGYVMHWVKQRPGQGLEWIGFINPYNDDIQSNERFRGKATLTSDKSSTTAYMELSSLTSEDSAVYYCARGAGYNFDGAYRFFDFWGQGTTLTVSSTREDLKNVFPPEVAVFEPSEAEISHTQKATLVCLATGFYPDHVELSWWVNGKEVHSGVCTDPQPLKEQPALNDSRYCLSSRLRVSATFWQNPRNHFRCQVQFYGLSENDEWTQDRAKPVTQIVSAEAWGRADCGFTSESYQQGVLSATILYEILLGKATLYAVLVSALVLMAMVKRKDSRG

SEQ ID NO: 13281 - protein, 898 aa, Artificial Sequence
  Synthetic Polypeptide
MALPVTALLLPLALLLHAARPEVQLVESGGGLVQPGGSLRLSCAASGFSFSDFWMSWVRQAPGKGLEWVATISQAGSEKDYVDSVKGRFTISRDNAKKSLYLQMNSLRAEDTAVYYCASGVYSFDYRGQGTLVTVSSGTGGGGSGGGGSGGGGSEFDSYELTQPPSVSVSPGQTATISCSGDQLGGKYGHWYQKKPGQSPVLVLYQDRKRPAGIPERFSGSSSGNTITLTISGTQAVDEADYYCQAWDTNLGGVFGGGTKVTVLGQLEIQNPDPAVYQLRDSKSSDKSVCLFTDFDSQTNVSQSKDSDVYITDKCVLDMRSMDFKSNSAVAWSNKSDFACANAFNNSIIPEDTFFPSPESSCDVKLVEKSFETDTNLNFQNLSVIGFRILLLKVAGFNLLMTLRLWSSRAKRSGSGVKQTLNFDLLKLAGDVESNPGPTSMDWIWRILFLVGAATGAHSGPQLQLQESGPGLVKPSETLSLTCTVSGDSISSGDYYWGWIRQPPGKGLEWIGHIYYSGVTYYNPSLKSRVTISVDTSRNQFSLKLSSVTAADTAVYYCTREDSSNWRSRGQGTLVTVSSGSGGGGSGGGGSGGGGSFEQVQLVESGAEVKKPGASVKVSCKASGYTFTGYYMHWVRQAPGQGLEWMGRINPNSGGTNYAQKFQGRVTMTRDTSISTAYMELSRLRSDDTAVYYCASPRGRGSAFDIWGQGTLVTVSSTREDLKNVFPPEVAVFEPSEAEISHTQKATLVCLATGFYPDHVELSWWVNGKEVHSGVCTDPQPLKEQPALNDSRYCLSSRLRVSATFWQNPRNHFRCQVQFYGLSENDEWTQDRAKPVTQIVSAEAWGRADCGFTSESYQQGVLSATILYEILLGKATLYAVLVSALVLMAMVKRKDSRG

SEQ ID NO: 13282 - protein, 901 aa, Artificial Sequence
  Synthetic Polypeptide
MALPVTALLLPLALLLHAARPEVQLVESGGGLVQPGGSLRLSCAASGFSFSDFWMSWVRQAPGKGLEWVATISQAGSEKDYVDSVKGRFTISRDNAKKSLYLQMNSLRAEDTAVYYCASGVYSFDYRGQGTLVTVSSGTGGGGSGGGGSGGGGSEFDNFMLTQPHSVSESPGKTVTISCTRSSGSIASKYVQWYQQRPGSSPTTVIYEDNQRPSGVPDRFSGSIDTSSNSASLTISGLRTEDEADYYCHSYDSNNHSVFGGGTKVTVLGQLEIQNPDPAVYQLRDSKSSDKSVCLFTDFDSQTNVSQSKDSDVYITDKCVLDMRSMDFKSNSAVAWSNKSDFACANAFNNSIIPEDTFFPSPESSCDVKLVEKSFETDTNLNFQNLSVIGFRILLLKVAGFNLLMTLRLWSSRAKRSGSGVKQTLNFDLLKLAGDVESNPGPTSMDWIWRILFLVGAATGAHSGPQLQLQESGPGLVKPSETLSLTCTVSGDSISSGDYYWGWIRQPPGKGLEWIGHIYYSGVTYYNPSLKSRVTISVDTSRNQFSLKLSSVTAADTAVYYCTREDSSNWRSRGQGTLVTVSSGSGGGGSGGGGSGGGGSFEEVQLVESGGGVVQPGGSLRLSCAASGFTFSSYAMSWVRQAPGKGLEWVSAISGSGGSTYYADSVKGRFSISRDNSKNTLYLQMNSLRAEDTAVYYCARTRSSGAFDIWGQGTLVTVSSTREDLKNVFPPEVAVFEPSEAEISHTQKATLVCLATGFYPDHVELSWWVNGKEVHSGVCTDPQPLKEQPALNDSRYCLSSRLRVSATFWQNPRNHFRCQVQFYGLSENDEWTQDRAKPVTQIVSAEAWGRADCGFTSESYQQGVLSATILYEILLGKATLYAVLVSALVLMAMVKRKDSRG

SEQ ID NO: 13283 - protein, 896 aa, Artificial Sequence
  Synthetic Polypeptide
MALPVTALLLPLALLLHAARPEVQLVESGGGLVQPGGSLRLSCAASGFSFSDFWMSWVRQAPGKGLEWVATISQAGSEKDYVDSVKGRFTISRDNAKKSLYLQMNSLRAEDTAVYYCASGVYSFDYRGQGTLVTVSSGTGGGGSGGGGSGGGGSEFDIQMNQSPSSLSASLGDTITITCHASQNINVWLSWYQQKPGNIPKLLIYKASNLHTGVPSRFSGSGSGTGFTITISSLQPEDIATYYCQQGQSYPWTFGGGTKLEIKRLEIQNPDPAVYQLRDSKSSDKSVCLFTDFDSQTNVSQSKDSDVYITDKCVLDMRSMDFKSNSAVAWSNKSDFACANAFNNSIIPEDTFFPSPESSCDVKLVEKSFETDTNLNFQNLSVIGFRILLLKVAGFNLLMTLRLWSSRAKRSGSGVKQTLNFDLLKLAGDVESNPGPTSMDWIWRILFLVGAATGAHSGPQLQLQESGPGLVKPSETLSLTCTVSGDSISSGDYYWGWIRQPPGKGLEWIGHIYYSGVTYYNPSLKSRVTISVDTSRNQFSLKLSSVTAADTAVYYCTREDSSNWRSRGQGTLVTVSSGSGGGGSGGGGSGGGGSFEEVQLQQSGPELVKPGASVKISCKASGYSFTGYFMNWVKQSHGKSLEYIGRFNPYNGETLYNQKFKGKATLTVDKSSSTVHMELLSVTSEDSAVYYCGRSGNDDAMDYWGQGTSVTVSSATREDLKNVFPPEVAVFEPSEAEISHTQKATLVCLATGFYPDHVELSWWVNGKEVHSGVCTDPQPLKEQPALNDSRYCLSSRLRVSATFWQNPRNHFRCQVQFYGLSENDEWTQDRAKPVTQIVSAEAWGRADCGFTSESYQQGVLSATILYEILLGKATLYAVLVSALVLMAMVKRKDSRG

SEQ ID NO: 13284 - protein, 897 aa, Artificial Sequence
  Synthetic Polypeptide
MALPVTALLLPLALLLHAARPEVQLVESGGGLVQPGGSLRLSCAASGFSFSDFWMSWVRQAPGKGLEWVATISQAGSEKDYVDSVKGRFTISRDNAKKSLYLQMNSLRAEDTAVYYCASGVYSFDYRGQGTLVTVSSGTGGGGSGGGGSGGGGSEFEIVLTQSPATLSLSPGERATLSCRASQSVRSYLAWYQQKPGQAPRLLIYDASNRATGIPARFSGSGSGTDFTLTISSLEPEDFAVYYCQQRSNWPPTFGQGTKVEIKLEIQNPDPAVYQLRDSKSSDKSVCLFTDFDSQTNVSQSKDSDVYITDKCVLDMRSMDFKSNSAVAWSNKSDFACANAFNNSIIPEDTFFPSPESSCDVKLVEKSFETDTNLNFQNLSVIGFRILLLKVAGFNLLMTLRLWSSRAKRSGSGVKQTLNFDLLKLAGDVESNPGPTSMDWIWRILFLVGAATGAHSGPQLQLQESGPGLVKPSETLSLTCTVSGDSISSGDYYWGWIRQPPGKGLEWIGHIYYSGVTYYNPSLKSRVTISVDTSRNQFSLKLSSVTAADTAVYYCTREDSSNWRSRGQGTLVTVSSGSGGGGSGGGGSGGGGSFEQLQVQESGPGLVKPSETLSLTCTVSGGSISNSYFSWGWIRQPPGKGLEWIGSFYYGEKTYYNPSLKSRATISIDTSKSQFSLKLSSVTAADTAVYYCPRGPTMIRGVIDSWGQGTLVTVSSTREDLKNVFPPEVAVFEPSEAEISHTQKATLVCLATGFYPDHVELSWWVNGKEVHSGVCTDPQPLKEQPALNDSRYCLSSRLRVSATFWQNPRNHFRCQVQFYGLSENDEWTQDRAKPVTQIVSAEAWGRADCGFTSESYQQGVLSATILYEILLGKATLYAVLVSALVLMAMVKRKDSRG

SEQ ID NO: 13285 - protein, 906 aa, Artificial Sequence
  Synthetic Polypeptide
MALPVTALLLPLALLLHAARPEVQLVESGGGLVQPGGSLRLSCAASGFSFSDFWMSWVRQAPGKGLEWVATISQAGSEKDYVDSVKGRFTISRDNAKKSLYLQMNSLRAEDTAVYYCASGVYSFDYRGQGTLVTVSSGTGGGGSGGGGSGGGGSEFDIVMTQTPLSLPVTPGEPASISCRSSRSLLDSDDGNTYLDWYLQKPGQSPQLLIYTLSYRASGVPDRFSGSGSGTDFTLKISRVEAEDVGVYYCMQRVEFPITFGQGTRLEIKRLEIQNPDPAVYQLRDSKSSDKSVCLFTDFDSQTNVSQSKDSDVYITDKCVLDMRSMDFKSNSAVAWSNKSDFACANAFNNSIIPEDTFFPSPESSCDVKLVEKSFETDTNLNFQNLSVIGFRILLLKVAGFNLLMTLRLWSSRAKRSGSGVKQTLNFDLLKLAGDVESNPGPTSMDWIWRILFLVGAATGAHSGPQLQLQESGPGLVKPSETLSLTCTVSGDSISSGDYYWGWIRQPPGKGLEWIGHIYYSGVTYYNPSLKSRVTISVDTSRNQFSLKLSSVTAADTAVYYCTREDSSNWRSRGQGTLVTVSSGSGGGGSGGGGSGGGGSFEQVQLVESGGGVVQPGRSLRLSCAASGFIFSRYGMHWVRQAPGKGLKWVAVIWYDGSNKLYADSVKGRFTISRDNSKNTLYLQMNSLRAEDTAVYYCARDYYDNSRHHWGFDYWGQGTLVTVSSTREDLKNVFPPEVAVFEPSEAEISHTQKATLVCLATGFYPDHVELSWWVNGKEVHSGVCTDPQPLKEQPALNDSRYCLSSRLRVSATFWQNPRNHFRCQVQFYGLSENDEWTQDRAKPVTQIVSAEAWGRADCGFTSESYQQGVLSATILYEILLGKATLYAVLVSALVLMAMVKRKDSRG

SEQ ID NO: 13286 - protein, 896 aa, Artificial Sequence
  Synthetic Polypeptide
MALPVTALLLPLALLLHAARPEVQLVESGGGLVQPGGSLRLSCAASGFSFSDFWMSWVRQAPGKGLEWVATISQAGSEKDYVDSVKGRFTISRDNAKKSLYLQMNSLRAEDTAVYYCASGVYSFDYRGQGTLVTVSSGTGGGGSGGGGSGGGGSEFEIQMTQSPSSMSASLGDTITITCQATQDIFKNLNWYQQKPGKPPSLLIYYATELAEGVPSRFSGSGSGSDYSLTISNLESEDFAAYYCLQFFEFPFTFGSGTKLEMKLEIQNPDPAVYQLRDSKSSDKSVCLFTDFDSQTNVSQSKDSDVYITDKCVLDMRSMDFKSNSAVAWSNKSDFACANAFNNSIIPEDTFFPSPESSCDVKLVEKSFETDTNLNFQNLSVIGFRILLLKVAGFNLLMTLRLWSSRAKRSGSGVKQTLNFDLLKLAGDVESNPGPTSMDWIWRILFLVGAATGAHSGPQLQLQESGPGLVKPSETLSLTCTVSGDSISSGDYYWGWIRQPPGKGLEWIGHIYYSGVTYYNPSLKSRVTISVDTSRNQFSLKLSSVTAADTAVYYCTREDSSNWRSRGQGTLVTVSSGSGGGGSGGGGSGGGGSFEQVQLQQSGAELVRPGTSVKVSCKASGYVFTNYWIEWIKQRPGQGLEWIGVMNPGSGETTYNEKFKGKATLTADKSSSTAYMQLSSLTSVDSAVYFCARDHDRDYYAMDYWGQGTSVTVSSTREDLKNVFPPEVAVFEPSEAEISHTQKATLVCLATGFYPDHVELSWWVNGKEVHSGVCTDPQPLKEQPALNDSRYCLSSRLRVSATFWQNPRNHFRCQVQFYGLSENDEWTQDRAKPVTQIVSAEAWGRADCGFTSESYQQGVLSATILYEILLGKATLYAVLVSALVLMAMVKRKDSRG

SEQ ID NO: 13287 - protein, 893 aa, Artificial Sequence
  Synthetic Polypeptide
MALPVTALLLPLALLLHAARPEVQLVESGGGLVQPGGSLRLSCAASGFSFSDFWMSWVRQAPGKGLEWVATISQAGSEKDYVDSVKGRFTISRDNAKKSLYLQMNSLRAEDTAVYYCASGVYSFDYRGQGTLVTVSSGTGGGGSGGGGSGGGGSEFDILLTQSPAILSVSPGERVSFSCRASQNIGTSIHWYQQRTNGSPRLLIKYASESVSGIPSRFSGSGSGTDFTLSINSVESEDIADYYCQHTNSWPTTFGGGTKLEIKRLEIQNPDPAVYQLRDSKSSDKSVCLFTDFDSQTNVSQSKDSDVYITDKCVLDMRSMDFKSNSAVAWSNKSDFACANAFNNSIIPEDTFFPSPESSCDVKLVEKSFETDTNLNFQNLSVIGFRILLLKVAGFNLLMTLRLWSSRAKRSGSGVKQTLNFDLLKLAGDVESNPGPTSMDWIWRILFLVGAATGAHSGPQLQLQESGPGLVKPSETLSLTCTVSGDSISSGDYYWGWIRQPPGKGLEWIGHIYYSGVTYYNPSLKSRVTISVDTSRNQFSLKLSSVTAADTAVYYCTREDSSNWRSRGQGTLVTVSSGSGGGGSGGGGSGGGGSFEQVQLQQSDAELVKPGASVKISCKASGYTFTDHAIHWVKQKPEQGLEWIGYFSPGNGDIKYNEKFKGKATLTADKSSSTAYMQLNSLTSEDSAVYFCKRSYGNYDYWGQGTTLTVSSTREDLKNVFPPEVAVFEPSEAEISHTQKATLVCLATGFYPDHVELSWWVNGKEVHSGVCTDPQPLKEQPALNDSRYCLSSRLRVSATFWQNPRNHFRCQVQFYGLSENDEWTQDRAKPVTQIVSAEAWGRADCGFTSESYQQGVLSATILYEILLGKATLYAVLVSALVLMAMVKRKDSRG

SEQ ID NO: 13288 - protein, 898 aa, Artificial Sequence
  Synthetic Polypeptide
MALPVTALLLPLALLLHAARPEVQLVESGGGLVQPGGSLRLSCAASGFSFSDFWMSWVRQAPGKGLEWVATISQAGSEKDYVDSVKGRFTISRDNAKKSLYLQMNSLRAEDTAVYYCASGVYSFDYRGQGTLVTVSSGTGGGGSGGGGSGGGGSEFDIVMTQSPDSLAVSLGERATINCKSSQSLLNSGDQKNYLTWYQQKPGQPPKLLIYWASTRESGVPDRFSGSGSGTDFTLTISSLQAEDVAVYYCQNDYSYPLTFGQGTKVEIKLEIQNPDPAVYQLRDSKSSDKSVCLFTDFDSQTNVSQSKDSDVYITDKCVLDMRSMDFKSNSAVAWSNKSDFACANAFNNSIIPEDTFFPSPESSCDVKLVEKSFETDTNLNFQNLSVIGFRILLLKVAGFNLLMTLRLWSSRAKRSGSGVKQTLNFDLLKLAGDVESNPGPTSMDWIWRILFLVGAATGAHSGPQLQLQESGPGLVKPSETLSLTCTVSGDSISSGDYYWGWIRQPPGKGLEWIGHIYYSGVTYYNPSLKSRVTISVDTSRNQFSLKLSSVTAADTAVYYCTREDSSNWRSRGQGTLVTVSSGSGGGGSGGGGSGGGGSFEQVQLVQSGAEVKKTGSSVKVSCKASGYTFTDHAIHVWRQAPGQALEWMGHFSPGNTDIKYNDKFKGRVTLTVDRSMSTAYMELSSLRSEDTAMYYCKTSTFFFDYWGQGTMVTVSSTREDLKNVFPPEVAVFEPSEAEISHTQKATLVCLATGFYPDHVELSWWVNGKEVHSGVCTDPQPLKEQPALNDSRYCLSSRLRVSATFWQNPRNHFRCQVQFYGLSENDEWTQDRAKPVTQIVSAEAWGRADCGFTSESYQQGVLSATILYEILLGKATLYAVLVSALVLMAMVKRKDSRG

SEQ ID NO: 13289 - protein, 897 aa, Artificial Sequence
  Synthetic Polypeptide
MALPVTALLLPLALLLHAARPEVQLVESGGGLVQPGGSLRLSCAASGFSFSDFWMSWVRQAPGKGLEWVATISQAGSEKDYVDSVKGRFTISRDNAKKSLYLQMNSLRAEDTAVYYCASGVYSFDYRGQGTLVTVSSGTGGGGSGGGGSGGGGSEFDIQMTQSPSSLSASVGDRVTITCKASQDVSIAVAWYQQKPGKAPKVLIYSASYRYTGVPDRFSGSGSGTDFTFTISSLQPEDIAVYYCQQHYITPLTFGGGTKVEIKLEIQNPDPAVYQLRDSKSSDKSVCLFTDFDSQTNVSQSKDSDVYITDKCVLDMRSMDFKSNSAVAWSNKSDFACANAFNNSIIPEDTFFPSPESSCDVKLVEKSFETDTNLNFQNLSVIGFRILLLKVAGFNLLMTLRLWSSRAKRSGSGVKQTLNFDLLKLAGDVESNPGPTSMDWIWRILFLVGAATGAHSGPQLQLQESGPGLVKPSETLSLTCTVSGDSISSGDYYWGWIRQPPGKGLEWIGHIYYSGVTYYNPSLKSRVTISVDTSRNQFSLKLSSVTAADTAVYYCTREDSSNWRSRGQGTLVTVSSGSGGGGSGGGGSGGGGSFEQIQLVQSGHEVKKPGASVKVSCKASGYTFTNYGMNWVRQAPGQGLEWMGWINTKTGEPTYAEEFKGRFVFSLETSASTAYLQISSLKAEDTAMYFCGRGGYGSSYWYFDVWGQGTTVTVSSTREDLKNVFPPEVAVFEPSEAEISHTQKATLVCLATGFYPDHVELSWWVNGKEVHSGVCTDPQPLKEQPALNDSRYCLSSRLRVSATFWQNPRNHFRCQVQFYGLSENDEWTQDRAKPVTQIVSAEAWGRADCGFTSESYQQGVLSATILYEILLGKATLYAVLVSALVLMAMVKRKDSRG

SEQ ID NO: 13290 - protein, 899 aa, Artificial Sequence
  Synthetic Polypeptide
MALPVTALLLPLALLLHAARPEVQLVESGGGLVQPGGSLRLSCAASGFSFSDFWMSWVRQAPGKGLEWVATISQAGSEKDYVDSVKGRFTISRDNAKKSLYLQMNSLRAEDTAVYYCASGVYSFDYRGQGTLVTVSSGTGGGGSGGGGSGGGGSEFDIVMTQSPDSLAVSLGERATINCRASKSVSTSGYSYMHWYQQKPGQPPKLLIYLASNLESGVPDRFSGSGSGTDFTLTISSLQAEDVAVYYCQHSRELPYTFGQGTKLEIKLEIQNPDPAVYQLRDSKSSDKSVCLFTDFDSQTNVSQSKDSDVYITDKCVLDMRSMDFKSNSAVAWSNKSDFACANAFNNSIIPEDTFFPSPESSCDVKLVEKSFETDTNLNFQNLSVIGFRILLLKVAGFNLLMTLRLWSSRAKRSGSGVKQTLNFDLLKLAGDVESNPGPTSMDWIWRILFLVGAATGAHSGPQLQLQESGPGLVKPSETLSLTCTVSGDSISSGDYYWGWIRQPPGKGLEWIGHIYYSGVTYYNPSLKSRVTISVDTSRNQFSLKLSSVTAADTAVYYCTREDSSNWRSRGQGTLVTVSSGSGGGGSGGGGSGGGGSFEQVQLQESGPGLVKPSETLSLTCTVSGGSISSYGVHWIRQPPGKGLEWIGVIWTSGVTDYNSALMGRVTISVDTSKNQFSLKLSSVTAADTAVYYCARDGDYDRYTMDYWGQGTLVTVSSTREDLKNVFPPEVAVFEPSEAEISHTQKATLVCLATGFYPDHVELSWWVNGKEVHSGVCTDPQPLKEQPALNDSRYCLSSRLRVSATFWQNPRNHFRCQVQFYGLSENDEWTQDRAKPVTQIVSAEAWGRADCGFTSESYQQGVLSATILYEILLGKATLYAVLVSALVLMAMVKRKDSRG

SEQ ID NO: 13291 - protein, 899 aa, Artificial Sequence
  Synthetic Polypeptide
MALPVTALLLPLALLLHAARPEVQLVESGGGLVQPGGSLRLSCAASGFSFSDFWMSWVRQAPGKGLEWVATISQAGSEKDYVDSVKGRFTISRDNAKKSLYLQMNSLRAEDTAVYYCASGVYSFDYRGQGTLVTVSSGTGGGGSGGGGSGGGGSEFDIQMTQSPSSLSASVGDRVTITCRASQSIGTSLHWYQQKPGKAPKLLIKFASRLQSGVPSRFSGSGSGTDFTLTISSLQPEDFATYYCQQSPGFPPTFGQGTKLEIKRLEIQNPDPAVYQLRDSKSSDKSVCLFTDFDSQTNVSQSKDSDVYITDKCVLDMRSMDFKSNSAVAWSNKSDFACANAFNNSIIPEDTFFPSPESSCDVKLVEKSFETDTNLNFQNLSVIGFRILLLKVAGFNLLMTLRLWSSRAKRSGSGVKQTLNFDLLKLAGDVESNPGPTSMDWIWRILFLVGAATGAHSGPQLQLQESGPGLVKPSETLSLTCTVSGDSISSGDYYWGWIRQPPGKGLEWIGHIYYSGVTYYNPSLKSRVTISVDTSRNQFSLKLSSVTAADTAVYYCTREDSSNWRSRGQGTLVTVSSGSGGGGSGGGGSGGGGSFEQVQLVESGGGLVKPGGSLRLSCAASGFSITTSGYYWTWIRQFPGKGLEWMGYIGYNSKTYYNPALKSRITISRDNAKNSLYLQMNSLRAEDTAVYYCARSLYGGYKDAFDSWGQGTLVTVSSTREDLKNVFPPEVAVFEPSEAEISHTQKATLVCLATGFYPDHVELSWWVNGKEVHSGVCTDPQPLKEQPALNDSRYCLSSRLRVSATFWQNPRNHFRCQVQFYGLSENDEWTQDRAKPVTQIVSAEAWGRADCGFTSESYQQGVLSATILYEILLGKATLYAVLVSALVLMAMVKRKDSRG

SEQ ID NO: 13292 - protein, 904 aa, Artificial Sequence
  Synthetic Polypeptide
MALPVTALLLPLALLLHAARPEVQLVESGGGLVQPGGSLRLSCAASGFSFSDFWMSWVRQAPGKGLEWVATISQAGSEKDYVDSVKGRFTISRDNAKKSLYLQMNSLRAEDTAVYYCASGVYSFDYRGQGTLVTVSSGTGGGGSGGGGSGGGGSEFDEIVLTQSPLSLPVTPGEPASISCRSSQSLLHSIGYNYLDWYLQKPGQSPQLLIYLGSNRASGVPDRFSGSGSGTDFTLKISRVEAEDVGVYYCMQALQTPLTFGGGTKVEIKRLEIQNPDPAVYQLRDSKSSDKSVCLFTDFDSQTNVSQSKDSDVYITDKCVLDMRSMDFKSNSAVAWSNKSDFACANAFNNSIIPEDTFFPSPESSCDVKLVEKSFETDTNLNFQNLSVIGFRILLLKVAGFNLLMTLRLWSSRAKRSGSGVKQTLNFDLLKLAGDVESNPGPTSMDWIWRILFLVGAATGAHSGPQLQLQESGPGLVKPSETLSLTCTVSGDSISSGDYYWGWIRQPPGKGLEWIGHIYYSGVTYYNPSLKSRVTISVDTSRNQFSLKLSSVTAADTAVYYCTREDSSNWRSRGQGTLVTVSSGSGGGGSGGGGSGGGGSFEEVQLVESGGGVVQPGRSLRLSCAASGFTFRSYGMHWVRQAPGKGLEWVAVISYDGSNKYYTDSVNGRFTISRDNSKNTLYLQMNSLRAEDTAVYYCARGGGYYETSGPDYWGQGTLVTVSSTREDLKNVFPPEVAVFEPSEAEISHTQKATLVCLATGFYPDHVELSWWVNGKEVHSGVCTDPQPLKEQPALNDSRYCLSSRLRVSATFWQNPRNHFRCQVQFYGLSENDEWTQDRAKPVTQIVSAEAWGRADCGFTSESYQQGVLSATILYEILLGKATLYAVLVSALVLMAMVKRKDSRG

SEQ ID NO: 13293 - protein, 902 aa, Artificial Sequence
  Synthetic Polypeptide
MALPVTALLLPLALLLHAARPEVQLVESGGGLVQPGGSLRLSCAASGFSFSDFWMSWVRQAPGKGLEWVATISQAGSEKDYVDSVKGRFTISRDNAKKSLYLQMNSLRAEDTAVYYCASGVYSFDYRGQGTLVTVSSGTGGGGSGGGGSGGGGSEFDDVVMTQSPLSLPVTPGEPASISCRSSQSLLHSIGYNYLHWFLQKPGQSPQLLIYLGSNRASGVPDRFSGSGSGTDFTLKISRVEAEDVGVYYCMQALQTPPTFGQGTRLEIKRLEIQNPDPAVYQLRDSKSSDKSVCLFTDFDSQTNVSQSKDSDVYITDKCVLDMRSMDFKSNSAVAWSNKSDFACANAFNNSIIPEDTFFPSPESSCDVKLVEKSFETDTNLNFQNLSVIGFRILLLKVAGFNLLMTLRLWSSRAKRSGSGVKQTLNFDLLKLAGDVESNPGPTSMDWIWRILFLVGAATGAHSGPQLQLQESGPGLVKPSETLSLTCTVSGDSISSGDYYWGWIRQPPGKGLEWIGHIYYSGVTYYNPSLKSRVTISVDTSRNQFSLKLSSVTAADTAVYYCTREDSSNWRSRGQGTLVTVSSGSGGGGSGGGGSGGGGSFEQLQLQESGPGLVKPSGTLSLTCAVSGGSISSSNWWSWVRQPPGKGLEWIGEIYHSGSTNYNPSLKSRVTISVDKSKNQFSLKLSSVTAADTAVYYCVGSPYGDYVLDYWGQGTLVTVSSTREDLKNVFPPEVAVFEPSEAEISHTQKATLVCLATGFYPDHVELSWWVNGKEVHSGVCTDPQPLKEQPALNDSRYCLSSRLRVSATFWQNPRNHFRCQVQFYGLSENDEWTQDRAKPVTQIVSAEAWGRADCGFTSESYQQGVLSATILYEILLGKATLYAVLVSALVLMAMVKRKDSRG

SEQ ID NO: 13294 - protein, 900 aa, Artificial Sequence
  Synthetic Polypeptide
MALPVTALLLPLALLLHAARPEVQLVESGGGLVQPGGSLRLSCAASGFSFSDFWMSWVRQAPGKGLEWVATISQAGSEKDYVDSVKGRFTISRDNAKKSLYLQMNSLRAEDTAVYYCASGVYSFDYRGQGTLVTVSSGTGGGGSGGGGSGGGGSEFDEIVLTQSPGTLSLSLGERATLSCRASQSISSSFLAWYQQKPGQAPKLLIYAASTRATGIPDRFSGSGSGTDFTLTISRLEPEDFAVYYCQQYGRSLSFGGGTKVEVKLEIQNPDPAVYQLRDSKSSDKSVCLFTDFDSQTNVSQSKDSDVYITDKCVLDMRSMDFKSNSAVAWSNKSDFACANAFNNSIIPEDTFFPSPESSCDVKLVEKSFETDTNLNFQNLSVIGFRILLLKVAGFNLLMTLRLWSSRAKRSGSGVKQTLNFDLLKLAGDVESNPGPTSMDWIWRILFLVGAATGAHSGPQLQLQESGPGLVKPSETLSLTCTVSGDSISSGDYYWGWIRQPPGKGLEWIGHIYYSGVTYYNPSLKSRVTISVDTSRNQFSLKLSSVTAADTAVYYCTREDSSNWRSRGQGTLVTVSSGSGGGGSGGGGSGGGGSFEQVQLQQSGPGLVKPSQTLSLTCAISGDSVSGNSATWNWIRQSPSRGLEWLGRTYYRSKWNHDYAESVKSRITINPDTSKNQFSLQLNSVTPEDTAVYYCARGDSSSWYAFDYWGQGTLVTVSSTREDLKNVFPPEVAVFEPSEAEISHTQKATLVCLATGFYPDHVELSWWVNGKEVHSGVCTDPQPLKEQPALNDSRYCLSSRLRVSATFWQNPRNHFRCQVQFYGLSENDEWTQDRAKPVTQIVSAEAWGRADCGFTSESYQQGVLSATILYEILLGKATLYAVLVSALVLMAMVKRKDSRG

SEQ ID NO: 13295 - protein, 899 aa, Artificial Sequence
  Synthetic Polypeptide
MALPVTALLLPLALLLHAARPEVQLVESGGGLVQPGGSLRLSCAASGFSFSDFWMSWVRQAPGKGLEWVATISQAGSEKDYVDSVKGRFTISRDNAKKSLYLQMNSLRAEDTAVYYCASGVYSFDYRGQGTLVTVSSGTGGGGSGGGGSGGGGSEFDQSVVTQPPSVSVAPGKTARITCGRNNIGSKSVHWYQQKPGQAPVLVVYDDSDRPSGIPERFSGSNSGNTATLTISRVEAGDEADYYCQVWDSSSDHVVFGGGTKLTVLGLEIQNPDPAVYQLRDSKSSDKSVCLFTDFDSQTNVSQSKDSDVYITDKCVLDMRSMDFKSNSAVAWSNKSDFACANAFNNSIIPEDTFFPSPESSCDVKLVEKSFETDTNLNFQNLSVIGFRILLLKVAGFNLLMTLRLWSSRAKRSGSGVKQTLNFDLLKLAGDVESNPGPTSMDWIWRILFLVGAATGAHSGPQLQLQESGPGLVKPSETLSLTCTVSGDSISSGDYYWGWIRQPPGKGLEWIGHIYYSGVTYYNPSLKSRVTISVDTSRNQFSLKLSSVTAADTAVYYCTREDSSNWRSRGQGTLVTVSSGSGGGGSGGGGSGGGGSFEVQLVQSGGGVMRPGGSLRLSCAASGFTFDDYGMSWVRQAPGKGLEWVSGINWNGGSTGYADSVRGRFTISRDNAKNSLYLQMNSLRAEDTALYYCARERGYGYHDPHDYWGQGTLVTVSSTREDLKNVFPPEVAVFEPSEAEISHTQKATLVCLATGFYPDHVELSWWVNGKEVHSGVCTDPQPLKEQPALNDSRYCLSSRLRVSATFWQNPRNHFRCQVQFYGLSENDEWTQDRAKPVTQIVSAEAWGRADCGFTSESYQQGVLSATILYEILLGKATLYAVLVSALVLMAMVKRKDSRG

SEQ ID NO: 13296 - protein, 912 aa, Artificial Sequence
  Synthetic Polypeptide
MALPVTALLLPLALLLHAARPEVQLVESGGGLVQPGGSLRLSCAASGFSFSDFWMSWVRQAPGKGLEWVATISQAGSEKDYVDSVKGRFTISRDNAKKSLYLQMNSLRAEDTAVYYCASGVYSFDYRGQGTLVTVSSGTGGGGSGGGGSGGGGSEFEQKLISEEDLEFQAVVTQPPSASGTPGQRVTISCSGSSSNIGSNTVNWYQQVPGTAPKLLIYSNNQRPSGVPDRFSGSKSGTSASLAISGLQSEDEADYYCAAWDDSLNGWVFGGGTKLTVLLEIQNPDPAVYQLRDSKSSDKSVCLFTDFDSQTNVSQSKDSDVYITDKCVLDMRSMDFKSNSAVAWSNKSDFACANAFNNSIIPEDTFFPSPESSCDVKLVEKSFETDTNLNFQNLSVIGFRILLLKVAGFNLLMTLRLWSSRAKRSGSGVKQTLNFDLLKLAGDVESNPGPTSMDWIWRILFLVGAATGAHSGPQLQLQESGPGLVKPSETLSLTCTVSGDSISSGDYYWGWIRQPPGKGLEWIGHIYYSGVTYYNPSLKSRVTISVDTSRNQFSLKLSSVTAADTAVYYCTREDSSNWRSRGQGTLVTVSSGSGGGGSGGGGSGGGGSFEQMQLVQSGAEVKEPGESLRISCKGSGYSFTNFWISWVRQMPGKGLEWMGRVDPGYSYSTYSPSFQGHVTISADKSTSTAYLQWNSLKASDTAMYYCARVQYSGYYDWFDPWGQGTLVTVSSTREDLKNVFPPEVAVFEPSEAEISHTQKATLVCLATGFYPDHVELSWWVNGKEVHSGVCTDPQPLKEQPALNDSRYCLSSRLRVSATFWQNPRNHFRCQVQFYGLSENDEWTQDRAKPVTQIVSAEAWGRADCGFTSESYQQGVLSATILYEILLGKATLYAVLVSALVLMAMVKRKDSRG

SEQ ID NO: 13297 - protein, 906 aa, Artificial Sequence
  Synthetic Polypeptide
MALPVTALLLPLALLLHAARPEVQLVESGGGLVQPGGSLRLSCAASGFSFSDFWMSWVRQAPGKGLEWVATISQAGSEKDYVDSVKGRFTISRDNAKKSLYLQMNSLRAEDTAVYYCASGVYSFDYRGQGTLVTVSSGTGGGGSGGGGSGGGGSEFEQKLISEEDLEFDIQMTQSPSTLSASVGDRVTITCRASQNINKWLAWYQQRPGKAPQLLIYKASSLESGVPSRFSGSGSGTEYTLTISSLQPDDFATYYCQQYNSYATFGQGTKVEIKRLEIQNPDPAVYQLRDSKSSDKSVCLFTDFDSQTNVSQSKDSDVYITDKCVLDMRSMDFKSNSAVAWSNKSDFACANAFNNSIIPEDTFFPSPESSCDVKLVEKSFETDTNLNFQNLSVIGFRILLLKVAGFNLLMTLRLWSSRAKRSGSGVKQTLNFDLLKLAGDVESNPGPTSMDWIWRILFLVGAATGAHSGPQLQLQESGPGLVKPSETLSLTCTVSGDSISSGDYYWGWIRQPPGKGLEWIGHIYYSGVTYYNPSLKSRVTISVDTSRNQFSLKLSSVTAADTAVYYCTREDSSNWRSRGQGTLVTVSSGSGGGGSGGGGSGGGGSFEQVQLVQSGAEVKKPGESLKISCKGSGYNFSNKWIGWVRQLPGRGLEWIAIIYPGYSDITYSPSFQGRVTISADTSINTAYLHWHSLKASDTAMYYCVRHTALAGFDYWGLGTLVTVSSTREDLKNVFPPEVAVFEPSEAEISHTQKATLVCLATGFYPDHVELSWWVNGKEVHSGVCTDPQPLKEQPALNDSRYCLSSRLRVSATFWQNPRNHFRCQVQFYGLSENDEWTQDRAKPVTQIVSAEAWGRADCGFTSESYQQGVLSATILYEILLGKATLYAVLVSALVLMAMVKRKDSRG

SEQ ID NO: 13298 - protein, 898 aa, Artificial Sequence
  Synthetic Polypeptide
MALPVTALLLPLALLLHAARPEVQLVESGGGLVQPGGSLRLSCAASGFSFSDFWMSWVRQAPGKGLEWVATISQAGSEKDYVDSVKGRFTISRDNAKKSLYLQMNSLRAEDTAVYYCASGVYSFDYRGQGTLVTVSSGTGGGGSGGGGSGGGGSEFDIVLTQSPASLAVSLGQRATISCRASESVDNYGNTFMHWYQQKPGQPPKLLIYRASNLESGIPARFSGSGSRTDFTLTINPVEADDVATYYCQQSNEDPPTFGAGTKLELKLEIQNPDPAVYQLRDSKSSDKSVCLFTDFDSQTNVSQSKDSDVYITDKCVLDMRSMDFKSNSAVAWSNKSDFACANAFNNSIIPEDTFFPSPESSCDVKLVEKSFETDTNLNFQNLSVIGFRILLLKVAGFNLLMTLRLWSSRAKRSGSGVKQTLNFDLLKLAGDVESNPGPTSMDWIWRILFLVGAATGAHSGPQLQLQESGPGLVKPSETLSLTCTVSGDSISSGDYYWGWIRQPPGKGLEWIGHIYYSGVTYYNPSLKSRVTISVDTSRNQFSLKLSSVTAADTAVYYCTREDSSNWRSRGQGTLVTVSSGSGGGGSGGGGSGGGGSFEQIQLVQSGPELKKPGETVKISCKASGYIFTNYGMNWVKQAPGKSFKWMGWINTYTGESTYSADFKGRFAFSLETSASTAYLHINDLKNEDTATYFCARSGGYDPMDYWGQGTSVTVSSTREDLKNVFPPEVAVFEPSEAEISHTQKATLVCLATGFYPDHVELSWWVNGKEVHSGVCTDPQPLKEQPALNDSRYCLSSRLRVSATFWQNPRNHFRCQVQFYGLSENDEWTQDRAKPVTQIVSAEAWGRADCGFTSESYQQGVLSATILYEILLGKATLYAVLVSALVLMAMVKRKDSRG

SEQ ID NO: 13299 - protein, 897 aa, Artificial Sequence
  Synthetic Polypeptide
MALPVTALLLPLALLLHAARPEVQLVESGGGLVQPGGSLRLSCAASGFSFSDFWMSWVRQAPGKGLEWVATISQAGSEKDYVDSVKGRFTISRDNAKKSLYLQMNSLRAEDTAVYYCASGVYSFDYRGQGTLVTVSSGTGGGGSGGGGSGGGGSEFDEIVLTQSPGTLSLSPGERATLSCRASQSVSNTYLAWYHQRPGQAPRLLIYGASSRATGIPDRFSGSGSGTDFALTISSLEPEDFAVYYCQQYSNSWTFGQGTKVEIKRLEIQNPDPAVYQLRDSKSSDKSVCLFTDFDSQTNVSQSKDSDVYITDKCVLDMRSMDFKSNSAVAWSNKSDFACANAFNNSIIPEDTFFPSPESSCDVKLVEKSFETDTNLNFQNLSVIGFRILLLKVAGFNLLMTLRLWSSRAKRSGSGVKQTLNFDLLKLAGDVESNPGPTSMDWIWRILFLVGAATGAHSGPQLQLQESGPGLVKPSETLSLTCTVSGDSISSGDYYWGWIRQPPGKGLEWIGHIYYSGVTYYNPSLKSRVTISVDTSRNQFSLKLSSVTAADTAVYYCTREDSSNWRSRGQGTLVTVSSGSGGGGSGGGGSGGGGSFEQVQLVESGGGVVQPGRSLRLSCAASGFTFSSYDMHWVRQAPGKGLEWVAVISYDGTNEYYADSVKGRFTISRDTSKNTLYLQMNSLRAEDTAVYYCARERYFDWSFDYWGQGTLVSVSSTREDLKNVFPPEVAVFEPSEAEISHTQKATLVCLATGFYPDHVELSWWVNGKEVHSGVCTDPQPLKEQPALNDSRYCLSSRLRVSATFWQNPRNHFRCQVQFYGLSENDEWTQDRAKPVTQIVSAEAWGRADCGFTSESYQQGVLSATILYEILLGKATLYAVLVSALVLMAMVKRKDSRG

SEQ ID NO: 13300 - protein, 896 aa, Artificial Sequence
  Synthetic Polypeptide
MALPVTALLLPLALLLHAARPEVQLVESGGGLVQPGGSLRLSCAASGFSFSDFWMSWVRQAPGKGLEWVATISQAGSEKDYVDSVKGRFTISRDNAKKSLYLQMNSLRAEDTAVYYCASGVYSFDYRGQGTLVTVSSGTGGGGSGGGGSGGGGSEFDELTQDPAVSVALGQTVRITCQGDSLRSNYANWYQQKPGQAPVLVIYGQNNRPSGIPDRFSGSSSGNTASLTITGAQAADEADYYCDSRVSTGNHVVFGGGTKLTVLGQLEIQNPDPAVYQLRDSKSSDKSVCLFTDFDSQTNVSQSKDSDVYITDKCVLDMRSMDFKSNSAVAWSNKSDFACANAFNNSIIPEDTFFPSPESSCDVKLVEKSFETDTNLNFQNLSVIGFRILLLKVAGFNLLMTLRLWSSRAKRSGSGVKQTLNFDLLKLAGDVESNPGPTSMDWIWRILFLVGAATGAHSGPQLQLQESGPGLVKPSETLSLTCTVSGDSISSGDYYWGWIRQPPGKGLEWIGHIYYSGVTYYNPSLKSRVTISVDTSRNQFSLKLSSVTAADTAVYYCTREDSSNWRSRGQGTLVTVSSGSGGGGSGGGGSGGGGSFEEVQLVQSGAEVKKPGASVKVSCKASGYTFTSYAMHWVRQAPGQRLEWMGWINAGNGNTKYSQKFQGRVTITRDTSASTAYMELSSLRSEDTAVYYCARDISYGSFDYWGQGTLVTVSSTREDLKNVFPPEVAVFEPSEAEISHTQKATLVCLATGFYPDHVELSWWVNGKEVHSGVCTDPQPLKEQPALNDSRYCLSSRLRVSATFWQNPRNHFRCQVQFYGLSENDEWTQDRAKPVTQIVSAEAWGRADCGFTSESYQQGVLSATILYEILLGKATLYAVLVSALVLMAMVKRKDSRG

SEQ ID NO: 13301 - protein, 898 aa, Artificial Sequence
  Synthetic Polypeptide
MALPVTALLLPLALLLHAARPEVQLVESGGGLVQPGGSLRLSCAASGFSFSDFWMSWVRQAPGKGLEWVATISQAGSEKDYVDSVKGRFTISRDNAKKSLYLQMNSLRAEDTAVYYCASGVYSFDYRGQGTLVTVSSGTGGGGSGGGGSGGGGSEFDDIVLTQTPATLSVTPGDSVSLSCRASQSISNNLHWYQQKSHESPRLLIKNASQSISGIPSKFSGSGSGTDFTLRINSVETEDFGMYFCQQSNSWPYTFGSGTKLEIKLEIQNPDPAVYQLRDSKSSDKSVCLFTDFDSQTNVSQSKDSDVYITDKCVLDMRSMDFKSNSAVAWSNKSDFACANAFNNSIIPEDTFFPSPESSCDVKLVEKSFETDTNLNFQNLSVIGFRILLLKVAGFNLLMTLRLWSSRAKRSGSGVKQTLNFDLLKLAGDVESNPGPTSMDWIWRILFLVGAATGAHSGPQLQLQESGPGLVKPSETLSLTCTVSGDSISSGDYYWGWIRQPPGKGLEWIGHIYYSGVTYYNPSLKSRVTISVDTSRNQFSLKLSSVTAADTAVYYCTREDSSNWRSRGQGTLVTVSSGSGGGGSGGGGSGGGGSFEQVKLQQSGPELVKPGASVKISCKASGYSFTGYYMHWVKQSHGNILDWIGYIYPYNGVSSYNQKFKGKATLTVDKSSSTAYMELRSLTSEDSAVYYCARERGLYQLRAMDYWGQGTSVTVSSTREDLKNVFPPEVAVFEPSEAEISHTQKATLVCLATGFYPDHVELSWWVNGKEVHSGVCTDPQPLKEQPALNDSRYCLSSRLRVSATFWQNPRNHFRCQVQFYGLSENDEWTQDRAKPVTQIVSAEAWGRADCGFTSESYQQGVLSATILYEILLGKATLYAVLVSALVLMAMVKRKDSRG

SEQ ID NO: 13302 - protein, 889 aa, Artificial Sequence
  Synthetic Polypeptide
MALPVTALLLPLALLLHAARPEVQLVESGGGLVQPGGSLRLSCAASGFSFSDFWMSWVRQAPGKGLEWVATISQAGSEKDYVDSVKGRFTISRDNAKKSLYLQMNSLRAEDTAVYYCASGVYSFDYRGQGTLVTVSSGTGGGGSGGGGSGGGGSEFDDIVMTQTPAIMSASPGQKVTITCSASSSVNYMHWYQQKLGSSPKLWIYDTSKLAPGVPARFSGSGSGTSYSLTISSMEAEDAASYFCHQWSSYPYTFGSGTKLEIKLEIQNPDPAVYQLRDSKSSDKSVCLFTDFDSQTNVSQSKDSDVYITDKCVLDMRSMDFKSNSAVAWSNKSDFACANAFNNSIIPEDTFFPSPESSCDVKLVEKSFETDTNLNFQNLSVIGFRILLLKVAGFNLLMTLRLWSSRAKRSGSGVKQTLNFDLLKLAGDVESNPGPTSMDWIWRILFLVGAATGAHSGPQLQLQESGPGLVKPSETLSLTCTVSGDSISSGDYYWGWIRQPPGKGLEWIGHIYYSGVTYYNPSLKSRVTISVDTSRNQFSLKLSSVTAADTAVYYCTREDSSNWRSRGQGTLVTVSSGSGGGGSGGGGSGGGGSFEEVQLQESGPDLVKPSQSLSLTCTVTGYSITSGYGWHWIRQFPGNKLEWMGYIHYSGSTTYNPSLKSRISISRDTSKNQFFLQLNSVTTEDTATYYCARSLRYWGQGTTLTVSSTREDLKNVFPPEVAVFEPSEAEISHTQKATLVCLATGFYPDHVELSWWVNGKEVHSGVCTDPQPLKEQPALNDSRYCLSSRLRVSATFWQNPRNHFRCQVQFYGLSENDEWTQDRAKPVTQIVSAEAWGRADCGFTSESYQQGVLSATILYEILLGKATLYAVLVSALVLMAMVKRKDSRG

SEQ ID NO: 13303 - protein, 892 aa, Artificial Sequence
  Synthetic Polypeptide
MALPVTALLLPLALLLHAARPEVQLVESGGGLVQPGGSLRLSCAASGFSFSDFWMSWVRQAPGKGLEWVATISQAGSEKDYVDSVKGRFTISRDNAKKSLYLQMNSLRAEDTAVYYCASGVYSFDYRGQGTLVTVSSGTGGGGSGGGGSGGGGSEFDDIQMTQSPSSLSASVGDRVTITCSATSSISYMHWYQQKPGKAPKGWIYDTSKLAHGVPSRFSGSGSGTDFTLTISSLQPEDFATYYCHQRRSYPFTFGQGTKVEIKLEIQNPDPAVYQLRDSKSSDKSVCLFTDFDSQTNVSQSKDSDVYITDKCVLDMRSMDFKSNSAVAWSNKSDFACANAFNNSIIPEDTFFPSPESSCDVKLVEKSFETDTNLNFQNLSVIGFRILLLKVAGFNLLMTLRLWSSRAKRSGSGVKQTLNFDLLKLAGDVESNPGPTSMDWIWRILFLVGAATGAHSGPQLQLQESGPGLVKPSETLSLTCTVSGDSISSGDYYWGWIRQPPGKGLEWIGHIYYSGVTYYNPSLKSRVTISVDTSRNQFSLKLSSVTAADTAVYYCTREDSSNWRSRGQGTLVTVSSGSGGGGSGGGGSGGGGSFEEVQLVQSGAEVKKPGASVKVSCKASGYTFTNFWIHWVRQAPGQGLEWIGEIDPSDSYTNYNQKFKGRVTITRDTSTSTAYLELSSLRSEDTAVYYCAREITTVDYWGQGTLVTVSSTREDLKNVFPPEVAVFEPSEAEISHTQKATLVCLATGFYPDHVELSWWVNGKEVHSGVCTDPQPLKEQPALNDSRYCLSSRLRVSATFWQNPRNHFRCQVQFYGLSENDEWTQDRAKPVTQIVSAEAWGRADCGFTSESYQQGVLSATILYEILLGKATLYAVLVSALVLMAMVKRKDSRG

SEQ ID NO: 13304 - protein, 899 aa, Artificial Sequence
  Synthetic Polypeptide
MALPVTALLLPLALLLHAARPEVQLVESGGGLVQPGGSLRLSCAASGFSFSDFWMSWVRQAPGKGLEWVATISQAGSEKDYVDSVKGRFTISRDNAKKSLYLQMNSLRAEDTAVYYCASGVYSFDYRGQGTLVTVSSGTGGGGSGGGGSGGGGSEFDDIQMTQSPSSLSASVGDRVTITCKASQGFNKYVAWYQQKPGKAPKLLIYYTSTLQPGVPSRFSGSGSGRDYTLTISSLQPEDFATYYCLQYGNLLYAFGQGTKVEIKRLEIQNPDPAVYQLRDSKSSDKSVCLFTDFDSQTNVSQSKDSDVYITDKCVLDMRSMDFKSNSAVAWSNKSDFACANAFNNSIIPEDTFFPSPESSCDVKLVEKSFETDTNLNFQNLSVIGFRILLLKVAGFNLLMTLRLWSSRAKRSGSGVKQTLNFDLLKLAGDVESNPGPTSMDWIWRILFLVGAATGAHSGPQLQLQESGPGLVKPSETLSLTCTVSGDSISSGDYYWGWIRQPPGKGLEWIGHIYYSGVTYYNPSLKSRVTISVDTSRNQFSLKLSSVTAADTAVYYCTREDSSNWRSRGQGTLVTVSSGSGGGGSGGGGSGGGGSFEEVQLVQSGAEVKKPGASVKVSCKASGYTFTSYWIGWVRQAPGQGLEWIGDIYPGGGYTNYNEKFKGRVTITRDTSTSTAYLELSSLRSEDTAVYYCARLDGSSYRGAMDSWGQGTLVTVSSTREDLKNVFPPEVAVFEPSEAEISHTQKATLVCLATGFYPDHVELSWWVNGKEVHSGVCTDPQPLKEQPALNDSRYCLSSRLRVSATFWQNPRNHFRCQVQFYGLSENDEWTQDRAKPVTQIVSAEAWGRADCGFTSESYQQGVLSATILYEILLGKATLYAVLVSALVLMAMVKRKDSRG

SEQ ID NO: 13305 - protein, 895 aa, Artificial Sequence
  Synthetic Polypeptide
MALPVTALLLPLALLLHAARPEVQLVESGGGLVQPGGSLRLSCAASGFSFSDFWMSWVRQAPGKGLEWVATISQAGSEKDYVDSVKGRFTISRDNAKKSLYLQMNSLRAEDTAVYYCASGVYSFDYRGQGTLVTVSSGTGGGGSGGGGSGGGGSEFDDIQMTQSPSSLSASVGDRVTITCRASQDIRYYLNWYQQKPGKAPKLLIYVASSLQSGVPSRFSGSGSGTEFTLTVSSLQPEDFATYYCLQVYSTPRTFGQGTKVEIKLEIQNPDPAVYQLRDSKSSDKSVCLFTDFDSQTNVSQSKDSDVYITDKCVLDMRSMDFKSNSAVAWSNKSDFACANAFNNSIIPEDTFFPSPESSCDVKLVEKSFETDTNLNFQNLSVIGFRILLLKVAGFNLLMTLRLWSSRAKRSGSGVKQTLNFDLLKLAGDVESNPGPTSMDWIWRILFLVGAATGAHSGPQLQLQESGPGLVKPSETLSLTCTVSGDSISSGDYYWGWIRQPPGKGLEWIGHIYYSGVTYYNPSLKSRVTISVDTSRNQFSLKLSSVTAADTAVYYCTREDSSNWRSRGQGTLVTVSSGSGGGGSGGGGSGGGGSFEEVQLVESGGGLAKPGGSLRLSCAASGFRFTFNNYYMDWVRQAPGQGLEWVSRISSSGDPTWYADSVKGRFTISRENAKNTLFLQMNSLRAEDTAVYYCASLTTGSDSWGQGVLVTVSSTREDLKNVFPPEVAVFEPSEAEISHTQKATLVCLATGFYPDHVELSWWVNGKEVHSGVCTDPQPLKEQPALNDSRYCLSSRLRVSATFWQNPRNHFRCQVQFYGLSENDEWTQDRAKPVTQIVSAEAWGRADCGFTSESYQQGVLSATILYEILLGKATLYAVLVSALVLMAMVKRKDSRG

SEQ ID NO: 13306 - protein, 895 aa, Artificial Sequence
  Synthetic Polypeptide
MALPVTALLLPLALLLHAARPEVQLVESGGGLVQPGGSLRLSCAASGFSFSDFWMSWVRQAPGKGLEWVATISQAGSEKDYVDSVKGRFTISRDNAKKSLYLQMNSLRAEDTAVYYCASGVYSFDYRGQGTLVTVSSGTGGGGSGGGGSGGGGSEFEIVMTQSPATLSVSPGERATLSCRASQSVSRNLAWYQQKPGQAPRLLIYGASTRATGIPARFSGSGSGTEFTLTIGSLQSEDFAVYYCQQYKTWPRTFGQGTNVEIKLEIQNPDPAVYQLRDSKSSDKSVCLFTDFDSQTNVSQSKDSDVYITDKCVLDMRSMDFKSNSAVAWSNKSDFACANAFNNSIIPEDTFFPSPESSCDVKLVEKSFETDTNLNFQNLSVIGFRILLLKVAGFNLLMTLRLWSSRAKRSGSGVKQTLNFDLLKLAGDVESNPGPTSMDWIWRILFLVGAATGAHSGPQLQLQESGPGLVKPSETLSLTCTVSGDSISSGDYYWGWIRQPPGKGLEWIGHIYYSGVTYYNPSLKSRVTISVDTSRNQFSLKLSSVTAADTAVYYCTREDSSNWRSRGQGTLVTVSSGSGGGGSGGGGSGGGGSFEQVQLQQWGAGLLKPSETLSLTCAVFGGSFSGYYWSWIRQPPGKGLEWIGEINHRGNTNDNPSLKSRVTISVDTSKNQFALKLSSVTAADTAVYYCARERGYTYGNFDHWGQGTLVTVSSTREDLKNVFPPEVAVFEPSEAEISHTQKATLVCLATGFYPDHVELSWWVNGKEVHSGVCTDPQPLKEQPALNDSRYCLSSRLRVSATFWQNPRNHFRCQVQFYGLSENDEWTQDRAKPVTQIVSAEAWGRADCGFTSESYQQGVLSATILYEILLGKATLYAVLVSALVLMAMVKRKDSRG

SEQ ID NO: 13307 - protein, 896 aa, Artificial Sequence
  Synthetic Polypeptide
MALPVTALLLPLALLLHAARPEVQLVESGGGLVQPGGSLRLSCAASGFSFSDFWMSWVRQAPGKGLEWVATISQAGSEKDYVDSVKGRFTISRDNAKKSLYLQMNSLRAEDTAVYYCASGVYSFDYRGQGTLVTVSSGTGGGGSGGGGSGGGGSEFEIVMTPSSATLSVSPGERATLSCRASQSVSRNLAWYQQKPGQAPRLLIYGASTRATGIPARFSGSGSGTEFTLTISSLQSEDFAVYYCHQYSNWMCSFGQGTKLEIKLEIQNPDPAVYQLRDSKSSDKSVCLFTDFDSQTNVSQSKDSDVYITDKCVLDMRSMDFKSNSAVAWSNKSDFACANAFNNSIIPEDTFFPSPESSCDVKLVEKSFETDTNLNFQNLSVIGFRILLLKVAGFNLLMTLRLWSSRAKRSGSGVKQTLNFDLLKLAGDVESNPGPTSMDWIWRILFLVGAATGAHSGPQLQLQESGPGLVKPSETLSLTCTVSGDSISSGDYYWGWIRQPPGKGLEWIGHIYYSGVTYYNPSLKSRVTISVDTSRNQFSLKLSSVTAADTAVYYCTREDSSNWRSRGQGTLVTVSSGSGGGGSGGGGSGGGGSFEEVQLLESGGGLVQPGGSLRLSCAASGFTFSRYAMNWVRQAPGKGLEWVSGISGSGGRTYYADSVKGRFTISRDNSKNTLYLQMNSLRAEDTAVYYCAKDRDFWSGPFDYWGQGTLVTVSSTREDLKNVFPPEVAVFEPSEAEISHTQKATLVCLATGFYPDHVELSWWVNGKEVHSGVCTDPQPLKEQPALNDSRYCLSSRLRVSATFWQNPRNHFRCQVQFYGLSENDEWTQDRAKPVTQIVSAEAWGRADCGFTSESYQQGVLSATILYEILLGKATLYAVLVSALVLMAMVKRKDSRG

SEQ ID NO: 13308 - protein, 901 aa, Artificial Sequence
  Synthetic Polypeptide
MALPVTALLLPLALLLHAARPEVQLVESGGGLVQPGGSLRLSCAASGFSFSDFWMSWVRQAPGKGLEWVATISQAGSEKDYVDSVKGRFTISRDNAKKSLYLQMNSLRAEDTAVYYCASGVYSFDYRGQGTLVTVSSGTGGGGSGGGGSGGGGSEFDIQMTQSPSSLSASVGDRVTITCKASKNIRSYLAWYQQKPGKAPKLLIYSGSTLHSGVPSRFSGSGSGTDFTLTISSLQPEDFATYYCQQHHEYPLTFGQGTKVEIKRLEIQNPDPAVYQLRDSKSSDKSVCLFTDFDSQTNVSQSKDSDVYITDKCVLDMRSMDFKSNSAVAWSNKSDFACANAFNNSIIPEDTFFPSPESSCDVKLVEKSFETDTNLNFQNLSVIGFRILLLKVAGFNLLMTLRLWSSRAKRSGSGVKQTLNFDLLKLAGDVESNPGPTSMDWIWRILFLVGAATGAHSGPQLQLQESGPGLVKPSETLSLTCTVSGDSISSGDYYWGWIRQPPGKGLEWIGHIYYSGVTYYNPSLKSRVTISVDTSRNQFSLKLSSVTAADTAVYYCTREDSSNWRSRGQGTLVTVSSGSGGGGSGGGGSGGGGSFEQVQLQESGPGLVKPSETLSLTCTVSGYTITSGYDWSWIRQPPGKGLEWIGYINYGGSTNYKPSLGSRVTISVDTSKNQFSLKLSSVTAADTAVYYCARYNEYKSYIYDWYFDFWGQGTLVTVSSTREDLKNVFPPEVAVFEPSEAEISHTQKATLVCLATGFYPDHVELSWWVNGKEVHSGVCTDPQPLKEQPALNDSRYCLSSRLRVSATFWQNPRNHFRCQVQFYGLSENDEWTQDRAKPVTQIVSAEAWGRADCGFTSESYQQGVLSATILYEILLGKATLYAVLVSALVLMAMVKRKDSRG

SEQ ID NO: 13309 - protein, 903 aa, Artificial Sequence
  Synthetic Polypeptide
MALPVTALLLPLALLLHAARPEVQLVESGGGLVQPGGSLRLSCAASGFSFSDFWMSWVRQAPGKGLEWVATISQAGSEKDYVDSVKGRFTISRDNAKKSLYLQMNSLRAEDTAVYYCASGVYSFDYRGQGTLVTVSSGTGGGGSGGGGSGGGGSEFQSVVTQPPSVSAAPGQKVTISCSGSSSNIGNNYVSWYQQLPGTAPKLLIYDNNKRPSGIPDRFSGSKSGTSATLGITGLQTGDEADYYCGTWDGSLYTMLFGGGTKLTVLLEIQNPDPAVYQLRDSKSSDKSVCLFTDFDSQTNVSQSKDSDVYITDKCVLDMRSMDFKSNSAVAWSNKSDFACANAFNNSIIPEDTFFPSPESSCDVKLVEKSFETDTNLNFQNLSVIGFRILLLKVAGFNLLMTLRLWSSRAKRSGSGVKQTLNFDLLKLAGDVESNPGPTSMDWIWRILFLVGAATGAHSGPQLQLQESGPGLVKPSETLSLTCTVSGDSISSGDYYWGWIRQPPGKGLEWIGHIYYSGVTYYNPSLKSRVTISVDTSRNQFSLKLSSVTAADTAVYYCTREDSSNWRSRGQGTLVTVSSGSGGGGSGGGGSGGGGSFEEVQLVESGGGLVKPGGSLRLSCAASGFTFSNAWMSWVRQAPGKGLEWVGFIRSKAYGGTTEYAASVKGRFTISRDDSKSIAYLQMNNLKTEDTAVYYCARDGLYSSSWYDSDYWGQGTLVTVSSTREDLKNVFPPEVAVFEPSEAEISHTQKATLVCLATGFYPDHVELSWWVNGKEVHSGVCTDPQPLKEQPALNDSRYCLSSRLRVSATFWQNPRNHFRCQVQFYGLSENDEWTQDRAKPVTQIVSAEAWGRADCGFTSESYQQGVLSATILYEILLGKATLYAVLVSALVLMAMVKRKDSRG

SEQ ID NO: 13310 - protein, 908 aa, Artificial Sequence
  Synthetic Polypeptide
MALPVTALLLPLALLLHAARPEVQLVESGGGLVQPGGSLRLSCAASGFSFSDFWMSWVRQAPGKGLEWVATISQAGSEKDYVDSVKGRFTISRDNAKKSLYLQMNSLRAEDTAVYYCASGVYSFDYRGQGTLVTVSSGTGGGGSGGGGSGGGGSEFQSVLTQPPSVSGAPGQRVTISCTGSSSNIGAGYDVHWYQQLPGTAPKLLIFGNSNRPSGVPDRFSGFKSGTSASLAITGLQAEDEADYFCQSYDSSLSGSGVFGTGTKVTVLGLEIQNPDPAVYQLRDSKSSDKSVCLFTDFDSQTNVSQSKDSDVYITDKCVLDMRSMDFKSNSAVAWSNKSDFACANAFNNSIIPEDTFFPSPESSCDVKLVEKSFETDTNLNFQNLSVIGFRILLLKVAGFNLLMTLRLWSSRAKRSGSGVKQTLNFDLLKLAGDVESNPGPTSMDWIWRILFLVGAATGAHSGPQLQLQESGPGLVKPSETLSLTCTVSGDSISSGDYYWGWIRQPPGKGLEWIGHIYYSGVTYYNPSLKSRVTISVDTSRNQFSLKLSSVTAADTAVYYCTREDSSNWRSRGQGTLVTVSSGSGGGGSGGGGSGGGGSFEQMQLVQSGGGLVQPGRSLRLSCAASGFTFDDYAMHWVRQAPGKGLEWVSGISWNSGSIGYADSVKGRFTISRDNAKNSLYLQMNSLRAEDTALYYCAKDIHSGSYYGLLYYAMDVWGQGTTVTVSSTREDLKNVFPPEVAVFEPSEAEISHTQKATLVCLATGFYPDHVELSWWVNGKEVHSGVCTDPQPLKEQPALNDSRYCLSSRLRVSATFWQNPRNHFRCQVQFYGLSENDEWTQDRAKPVTQIVSAEAWGRADCGFTSESYQQGVLSATILYEILLGKATLYAVLVSALVLMAMVKRKDSRG

SEQ ID NO: 13311 - protein, 908 aa, Artificial Sequence
  Synthetic Polypeptide
MALPVTALLLPLALLLHAARPEVQLVESGGGLVQPGGSLRLSCAASGFSFSDFWMSWVRQAPGKGLEWVATISQAGSEKDYVDSVKGRFTISRDNAKKSLYLQMNSLRAEDTAVYYCASGVYSFDYRGQGTLVTVSSGTGGGGSGGGGSGGGGSEFLPVLTQPPSASGTPGQRVTISCSGRSSNIGSNSVNWYRQLPGAAPKLLIYSNNQRPPGVPVRFSGSKSGTSASLAISGLQSEDEATYYCATWDDNLNVHYVFGTGTKVTVLGSRLEIQNPDPAVYQLRDSKSSDKSVCLFTDFDSQTNVSQSKDSDVYITDKCVLDMRSMDFKSNSAVAWSNKSDFACANAFNNSIIPEDTFFPSPESSCDVKLVEKSFETDTNLNFQNLSVIGFRILLLKVAGFNLLMTLRLWSSRAKRSGSGVKQTLNFDLLKLAGDVESNPGPTSMDWIWRILFLVGAATGAHSGPQLQLQESGPGLVKPSETLSLTCTVSGDSISSGDYYWGWIRQPPGKGLEWIGHIYYSGVTYYNPSLKSRVTISVDTSRNQFSLKLSSVTAADTAVYYCTREDSSNWRSRGQGTLVTVSSGSGGGGSGGGGSGGGGSFELEMAQVQLVQSGAEVKKPGSSVKVSCKASGGTFSSYAISWVRQAPGQGLEWMGRIIPILGIANYAQKFQGRVTITADKSTSTAYMELSSLRSEDTAVYYCARGGYYSHDMWSEDWGQGTLVTVSSTREDLKNVFPPEVAVFEPSEAEISHTQKATLVCLATGFYPDHVELSWWVNGKEVHSGVCTDPQPLKEQPALNDSRYCLSSRLRVSATFWQNPRNHFRCQVQFYGLSENDEWTQDRAKPVTQIVSAEAWGRADCGFTSESYQQGVLSATILYEILLGKATLYAVLVSALVLMAMVKRKDSRG

SEQ ID NO: 13312 - protein, 902 aa, Artificial Sequence
  Synthetic Polypeptide
MALPVTALLLPLALLLHAARPEVQLVESGGGLVQPGGSLRLSCAASGFSFSDFWMSWVRQAPGKGLEWVATISQAGSEKDYVDSVKGRFTISRDNAKKSLYLQMNSLRAEDTAVYYCASGVYSFDYRGQGTLVTVSSGTGGGGSGGGGSGGGGSEFDFVMTQSPDSLAVSLGERVTMSCKSSQSLLNSGNQKNYLTWYQQKPGQPPKLLIYWASTRESGVPDRFSGSGSGTDFTLTISSLQAEDVAVYYCQNDYSYPYTFGQGTKLEIKLEIQNPDPAVYQLRDSKSSDKSVCLFTDFDSQTNVSQSKDSDVYITDKCVLDMRSMDFKSNSAVAWSNKSDFACANAFNNSIIPEDTFFPSPESSCDVKLVEKSFETDTNLNFQNLSVIGFRILLLKVAGFNLLMTLRLWSSRAKRSGSGVKQTLNFDLLKLAGDVESNPGPTSMDWIWRILFLVGAATGAHSGPQLQLQESGPGLVKPSETLSLTCTVSGDSISSGDYYWGWIRQPPGKGLEWIGHIYYSGVTYYNPSLKSRVTISVDTSRNQFSLKLSSVTAADTAVYYCTREDSSNWRSRGQGTLVTVSSGSGGGGSGGGGSGGGGSFEEVQLVQSGAELKKPGASVKVSCKASGYTFTDYYMKWVRQAPGQGLEWIGDIIPSNGATFYNQKFKGRVTITVDKSTSTAYMELSSLRSEDTAVYYCARSHLLRASWFAYWGQGTLVTVSSTREDLKNVFPPEVAVFEPSEAEISHTQKATLVCLATGFYPDHVELSWWVNGKEVHSGVCTDPQPLKEQPALNDSRYCLSSRLRVSATFWQNPRNHFRCQVQFYGLSENDEWTQDRAKPVTQIVSAEAWGRADCGFTSESYQQGVLSATILYEILLGKATLYAVLVSALVLMAMVKRKDSRG

SEQ ID NO: 13313 - protein, 902 aa, Artificial Sequence
  Synthetic Polypeptide
MALPVTALLLPLALLLHAARPEVQLVESGGGLVQPGGSLRLSCAASGFSFSDFWMSWVRQAPGKGLEWVATISQAGSEKDYVDSVKGRFTISRDNAKKSLYLQMNSLRAEDTAVYYCASGVYSFDYRGQGTLVTVSSGTGGGGSGGGGSGGGGSEFDFVMTQSPDSLAVSLGERVTMSCKSSQSLLNSGNQKNYLTWYQQKPGQPPKLLIYWASTRESGVPDRFSGSGSGTDFTLTISSLQAEDVAVYYCQNDYSYPYTFGQGTKLEIKLEIQNPDPAVYQLRDSKSSDKSVCLFTDFDSQTNVSQSKDSDVYITDKCVLDMRSMDFKSNSAVAWSNKSDFACANAFNNSIIPEDTFFPSPESSCDVKLVEKSFETDTNLNFQNLSVIGFRILLLKVAGFNLLMTLRLWSSRAKRSGSGVKQTLNFDLLKLAGDVESNPGPTSMDWIWRILFLVGAATGAHSGPQLQLQESGPGLVKPSETLSLTCTVSGDSISSGDYYWGWIRQPPGKGLEWIGHIYYSGVTYYNPSLKSRVTISVDTSRNQFSLKLSSVTAADTAVYYCTREDSSNWRSRGQGTLVTVSSGSGGGGSGGGGSGGGGSFEQVQLVQSGAELKKPGASVKVSCKASGYTFTDYYMKWVRQAPGQGLEWIGDIIPSNGATFYNQKFKGRVTITVDKSTSTAYMELSSLRSEDTAVYYCARSHLLRASWFAYWGQGTLVTVSSTREDLKNVFPPEVAVFEPSEAEISHTQKATLVCLATGFYPDHVELSWWVNGKEVHSGVCTDPQPLKEQPALNDSRYCLSSRLRVSATFWQNPRNHFRCQVQFYGLSENDEWTQDRAKPVTQIVSAEAWGRADCGFTSESYQQGVLSATILYEILLGKATLYAVLVSALVLMAMVKRKDSRG

SEQ ID NO: 13314 - protein, 892 aa, Artificial Sequence
  Synthetic Polypeptide
MALPVTALLLPLALLLHAARPEVQLVESGGGLVQPGGSLRLSCAASGFSFSDFWMSWVRQAPGKGLEWVATISQAGSEKDYVDSVKGRFTISRDNAKKSLYLQMNSLRAEDTAVYYCASGVYSFDYRGQGTLVTVSSGTGGGGSGGGGSGGGGSEFDVQITQSPSYLAASPGETITINCRASKSISKDLAWYQEKPGKTNKLLIYSGSTLQSGIPSRFSGSGSGTDFTLTISSLEPEDFAMYYCQQHNKYPYTFGGGTKLEIKRLEIQNPDPAVYQLRDSKSSDKSVCLFTDFDSQTNVSQSKDSDVYITDKCVLDMRSMDFKSNSAVAWSNKSDFACANAFNNSIIPEDTFFPSPESSCDVKLVEKSFETDTNLNFQNLSVIGFRILLLKVAGFNLLMTLRLWSSRAKRSGSGVKQTLNFDLLKLAGDVESNPGPTSMDWIWRILFLVGAATGAHSGPQLQLQESGPGLVKPSETLSLTCTVSGDSISSGDYYWGWIRQPPGKGLEWIGHIYYSGVTYYNPSLKSRVTISVDTSRNQFSLKLSSVTAADTAVYYCTREDSSNWRSRGQGTLVTVSSGSGGGGSGGGGSGGGGSFEQVQLQQPGAELVRPGASVKLSCKASGYTFTSYWMNWVKQRPDQGLEWIGRIDPYDSETHYNQKFKDKAILTVDKSSSTAYMQLSSLTSEDSAVYYCARGNWDDYWGQGTTLTVSSTREDLKNVFPPEVAVFEPSEAEISHTQKATLVCLATGFYPDHVELSWWVNGKEVHSGVCTDPQPLKEQPALNDSRYCLSSRLRVSATFWQNPRNHFRCQVQFYGLSENDEWTQDRAKPVTQIVSAEAWGRADCGFTSESYQQGVLSATILYEILLGKATLYAVLVSALVLMAMVKRKDSRG

SEQ ID NO: 13315 - protein, 894 aa, Artificial Sequence
  Synthetic Polypeptide
MALPVTALLLPLALLLHAARPEVQLVESGGGLVQPGGSLRLSCAASGFSFSDFWMSWVRQAPGKGLEWVATISQAGSEKDYVDSVKGRFTISRDNAKKSLYLQMNSLRAEDTAVYYCASGVYSFDYRGQGTLVTVSSGTGGGGSGGGGSGGGGSEFEIVLTQSPTSMTASPGEQVTITCRASSSINYMHWYQQKPGASPRPWIYETSKLASGVPDRFSGSASGTSYSLTINNMEAEDAATYYCQQWNYPSWTFGGGTKLELKLEIQNPDPAVYQLRDSKSSDKSVCLFTDFDSQTNVSQSKDSDVYITDKCVLDMRSMDFKSNSAVAWSNKSDFACANAFNNSIIPEDTFFPSPESSCDVKLVEKSFETDTNLNFQNLSVIGFRILLLKVAGFNLLMTLRLWSSRAKRSGSGVKQTLNFDLLKLAGDVESNPGPTSMDWIWRILFLVGAATGAHSGPQLQLQESGPGLVKPSETLSLTCTVSGDSISSGDYYWGWIRQPPGKGLEWIGHIYYSGVTYYNPSLKSRVTISVDTSRNQFSLKLSSVTAADTAVYYCTREDSSNWRSRGQGTLVTVSSGSGGGGSGGGGSGGGGSFEEVQLVESGGGLVQPGRSLKLSCAASGFTFSDYNMAWVRQAPKKGLEWVATILYDGGRTYYRGSVKGRFTISRDNAKSTLYLRMDSLRSEDTATYYCATHSRGTDYFDYWGQGVMVTVSSTREDLKNVFPPEVAVFEPSEAEISHTQKATLVCLATGFYPDHVELSWWVNGKEVHSGVCTDPQPLKEQPALNDSRYCLSSRLRVSATFWQNPRNHFRCQVQFYGLSENDEWTQDRAKPVTQIVSAEAWGRADCGFTSESYQQGVLSATILYEILLGKATLYAVLVSALVLMAMVKRKDSRG

SEQ ID NO: 13316 - protein, 903 aa, Artificial Sequence
  Synthetic Polypeptide
MALPVTALLLPLALLLHAARPEVQLVESGGGLVQPGGSLRLSCAASGFSFSDFWMSWVRQAPGKGLEWVATISQAGSEKDYVDSVKGRFTISRDNAKKSLYLQMNSLRAEDTAVYYCASGVYSFDYRGQGTLVTVSSGTGGGGSGGGGSGGGGSEFDIVMTQSPSSLAVSEGETVTINCKSSQSFLSSGDGKNYVAWYQYKPGQSPKLLIYWASTRQSGVPDRFIGSGSGTDFTLTISTVQAEDLAIYYCQQYYDTPLTFGSGTKLEIKLEIQNPDPAVYQLRDSKSSDKSVCLFTDFDSQTNVSQSKDSDVYITDKCVLDMRSMDFKSNSAVAWSNKSDFACANAFNNSIIPEDTFFPSPESSCDVKLVEKSFETDTNLNFQNLSVIGFRILLLKVAGFNLLMTLRLWSSRAKRSGSGVKQTLNFDLLKLAGDVESNPGPTSMDWIWRILFLVGAATGAHSGPQLQLQESGPGLVKPSETLSLTCTVSGDSISSGDYYWGWIRQPPGKGLEWIGHIYYSGVTYYNPSLKSRVTISVDTSRNQFSLKLSSVTAADTAVYYCTREDSSNWRSRGQGTLVTVSSGSGGGGSGGGGSGGGGSFEEVKLQESGPSLVQSSQTLSLTCTVSGFSLTSYHIHWVRQTPGKGLEWMGVMWSDGDTSYNSALKSRLSISRDTSQSQVFLKMNSLQTEDTATYYCARGYYSSYLYLWFAYWGQGTLVTVSSTREDLKNVFPPEVAVFEPSEAEISHTQKATLVCLATGFYPDHVELSWWVNGKEVHSGVCTDPQPLKEQPALNDSRYCLSSRLRVSATFWQNPRNHFRCQVQFYGLSENDEWTQDRAKPVTQIVSAEAWGRADCGFTSESYQQGVLSATILYEILLGKATLYAVLVSALVLMAMVKRKDSRG

SEQ ID NO: 13317 - protein, 907 aa, Artificial Sequence
  Synthetic Polypeptide
MALPVTALLLPLALLLHAARPEVQLVESGGGLVQPGGSLRLSCAASGFSFSDFWMSWVRQAPGKGLEWVATISQAGSEKDYVDSVKGRFTISRDNAKKSLYLQMNSLRAEDTAVYYCASGVYSFDYRGQGTLVTVSSGTGGGGSGGGGSGGGGSEFDVLMTQTPVSLPVSLGGQVSISCRSSQSLVHSDGDTYLHWYLQKPGQSPQLLIYRVSNRFSGVPDRFSGSGSGTDFTLKISRVEPEDLGLYYCLQTTHFPPWTFGGGTKLEMKLEIQNPDPAVYQLRDSKSSDKSVCLFTDFDSQTNVSQSKDSDVYITDKCVLDMRSMDFKSNSAVAWSNKSDFACANAFNNSIIPEDTFFPSPESSCDVKLVEKSFETDTNLNFQNLSVIGFRILLLKVAGFNLLMTLRLWSSRAKRSGSGVKQTLNFDLLKLAGDVESNPGPTSMDWIWRILFLVGAATGAHSGPQLQLQESGPGLVKPSETLSLTCTVSGDSISSGDYYWGWIRQPPGKGLEWIGHIYYSGVTYYNPSLKSRVTISVDTSRNQFSLKLSSVTAADTAVYYCTREDSSNWRSRGQGTLVTVSSGSGGGGSGGGGSGGGGSFEQVQLQQSGPELRRPGSSVRLSCKASGYRIKDFLIHWIKNRPEHGLEWIGWIDPEDGETKYAQKFQTKATLTADTSSNTAYMQLSSLTSEDTATYFCARWGDVYYGLMRGHVMDAWGQGTSVTVSSTREDLKNVFPPEVAVFEPSEAEISHTQKATLVCLATGFYPDHVELSWWVNGKEVHSGVCTDPQPLKEQPALNDSRYCLSSRLRVSATFWQNPRNHFRCQVQFYGLSENDEWTQDRAKPVTQIVSAEAWGRADCGFTSESYQQGVLSATILYEILLGKATLYAVLVSALVLMAMVKRKDSRG

SEQ ID NO: 13318 - protein, 902 aa, Artificial Sequence
  Synthetic Polypeptide
MALPVTALLLPLALLLHAARPEVQLVESGGGLVQPGGSLRLSCAASGFSFSDFWMSWVRQAPGKGLEWVATISQAGSEKDYVDSVKGRFTISRDNAKKSLYLQMNSLRAEDTAVYYCASGVYSFDYRGQGTLVTVSSGTGGGGSGGGGSGGGGSEFDIVMTQSPATLSLSPGERATLSCRSSKSLQNVNGNTYLYWFQQKPGQSPQLLIYRMSNLNSGVPDRFSGSGSGTEFTLTISSLEPEDFAVYYCMQHLEYPITFGAGTKLEIKLEIQNPDPAVYQLRDSKSSDKSVCLFTDFDSQTNVSQSKDSDVYITDKCVLDMRSMDFKSNSAVAWSNKSDFACANAFNNSIIPEDTFFPSPESSCDVKLVEKSFETDTNLNFQNLSVIGFRILLLKVAGFNLLMTLRLWSSRAKRSGSGVKQTLNFDLLKLAGDVESNPGPTSMDWIWRILFLVGAATGAHSGPQLQLQESGPGLVKPSETLSLTCTVSGDSISSGDYYWGWIRQPPGKGLEWIGHIYYSGVTYYNPSLKSRVTISVDTSRNQFSLKLSSVTAADTAVYYCTREDSSNWRSRGQGTLVTVSSGSGGGGSGGGGSGGGGSFEEVQLVESGGGLVKPGGSLKLSCAASGYTFTSYVMHWVRQAPGKGLEWIGYINPYNDGTKYNEKFQGRVTISSDKSISTAYMELSSLRSEDTAMYYCARGTYYYGTRVFDYWGQGTLVTVSSTREDLKNVFPPEVAVFEPSEAEISHTQKATLVCLATGFYPDHVELSWWVNGKEVHSGVCTDPQPLKEQPALNDSRYCLSSRLRVSATFWQNPRNHFRCQVQFYGLSENDEWTQDRAKPVTQIVSAEAWGRADCGFTSESYQQGVLSATILYEILLGKATLYAVLVSALVLMAMVKRKDSRG

SEQ ID NO: 13319 - protein, 898 aa, Artificial Sequence
  Synthetic Polypeptide
MALPVTALLLPLALLLHAARPEVQLVESGGGLVQPGGSLRLSCAASGFSFSDFWMSWVRQAPGKGLEWVATISQAGSEKDYVDSVKGRFTISRDNAKKSLYLQMNSLRAEDTAVYYCASGVYSFDYRGQGTLVTVSSGTGGGGSGGGGSGGGGSEFDIQMTQSPSSLSASVGDRVTITCKASDHINNWLAWYQQKPGQAPKLLIYGATTLETGVPSRFSGSGSGTDYTLTISSLQPEDFATYYCQQSWNTPWTFGQGTKLEIKRLEIQNPDPAVYQLRDSKSSDKSVCLFTDFDSQTNVSQSKDSDVYITDKCVLDMRSMDFKSNSAVAWSNKSDFACANAFNNSIIPEDTFFPSPESSCDVKLVEKSFETDTNLNFQNLSVIGFRILLLKVAGFNLLMTLRLWSSRAKRSGSGVKQTLNFDLLKLAGDVESNPGPTSMDWIWRILFLVGAATGAHSGPQLQLQESGPGLVKPSETLSLTCTVSGDSISSGDYYWGWIRQPPGKGLEWIGHIYYSGVTYYNPSLKSRVTISVDTSRNQFSLKLSSVTAADTAVYYCTREDSSNWRSRGQGTLVTVSSGSGGGGSGGGGSGGGGSFEQVQLQQPGAELVKPGASVKMSCKASGYAFSSYWINWMKQKPGQGLEWIGQIYPGDGDTNYNGKFKGRATLTADTSSSTAYMQLSSLTSEDSAVYFCARSITTVVGCAMDYWGQGTSVTVSSTREDLKNVFPPEVAVFEPSEAEISHTQKATLVCLATGFYPDHVELSWWVNGKEVHSGVCTDPQPLKEQPALNDSRYCLSSRLRVSATFWQNPRNHFRCQVQFYGLSENDEWTQDRAKPVTQIVSAEAWGRADCGFTSESYQQGVLSATILYEILLGKATLYAVLVSALVLMAMVKRKDSRG

SEQ ID NO: 13320 - protein, 900 aa, Artificial Sequence
  Synthetic Polypeptide
MALPVTALLLPLALLLHAARPEVQLVESGGGLVQPGGSLRLSCAASGFSFSDFWMSWVRQAPGKGLEWVATISQAGSEKDYVDSVKGRFTISRDNAKKSLYLQMNSLRAEDTAVYYCASGVYSFDYRGQGTLVTVSSGTGGGGSGGGGSGGGGSEFQIVLSQSPAILSASPGEKVTMTCRASSSVSYMHWYQQKPGSSPKPWIYATSNLASGVPARFSGSGSGTSYSFTISRVEAEDAATYYCQQWTFNPPTFGGGTRLEIKRTVAALEIQNPDPAVYQLRDSKSSDKSVCLFTDFDSQTNVSQSKDSDVYITDKCVLDMRSMDFKSNSAVAWSNKSDFACANAFNNSIIPEDTFFPSPESSCDVKLVEKSFETDTNLNFQNLSVIGFRILLLKVAGFNLLMTLRLWSSRAKRSGSGVKQTLNFDLLKLAGDVESNPGPTSMDWIWRILFLVGAATGAHSGPQLQLQESGPGLVKPSETLSLTCTVSGDSISSGDYYWGWIRQPPGKGLEWIGHIYYSGVTYYNPSLKSRVTISVDTSRNQFSLKLSSVTAADTAVYYCTREDSSNWRSRGQGTLVTVSSGSGGGGSGGGGSGGGGSFEQAYLQQSGAELVRPGASVKMSCKASGYTFTSYNMHWVKQTPRQGLEWIGGIYPGNGDTSYNQKFKGKATLTVGKSSSTAYMQLSSLTSEDSAVYFCARYDYNYAMDYWGQGTSVTVSSASTREDLKNVFPPEVAVFEPSEAEISHTQKATLVCLATGFYPDHVELSWWVNGKEVHSGVCTDPQPLKEQPALNDSRYCLSSRLRVSATFWQNPRNHFRCQVQFYGLSENDEWTQDRAKPVTQIVSAEAWGRADCGFTSESYQQGVLSATILYEILLGKATLYAVLVSALVLMAMVKRKDSRG

SEQ ID NO: 13321 - protein, 898 aa, Artificial Sequence
  Synthetic Polypeptide
MALPVTALLLPLALLLHAARPEVQLVESGGGLVQPGGSLRLSCAASGFSFSDFWMSWVRQAPGKGLEWVATISQAGSEKDYVDSVKGRFTISRDNAKKSLYLQMNSLRAEDTAVYYCASGVYSFDYRGQGTLVTVSSGTGGGGSGGGGSGGGGSEFEIVLTQSPATLSLSPGERATLSCRASQSVSSYLAWYQQKPGQAPRLLIYDASNRATGIPARFSGSGSGTDFTLTISSLEPEDFAVYYCQQRSNWPITFGQGTRLEIKLEIQNPDPAVYQLRDSKSSDKSVCLFTDFDSQTNVSQSKDSDVYITDKCVLDMRSMDFKSNSAVAWSNKSDFACANAFNNSIIPEDTFFPSPESSCDVKLVEKSFETDTNLNFQNLSVIGFRILLLKVAGFNLLMTLRLWSSRAKRSGSGVKQTLNFDLLKLAGDVESNPGPTSMDWIWRILFLVGAATGAHSGPQLQLQESGPGLVKPSETLSLTCTVSGDSISSGDYYWGWIRQPPGKGLEWIGHIYYSGVTYYNPSLKSRVTISVDTSRNQFSLKLSSVTAADTAVYYCTREDSSNWRSRGQGTLVTVSSGSGGGGSGGGGSGGGGSFEEVQLVESGGGLVQPDRSLRLSCAASGFTFHDYAMHWVRQAPGKGLEWVSTISWNSGTIGYADSVKGRFTISRDNAKNSLYLQMNSLRAEDTALYYCAKDIQYGNYYYGMDVWGQGTTVTVSSTREDLKNVFPPEVAVFEPSEAEISHTQKATLVCLATGFYPDHVELSWWVNGKEVHSGVCTDPQPLKEQPALNDSRYCLSSRLRVSATFWQNPRNHFRCQVQFYGLSENDEWTQDRAKPVTQIVSAEAWGRADCGFTSESYQQGVLSATILYEILLGKATLYAVLVSALVLMAMVKRKDSRG

SEQ ID NO: 13322 - protein, 893 aa, Artificial Sequence
  Synthetic Polypeptide
MALPVTALLLPLALLLHAARPEVQLVESGGGLVQPGGSLRLSCAASGFSFSDFWMSWVRQAPGKGLEWVATISQAGSEKDYVDSVKGRFTISRDNAKKSLYLQMNSLRAEDTAVYYCASGVYSFDYRGQGTLVTVSSGTGGGGSGGGGSGGGGSEFDIQMTQSPSSLSASVGDRVTINCKASQDINSYLSWFQQKPGKAPKTLIYRANRLVDGVPSRFSGSGSGQDYTLTISSLQPEDFATYYCLQYDEFPLTFGGGTKVEIKLEIQNPDPAVYQLRDSKSSDKSVCLFTDFDSQTNVSQSKDSDVYITDKCVLDMRSMDFKSNSAVAWSNKSDFACANAFNNSIIPEDTFFPSPESSCDVKLVEKSFETDTNLNFQNLSVIGFRILLLKVAGFNLLMTLRLWSSRAKRSGSGVKQTLNFDLLKLAGDVESNPGPTSMDWIWRILFLVGAATGAHSGPQLQLQESGPGLVKPSETLSLTCTVSGDSISSGDYYWGWIRQPPGKGLEWIGHIYYSGVTYYNPSLKSRVTISVDTSRNQFSLKLSSVTAADTAVYYCTREDSSNWRSRGQGTLVTVSSGSGGGGSGGGGSGGGGSFEQVQLVQSGAEVKKPGASVKVSCKASGYTFTNYDINWVRQAPGQGLEWIGWIYPGDGSTKYNEKFKAKATLTADTSTSTAYMELRSLRSDDTAVYYCASGYEDAMDYWGQGTTVTVSSTREDLKNVFPPEVAVFEPSEAEISHTQKATLVCLATGFYPDHVELSWWVNGKEVHSGVCTDPQPLKEQPALNDSRYCLSSRLRVSATFWQNPRNHFRCQVQFYGLSENDEWTQDRAKPVTQIVSAEAWGRADCGFTSESYQQGVLSATILYEILLGKATLYAVLVSALVLMAMVKRKDSRG

SEQ ID NO: 13323 - protein, 895 aa, Artificial Sequence
  Synthetic Polypeptide
MALPVTALLLPLALLLHAARPEVQLVESGGGLVQPGGSLRLSCAASGFSFSDFWMSWVRQAPGKGLEWVATISQAGSEKDYVDSVKGRFTISRDNAKKSLYLQMNSLRAEDTAVYYCASGVYSFDYRGQGTLVTVSSGTGGGGSGGGGSGGGGSEFDIVMTQTPLSLSVTPGQPASISCKSSQSLLDGDGKTYLNWLLQKPGQSPQRLIYLVSKLDSGVPDRFSGSGSGTDFTLKISRVEAEDVGVYYCWQGTHFPRTFGQGTKLEIKLEIQNPDPAVYQLRDSKSSDKSVCLFTDFDSQTNVSQSKDSDVYITDKCVLDMRSMDFKSNSAVAWSNKSDFACANAFNNSIIPEDTFFPSPESSCDVKLVEKSFETDTNLNFQNLSVIGFRILLLKVAGFNLLMTLRLWSSRAKRSGSGVKQTLNFDLLKLAGDVESNPGPTSMDWIWRILFLVGAATGAHSGPQLQLQESGPGLVKPSETLSLTCTVSGDSISSGDYYWGWIRQPPGKGLEWIGHIYYSGVTYYNPSLKSRVTISVDTSRNQFSLKLSSVTAADTAVYYCTREDSSNWRSRGQGTLVTVSSGSGGGGSGGGGSGGGGSFEQVQLVQSGAEVKKPGASVKVSCKASGYTFKDTYIHWVRQAPGQGLEWMGRIDPANGNTKYDPKFQGRVTMTRDTSISTAYMELSRLRSDDTAVYYCARRGGVDWGQGTLVTVSSTREDLKNVFPPEVAVFEPSEAEISHTQKATLVCLATGFYPDHVELSWWVNGKEVHSGVCTDPQPLKEQPALNDSRYCLSSRLRVSATFWQNPRNHFRCQVQFYGLSENDEWTQDRAKPVTQIVSAEAWGRADCGFTSESYQQGVLSATILYEILLGKATLYAVLVSALVLMAMVKRKDSRG

SEQ ID NO: 13324 - protein, 896 aa, Artificial Sequence
  Synthetic Polypeptide
MALPVTALLLPLALLLHAARPEVQLVESGGGLVQPGGSLRLSCAASGFSFSDFWMSWVRQAPGKGLEWVATISQAGSEKDYVDSVKGRFTISRDNAKKSLYLQMNSLRAEDTAVYYCASGVYSFDYRGQGTLVTVSSGTGGGGSGGGGSGGGGSEFDIQMTQSPSSLSASVGDRVTITCKASQDVSTAVAWFQQKPGKAPKLLIYSPSYRYTGVPSRFSGSGSGTDFTLTISSLQPEDFTYYCQQLYSTPYTFGQGTKVEIKLEIQNPDPAVYQLRDSKSSDKSVCLFTDFDSQTNVSQSKDSDVYITDKCVLDMRSMDFKSNSAVAWSNKSDFACANAFNNSIIPEDTFFPSPESSCDVKLVEKSFETDTNLNFQNLSVIGFRILLLKVAGFNLLMTLRLWSSRAKRSGSGVKQTLNFDLLKLAGDVESNPGPTSMDWIWRILFLVGAATGAHSGPQLQLQESGPGLVKPSETLSLTCTVSGDSISSGDYYWGWIRQPPGKGLEWIGHIYYSGVTYYNPSLKSRVTISVDTSRNQFSLKLSSVTAADTAVYYCTREDSSNWRSRGQGTLVTVSSGSGGGGSGGGGSGGGGSFEEVQLVQSGAEVKKPGASVKVSCKASGYTFTDYYLDVVVRQAPGQGLEWIGRVNPYNGGTIYNQKFKGRVTLTRDTSTSTAYLELSSLRSEDTAVYYCARDHYRYDPLLDYWGQGTLVTVSSTREDLKNVFPPEVAVFEPSEAEISHTQKATLVCLATGFYPDHVELSWWVNGKEVHSGVCTDPQPLKEQPALNDSRYCLSSRLRVSATFWQNPRNHFRCQVQFYGLSENDEWTQDRAKPVTQIVSAEAWGRADCGFTSESYQQGVLSATILYEILLGKATLYAVLVSALVLMAMVKRKDSRG

SEQ ID NO: 13325 - protein, 902 aa, Artificial Sequence
  Synthetic Polypeptide
MALPVTALLLPLALLLHAARPEVQLVESGGGLVQPGGSLRLSCAASGFSFSDFWMSWVRQAPGKGLEWVATISQAGSEKDYVDSVKGRFTISRDNAKKSLYLQMNSLRAEDTAVYYCASGVYSFDYRGQGTLVTVSSGTGGGGSGGGGSGGGGSEFDIQMTQSPSSLSASVGDRVTITCRASQSVSTSSYNYMHWYQQKPGKPPKLLIKYASNLESGVPSRFSGSGSGTDFTLTISSLQPEDFATYYCQHSWEIPLTFGQGTKVEIKLEIQNPDPAVYQLRDSKSSDKSVCLFTDFDSQTNVSQSKDSDVYITDKCVLDMRSMDFKSNSAVAWSNKSDFACANAFNNSIIPEDTFFPSPESSCDVKLVEKSFETDTNLNFQNLSVIGFRILLLKVAGFNLLMTLRLWSSRAKRSGSGVKQTLNFDLLKLAGDVESNPGPTSMDWIWRILFLVGAATGAHSGPQLQLQESGPGLVKPSETLSLTCTVSGDSISSGDYYWGWIRQPPGKGLEWIGHIYYSGVTYYNPSLKSRVTISVDTSRNQFSLKLSSVTAADTAVYYCTREDSSNWRSRGQGTLVTVSSGSGGGGSGGGGSGGGGSFEEVQLVQSGAEVKKPGASVKVSCKASGYSFTDYYMHWVRQAPGQGLEWIGRINPYNGAAFYSQNFKDRVTLTVDTSTSTAYLELSSLRSEDTAVYYCAIERGADLEGYAMDYWGQGTLVTVSSTREDLKNVFPPEVAVFEPSEAEISHTQKATLVCLATGFYPDHVELSWWVNGKEVHSGVCTDPQPLKEQPALNDSRYCLSSRLRVSATFWQNPRNHFRCQVQFYGLSENDEWTQDRAKPVTQIVSAEAWGRADCGFTSESYQQGVLSATILYEILLGKATLYAVLVSALVLMAMVKRKDSRG

SEQ ID NO: 13326 - protein, 900 aa, Artificial Sequence
  Synthetic Polypeptide
MALPVTALLLPLALLLHAARPEVQLVESGGGLVQPGGSLRLSCAASGFSFSDFWMSWVRQAPGKGLEWVATISQAGSEKDYVDSVKGRFTISRDNAKKSLYLQMNSLRAEDTAVYYCASGVYSFDYRGQGTLVTVSSGTGGGGSGGGGSGGGGSEFEIVLTQSPATLSASPGERVTLTCRASSNVISSYVHWYQQKPGSSPRLFLYSTSNLASGVPSRFSGSGSGTDFTFTISSLEAEDAATYYCQQYSGYPLTFGQGTRLEIKLEIQNPDPAVYQLRDSKSSDKSVCLFTDFDSQTNVSQSKDSDVYITDKCVLDMRSMDFKSNSAVAWSNKSDFACANAFNNSIIPEDTFFPSPESSCDVKLVEKSFETDTNLNFQNLSVIGFRILLLKVAGFNLLMTLRLWSSRAKRSGSGVKQTLNFDLLKLAGDVESNPGPTSMDWIWRILFLVGAATGAHSGPQLQLQESGPGLVKPSETLSLTCTVSGDSISSGDYYWGWIRQPPGKGLEWIGHIYYSGVTYYNPSLKSRVTISVDTSRNQFSLKLSSVTAADTAVYYCTREDSSNWRSRGQGTLVTVSSGSGGGGSGGGGSGGGGSFEQVQLQESGPGLVKPSETLSLTCAVSGYSITSAYYWNWIRQPPGKGLEWIGYISYDGRNNYNPSLKNRITINPDTSKNQFSLQLNSVTPEDTAVYYCAREGDYDVGNYYAMDYWGQGTLVTVSSTREDLKNVFPPEVAVFEPSEAEISHTQKATLVCLATGFYPDHVELSWWVNGKEVHSGVCTDPQPLKEQPALNDSRYCLSSRLRVSATFWQNPRNHFRCQVQFYGLSENDEWTQDRAKPVTQIVSAEAWGRADCGFTSESYQQGVLSATILYEILLGKATLYAVLVSALVLMAMVKRKDSRG

SEQ ID NO: 13327 - protein, 900 aa, Artificial Sequence
  Synthetic Polypeptide
MALPVTALLLPLALLLHAARPEVQLVESGGGLVQPGGSLRLSCAASGFSFSDFWMSWVRQAPGKGLEWVATISQAGSEKDYVDSVKGRFTISRDNAKKSLYLQMNSLRAEDTAVYYCASGVYSFDYRGQGTLVTVSSGTGGGGSGGGGSGGGGSEFEIVLTQSPATLSLSPGERATLSCRASSNVISSYVHWYQQKPGQAPRLLIYSTSNLASGIPARFSGSGSGTDFTLTISSLEPEDFAVYYCQQYSGYPLTFGQGTRLEIKLEIQNPDPAVYQLRDSKSSDKSVCLFTDFDSQTNVSQSKDSDVYITDKCVLDMRSMDFKSNSAVAWSNKSDFACANAFNNSIIPEDTFFPSPESSCDVKLVEKSFETDTNLNFQNLSVIGFRILLLKVAGFNLLMTLRLWSSRAKRSGSGVKQTLNFDLLKLAGDVESNPGPTSMDWIWRILFLVGAATGAHSGPQLQLQESGPGLVKPSETLSLTCTVSGDSISSGDYYWGWIRQPPGKGLEWIGHIYYSGVTYYNPSLKSRVTISVDTSRNQFSLKLSSVTAADTAVYYCTREDSSNWRSRGQGTLVTVSSGSGGGGSGGGGSGGGGSFEEVQLVESGGGLVQPGRSLRLSCAASGYSITSAYYWNWVRQAPGKGLEWVSYISYDGRNNYNPSLKNRFTISRDNAKKSLYLQMNSLRAEDTALYYCAKEGDYDVGNYYAMDYWGQGTTVTVSSTREDLKNVFPPEVAVFEPSEAEISHTQKATLVCLATGFYPDHVELSWWVNGKEVHSGVCTDPQPLKEQPALNDSRYCLSSRLRVSATFWQNPRNHFRCQVQFYGLSENDEWTQDRAKPVTQIVSAEAWGRADCGFTSESYQQGVLSATILYEILLGKATLYAVLVSALVLMAMVKRKDSRG

SEQ ID NO: 13328 - protein, 899 aa, Artificial Sequence
  Synthetic Polypeptide
MALPVTALLLPLALLLHAARPEVQLVESGGGLVQPGGSLRLSCAASGFSFSDFWMSWVRQAPGKGLEWVATISQAGSEKDYVDSVKGRFTISRDNAKKSLYLQMNSLRAEDTAVYYCASGVYSFDYRGQGTLVTVSSGTGGGGSGGGGSGGGGSEFDVVMTQTPLSLPVSLGDQASISCRSSQSLVHSNGNTYLRWYLQKPGQSPKVLIYKVSNRVSGVPDRFSGSGSGTDFTLKINRVEAEDLGVYFCSQSTHVPWTFGGGTKLEIKLEIQNPDPAVYQLRDSKSSDKSVCLFTDFDSQTNVSQSKDSDVYITDKCVLDMRSMDFKSNSAVAWSNKSDFACANAFNNSIIPEDTFFPSPESSCDVKLVEKSFETDTNLNFQNLSVIGFRILLLKVAGFNLLMTLRLWSSRAKRSGSGVKQTLNFDLLKLAGDVESNPGPTSMDWIWRILFLVGAATGAHSGPQLQLQESGPGLVKPSETLSLTCTVSGDSISSGDYYWGWIRQPPGKGLEWIGHIYYSGVTYYNPSLKSRVTISVDTSRNQFSLKLSSVTAADTAVYYCTREDSSNWRSRGQGTLVTVSSGSGGGGSGGGGSGGGGSFEGVKLDETGGGLVQPGGAMKLSCVTSGFTFGHYWMNWVRQSPEKGLEWVAQFRNKPYNYETYYSDSVKGRFTISRDDSKSSVYLQMNNLRVEDTGIYYCTGASYGMEYLGQGTSVTVSTTREDLKNVFPPEVAVFEPSEAEISHTQKATLVCLATGFYPDHVELSWWVNGKEVHSGVCTDPQPLKEQPALNDSRYCLSSRLRVSATFWQNPRNHFRCQVQFYGLSENDEWTQDRAKPVTQIVSAEAWGRADCGFTSESYQQGVLSATILYEILLGKATLYAVLVSALVLMAMVKRKDSRG

SEQ ID NO: 13329 - protein, 905 aa, Artificial Sequence
  Synthetic Polypeptide
MALPVTALLLPLALLLHAARPEVQLVESGGGLVQPGGSLRLSCAASGFSFSDFWMSWVRQAPGKGLEWVATISQAGSEKDYVDSVKGRFTISRDNAKKSLYLQMNSLRAEDTAVYYCASGVYSFDYRGQGTLVTVSSGTGGGGSGGGGSGGGGSEFQVQLVESGGNLVQPGGSLRLSCAASGFTFGSFSMSWVRQAPGGGLEWVAGLSARSSLTHYADSVKGRFTISRDNAKNSVYLQMNSLRVEDTAVYYCARRSYDSSGYWGHFYSYMDVWGQGTLVTVSLEIQNPDPAVYQLRDSKSSDKSVCLFTDFDSQTNVSQSKDSDVYITDKCVLDMRSMDFKSNSAVAWSNKSDFACANAFNNSIIPEDTFFPSPESSCDVKLVEKSFETDTNLNFQNLSVIGFRILLLKVAGFNLLMTLRLWSSRAKRSGSGVKQTLNFDLLKLAGDVESNPGPTSMDWIWRILFLVGAATGAHSGPQLQLQESGPGLVKPSETLSLTCTVSGDSISSGDYYWGWIRQPPGKGLEWIGHIYYSGVTYYNPSLKSRVTISVDTSRNQFSLKLSSVTAADTAVYYCTREDSSNWRSRGQGTLVTVSSGSGGGGSGGGGSGGGGSFESVLTQPSSVSAAPGQKVTISCSGSTSNIGNNYVSWYQQHPGKAPKLMIYDVSKRPSGVPDRFSGSKSGNSASLDISGLQSEDEADYYCAAWDDSLSEFLFGTGTKLTVLGTREDLKNVFPPEVAVFEPSEAEISHTQKATLVCLATGFYPDHVELSWWVNGKEVHSGVCTDPQPLKEQPALNDSRYCLSSRLRVSATFWQNPRNHFRCQVQFYGLSENDEWTQDRAKPVTQIVSAEAWGRADCGFTSESYQQGVLSATILYEILLGKATLYAVLVSALVLMAMVKRKDSRG

SEQ ID NO: 13330 - protein, 900 aa, Artificial Sequence
  Synthetic Polypeptide
MALPVTALLLPLALLLHAARPEVQLVESGGGLVQPGGSLRLSCAASGFSFSDFWMSWVRQAPGKGLEWVATISQAGSEKDYVDSVKGRFTISRDNAKKSLYLQMNSLRAEDTAVYYCASGVYSFDYRGQGTLVTVSSGTGGGGSGGGGSGGGGSEFDVVMTQSPSSLSASVGDRVTITCQSSLDISHYLNWYQQKPGKAPKLLIYDASNLETGVPSRFSGSGSGTHFTFTISSLQPEDFATYYCQQYDNLPLTFGGGTKLEIKRLEIQNPDPAVYQLRDSKSSDKSVCLFTDFDSQTNVSQSKDSDVYITDKCVLDMRSMDFKSNSAVAWSNKSDFACANAFNNSIIPEDTFFPSPESSCDVKLVEKSFETDTNLNFQNLSVIGFRILLLKVAGFNLLMTLRLWSSRAKRSGSGVKQTLNFDLLKLAGDVESNPGPTSMDWIWRILFLVGAATGAHSGPQLQLQESGPGLVKPSETLSLTCTVSGDSISSGDYYWGWIRQPPGKGLEWIGHIYYSGVTYYNPSLKSRVTISVDTSRNQFSLKLSSVTAADTAVYYCTREDSSNWRSRGQGTLVTVSSGSGGGGSGGGGSGGGGSFEQVQLVQSGGGVVQPGGSLRVSCAASGVTLSDYGMHWVRQAPGKGLEWVAFIRNDGSDKYYADSVKGRFTISRDNSEKTVSLQMSSLRAEDTAVYYCAKNGESGPLDYWYLDLWGRGTLVTVSSTREDLKNVFPPEVAVFEPSEAEISHTQKATLVCLATGFYPDHVELSWWVNGKEVHSGVCTDPQPLKEQPALNDSRYCLSSRLRVSATFWQNPRNHFRCQVQFYGLSENDEWTQDRAKPVTQIVSAEAWGRADCGFTSESYQQGVLSATILYEILLGKATLYAVLVSALVLMAMVKRKDSRG

SEQ ID NO: 13331 - protein, 904 aa, Artificial Sequence
  Synthetic Polypeptide
MALPVTALLLPLALLLHAARPEVQLVESGGGLVQPGGSLRLSCAASGFSFSDFWMSWVRQAPGKGLEWVATISQAGSEKDYVDSVKGRFTISRDNAKKSLYLQMNSLRAEDTAVYYCASGVYSFDYRGQGTLVTVSSGTGGGGSGGGGSGGGGSEFSYELTQPPSVSGTPGQRVAISCSGSSSNIGTRMVTWYQHVPGTAPKLLIFNNNQRPSGVPDRFSASKSGTSASLAIIGLQSDDEADYYCATWDDNVKSYVFGTGTKVTVLGSRLEIQNPDPAVYQLRDSKSSDKSVCLFTDFDSQTNVSQSKDSDVYITDKCVLDMRSMDFKSNSAVAWSNKSDFACANAFNNSIIPEDTFFPSPESSCDVKLVEKSFETDTNLNFQNLSVIGFRILLLKVAGFNLLMTLRLWSSRAKRSGSGVKQTLNFDLLKLAGDVESNPGPTSMDWIWRILFLVGAATGAHSGPQLQLQESGPGLVKPSETLSLTCTVSGDSISSGDYYWGWIRQPPGKGLEWIGHIYYSGVTYYNPSLKSRVTISVDTSRNQFSLKLSSVTAADTAVYYCTREDSSNWRSRGQGTLVTVSSGSGGGGSGGGGSGGGGSFELEMAQVQLQQWGAGLLKPSETLSLTCAVYGGSFSGYYWSWIRQPPGKGLEWIGEINHSGSTNYNPSLKSRVTISVDTSKNQFSLKLSSVTAADTAVYYCARAPQSWYVGDVWGQGTLVTVSSTREDLKNVFPPEVAVFEPSEAEISHTQKATLVCLATGFYPDHVELSWWVNGKEVHSGVCTDPQPLKEQPALNDSRYCLSSRLRVSATFWQNPRNHFRCQVQFYGLSENDEWTQDRAKPVTQIVSAEAWGRADCGFTSESYQQGVLSATILYEILLGKATLYAVLVSALVLMAMVKRKDSRG

SEQ ID NO: 13332 - protein, 901 aa, Artificial Sequence
  Synthetic Polypeptide
MALPVTALLLPLALLLHAARPEVQLVESGGGLVQPGGSLRLSCAASGFSFSDFWMSWVRQAPGKGLEWVATISQAGSEKDYVDSVKGRFTISRDNAKKSLYLQMNSLRAEDTAVYYCASGVYSFDYRGQGTLVTVSSGTGGGGSGGGGSGGGGSEFQSVLTQPPSLSVAPGKTASITCGGNNIGMKSVHWYQQRPGQAPVLVIYYDSDRPSGIPGRFSGSNSGNTATLTISRVEAGDEADYYCQVWDTTGDHPGYVFGTGTKVTVLLEIQNPDPAVYQLRDSKSSDKSVCLFTDFDSQTNVSQSKDSDVYITDKCVLDMRSMDFKSNSAVAWSNKSDFACANAFNNSIIPEDTFFPSPESSCDVKLVEKSFETDTNLNFQNLSVIGFRILLLKVAGFNLLMTLRLWSSRAKRSGSGVKQTLNFDLLKLAGDVESNPGPTSMDWIWRILFLVGAATGAHSGPQLQLQESGPGLVKPSETLSLTCTVSGDSISSGDYYWGWIRQPPGKGLEWIGHIYYSGVTYYNPSLKSRVTISVDTSRNQFSLKLSSVTAADTAVYYCTREDSSNWRSRGQGTLVTVSSGSGGGGSGGGGSGGGGSFEQVQLVQSGAEVKKPGSSVKVSCKASGGTFSSYAISWVRQAPGQGLEWMGGIIPIFGTANYAQKFQGRVTITADESTSTAYMELSSLRSEDTAVYYCARGVYGYSGSAPYDEWGQGTLVTVSSTREDLKNVFPPEVAVFEPSEAEISHTQKATLVCLATGFYPDHVELSWWVNGKEVHSGVCTDPQPLKEQPALNDSRYCLSSRLRVSATFWQNPRNHFRCQVQFYGLSENDEWTQDRAKPVTQIVSAEAWGRADCGFTSESYQQGVLSATILYEILLGKATLYAVLVSALVLMAMVKRKDSRG

SEQ ID NO: 13333 - protein, 899 aa, Artificial Sequence
  Synthetic Polypeptide
MALPVTALLLPLALLLHAARPEVQLVESGGGLVQPGGSLRLSCAASGFSFSDFWMSWVRQAPGKGLEWVATISQAGSEKDYVDSVKGRFTISRDNAKKSLYLQMNSLRAEDTAVYYCASGVYSFDYRGQGTLVTVSSGTGGGGSGGGGSGGGGSEFEVQLVESGGGLVQPGRSLRLSCAASGFTFDDYAMHWVRQAPGKGLEWVSGISWNSGSIGYADSVKGRFTISRDNAKNSLYLQMNSLRAEDTALYYCAKDKGGGYYDFWSGSDYWGQGTLVTVSSLEIQNPDPAVYQLRDSKSSDKSVCLFTDFDSQTNVSQSKDSDVYITDKCVLDMRSMDFKSNSAVAWSNKSDFACANAFNNSIIPEDTFFPSPESSCDVKLVEKSFETDTNLNFQNLSVIGFRILLLKVAGFNLLMTLRLWSSRAKRSGSGVKQTLNFDLLKLAGDVESNPGPTSMDWIWRILFLVGAATGAHSGPQLQLQESGPGLVKPSETLSLTCTVSGDSISSGDYYWGWIRQPPGKGLEWIGHIYYSGVTYYNPSLKSRVTISVDTSRNQFSLKLSSVTAADTAVYYCTREDSSNWRSRGQGTLVTVSSGSGGGGSGGGGSGGGGSFESSELTQDPAVSVALGQTVRITCQGDSLRSYYASWYQQKPGQAPVLVIYGKNNRPSGIPDRFSGSSSGNTASLTITGAQAEDEADYYCNSRDSSGWVFGGGTKLTVLTREDLKNVFPPEVAVFEPSEAEISHTQKATLVCLATGFYPDHVELSWWVNGKEVHSGVCTDPQPLKEQPALNDSRYCLSSRLRVSATFWQNPRNHFRCQVQFYGLSENDEWTQDRAKPVTQIVSAEAWGRADCGFTSESYQQGVLSATILYEILLGKATLYAVLVSALVLMAMVKRKDSRG

SEQ ID NO: 13334 - protein, 908 aa, Artificial Sequence
  Synthetic Polypeptide
MALPVTALLLPLALLLHAARPEVQLVESGGGLVQPGGSLRLSCAASGFSFSDFWMSWVRQAPGKGLEWVATISQAGSEKDYVDSVKGRFTISRDNAKKSLYLQMNSLRAEDTAVYYCASGVYSFDYRGQGTLVTVSSGTGGGGSGGGGSGGGGSEFEVQLQQSGPGLVKPSQTLSLTCAISGDSVLSNSDTWNWIRQSPSRGLEWLGRTYHRSTWYDDYASSVRGRVSINVDTSKNQYSLQLNAVTPEDTGVYYCARDRLQDGNSWSDAFDVWGQGTMVTVSSLEIQNPDPAVYQLRDSKSSDKSVCLFTDFDSQTNVSQSKDSDVYITDKCVLDMRSMDFKSNSAVAWSNKSDFACANAFNNSIIPEDTFFPSPESSCDVKLVEKSFETDTNLNFQNLSVIGFRILLLKVAGFNLLMTLRLWSSRAKRSGSGVKQTLNFDLLKLAGDVESNPGPTSMDWIWRILFLVGAATGAHSGPQLQLQESGPGLVKPSETLSLTCTVSGDSISSGDYYWGWIRQPPGKGLEWIGHIYYSGVTYYNPSLKSRVTISVDTSRNQFSLKLSSVTAADTAVYYCTREDSSNWRSRGQGTLVTVSSGSGGGGSGGGGSGGGGSFEQSALTQPASVSGSPGQSITISCTGTSSDVGGYNYVSWYQQHPGKAPKLMIYDVSNRPSGVSNRFSGSKSGNTASLTISGLQAEDEADYYCSSYTSSSTLVYVFGTGTKVTVLTREDLKNVFPPEVAVFEPSEAEISHTQKATLVCLATGFYPDHVELSWWVNGKEVHSGVCTDPQPLKEQPALNDSRYCLSSRLRVSATFWQNPRNHFRCQVQFYGLSENDEWTQDRAKPVTQIVSAEAWGRADCGFTSESYQQGVLSATILYEILLGKATLYAVLVSALVLMAMVKRKDSRG

SEQ ID NO: 13335 - protein, 886 aa, Artificial Sequence
  Synthetic Polypeptide
MALPVTALLLPLALLLHAARPEVQLVESGGGLVQPGGSLRLSCAASGFSFSDFWMSWVRQAPGKGLEWVATISQAGSEKDYVDSVKGRFTISRDNAKKSLYLQMNSLRAEDTAVYYCASGVYSFDYRGQGTLVTVSSGTGGGGSGGGGSGGGGSEFQVQLVQSGAEVKKPGASVKVSCKASGYTFTSYDINWVRQATGQGLEWMGWMNPNSGNTGYAQKFQGRVTMTRNTSISTAYMELSSLRSEDTAVYYCARGDSTKVEIKLEIQNPDPAVYQLRDSKSSDKSVCLFTDFDSQTNVSQSKDSDVYITDKCVLDMRSMDFKSNSAVAWSNKSDFACANAFNNSIIPEDTFFPSPESSCDVKLVEKSFETDTNLNFQNLSVIGFRILLLKVAGFNLLMTLRLWSSRAKRSGSGVKQTLNFDLLKLAGDVESNPGPTSMDWIWRILFLVGAATGAHSGPQLQLQESGPGLVKPSETLSLTCTVSGDSISSGDYYWGWIRQPPGKGLEWIGHIYYSGVTYYNPSLKSRVTISVDTSRNQFSLKLSSVTAADTAVYYCTREDSSNWRSRGQGTLVTVSSGSGGGGSGGGGSGGGGSFEQSVLTQPRSVSGSPGQSVTISCTGTSSDVGGYNYVSWYQQHPGEAPKLIIYDADKRPSGISNRFSSGKSGNTASLTISGLQVEDEADYYCCSYAGGSTWVFGGGTKVTVLTREDLKNVFPPEVAVFEPSEAEISHTQKATLVCLATGFYPDHVELSWWVNGKEVHSGVCTDPQPLKEQPALNDSRYCLSSRLRVSATFWQNPRNHFRCQVQFYGLSENDEWTQDRAKPVTQIVSAEAWGRADCGFTSESYQQGVLSATILYEILLGKATLYAVLVSALVLMAMVKRKDSRG

SEQ ID NO: 13336 - protein, 908 aa, Artificial Sequence
  Synthetic Polypeptide
MALPVTALLLPLALLLHAARPEVQLVESGGGLVQPGGSLRLSCAASGFSFSDFWMSWVRQAPGKGLEWVATISQAGSEKDYVDSVKGRFTISRDNAKKSLYLQMNSLRAEDTAVYYCASGVYSFDYRGQGTLVTVSSGTGGGGSGGGGSGGGGSEFEVQLQQSGPGLVKPSQTLSLTCAISGDSVSSNSAAWNWIRQSPSRGLEWLGRTYYRSKWYSDYAVSVKSRITINPDTSKNQFSLQLNSVTPEDTAVYYCARDPYDFWSGYPDAFDIWGQGTMVTVSSLEIQNPDPAVYQLRDSKSSDKSVCLFTDFDSQTNVSQSKDSDVYITDKCVLDMRSMDFKSNSAVAWSNKSDFACANAFNNSIIPEDTFFPSPESSCDVKLVEKSFETDTNLNFQNLSVIGFRILLLKVAGFNLLMTLRLWSSRAKRSGSGVKQTLNFDLLKLAGDVESNPGPTSMDWIWRILFLVGAATGAHSGPQLQLQESGPGLVKPSETLSLTCTVSGDSISSGDYYWGWIRQPPGKGLEWIGHIYYSGVTYYNPSLKSRVTISVDTSRNQFSLKLSSVTAADTAVYYCTREDSSNWRSRGQGTLVTVSSGSGGGGSGGGGSGGGGSFEQSALTQPASVSGSPGQSITISCTGTSSDVGGYNYVSWYQQHPGKAPKVIISEVNNRPSGVSHRFSGSKSGNTASLTISGLQAEDEADYFCSSYTSGRTLYVFGTGSKVTVLGTREDLKNVFPPEVAVFEPSEAEISHTQKATLVCLATGFYPDHVELSWWVNGKEVHSGVCTDPQPLKEQPALNDSRYCLSSRLRVSATFWQNPRNHFRCQVQFYGLSENDEWTQDRAKPVTQIVSAEAWGRADCGFTSESYQQGVLSATILYEILLGKATLYAVLVSALVLMAMVKRKDSRG

SEQ ID NO: 13337 - protein, 907 aa, Artificial Sequence
  Synthetic Polypeptide
MALPVTALLLPLALLLHAARPEVQLVESGGGLVQPGGSLRLSCAASGFSFSDFWMSWVRQAPGKGLEWVATISQAGSEKDYVDSVKGRFTISRDNAKKSLYLQMNSLRAEDTAVYYCASGVYSFDYRGQGTLVTVSSGTGGGGSGGGGSGGGGSEFQSALTQPASASGSPGQSVTISCTGTSSDVGGYNYVSWYQQHPGKAPKLMIYDVSNRPSGVSNRFSGSKSGNTASLTISGLQAEDEADYYCSSYTSSSTLYVFGTGTQLTVLLEIQNPDPAVYQLRDSKSSDKSVCLFTDFDSQTNVSQSKDSDVYITDKCVLDMRSMDFKSNSAVAWSNKSDFACANAFNNSIIPEDTFFPSPESSCDVKLVEKSFETDTNLNFQNLSVIGFRILLLKVAGFNLLMTLRLWSSRAKRSGSGVKQTLNFDLLKLAGDVESNPGPTSMDWIWRILFLVGAATGAHSGPQLQLQESGPGLVKPSETLSLTCTVSGDSISSGDYYWGWIRQPPGKGLEWIGHIYYSGVTYYNPSLKSRVTISVDTSRNQFSLKLSSVTAADTAVYYCTREDSSNWRSRGQGTLVTVSSGSGGGGSGGGGSGGGGSFEEVQLQQSGPGLVKPSQTLSLTCAISGDSMLSNSDTWNWIRQSPSRGLEWLGRTYHRSTWYDDYASSVRGRVSINVDTSKNQYSLQLNAVTPEDTGVYYCARVRLQDGNSWSDAFDVWGQGTMVTVSSTREDLKNVFPPEVAVFEPSEAEISHTQKATLVCLATGFYPDHVELSWWVNGKEVHSGVCTDPQPLKEQPALNDSRYCLSSRLRVSATFWQNPRNHFRCQVQFYGLSENDEWTQDRAKPVTQIVSAEAWGRADCGFTSESYQQGVLSATILYEILLGKATLYAVLVSALVLMAMVKRKDSRG

SEQ ID NO: 13338 - protein, 907 aa, Artificial Sequence
  Synthetic Polypeptide
MALPVTALLLPLALLLHAARPEVQLVESGGGLVQPGGSLRLSCAASGFSFSDFWMSWVRQAPGKGLEWVATISQAGSEKDYVDSVKGRFTISRDNAKKSLYLQMNSLRAEDTAVYYCASGVYSFDYRGQGTLVTVSSGTGGGGSGGGGSGGGGSEFDVMLTQTPLSLPVSLGDQASISCRSSQSILHSTGDTYLEWYLQKPGQSPKLLINKVSNRLSGVPDRFSGSGSGTDFTLKISRVEAEDLGVYYCFQGSHVPWTFGGGTKLEIKRADAAPTVSIFPLEIQNPDPAVYQLRDSKSSDKSVCLFTDFDSQTNVSQSKDSDVYITDKCVLDMRSMDFKSNSAVAWSNKSDFACANAFNNSIIPEDTFFPSPESSCDVKLVEKSFETDTNLNFQNLSVIGFRILLLKVAGFNLLMTLRLWSSRAKRSGSGVKQTLNFDLLKLAGDVESNPGPTSMDWIWRILFLVGAATGAHSGPQLQLQESGPGLVKPSETLSLTCTVSGDSISSGDYYWGWIRQPPGKGLEWIGHIYYSGVTYYNPSLKSRVTISVDTSRNQFSLKLSSVTAADTAVYYCTREDSSNWRSRGQGTLVTVSSGSGGGGSGGGGSGGGGSFEQVKLQQSGPSLVKPGASVKMSCKASGYTFTDFYMKWVKQSHGKSLEWIGDINPNIGDTFYNQKFKGKATLTVDKSSSTAYMQLNSLTSEDSAVYFCSVGYFDVWGAGTTVTVSSTREDLKNVFPPEVAVFEPSEAEISHTQKATLVCLATGFYPDHVELSWWVNGKEVHSGVCTDPQPLKEQPALNDSRYCLSSRLRVSATFWQNPRNHFRCQVQFYGLSENDEWTQDRAKPVTQIVSAEAWGRADCGFTSESYQQGVLSATILYEILLGKATLYAVLVSALVLMAMVKRKDSRG

SEQ ID NO: 13339 - protein, 903 aa, Artificial Sequence
  Synthetic Polypeptide
MALPVTALLLPLALLLHAARPEVQLVESGGGLVQPGGSLRLSCAASGFSFSDFWMSWVRQAPGKGLEWVATISQAGSEKDYVDSVKGRFTISRDNAKKSLYLQMNSLRAEDTAVYYCASGVYSFDYRGQGTLVTVSSGTGGGGSGGGGSGGGGSEFEIVLTQSPATLSLSPGERATLSCRASQSVSIYLAWYQQKPGQAPRLLIYDASNRATGIPARFSGSGSGTDFTLTISSLEPEDFAVYYCQQRSNWPPFTFGPGTKVDIKLEIQNPDPAVYQLRDSKSSDKSVCLFTDFDSQTNVSQSKDSDVYITDKCVLDMRSMDFKSNSAVAWSNKSDFACANAFNNSIIPEDTFFPSPESSCDVKLVEKSFETDTNLNFQNLSVIGFRILLLKVAGFNLLMTLRLWSSRAKRSGSGVKQTLNFDLLKLAGDVESNPGPTSMDWIWRILFLVGAATGAHSGPQLQLQESGPGLVKPSETLSLTCTVSGDSISSGDYYWGWIRQPPGKGLEWIGHIYYSGVTYYNPSLKSRVTISVDTSRNQFSLKLSSVTAADTAVYYCTREDSSNWRSRGQGTLVTVSSGSGGGGSGGGGSGGGGSFEQVQLVESGGGVVQPGRSLRLSCAASGFTFSSYGMHWVRQAPGKGLEWVAVIWDDGSNKYYVDSVKGRFTISRDNSKNTLYLQMNSLRAEDTAVYYCARDDYYGSGSFNSYYGTDVWGQGTTVTVSSTREDLKNVFPPEVAVFEPSEAEISHTQKATLVCLATGFYPDHVELSWWVNGKEVHSGVCTDPQPLKEQPALNDSRYCLSSRLRVSATFWQNPRNHFRCQVQFYGLSENDEWTQDRAKPVTQIVSAEAWGRADCGFTSESYQQGVLSATILYEILLGKATLYAVLVSALVLMAMVKRKDSRG

SEQ ID NO: 13340 - protein, 888 aa, Artificial Sequence
  Synthetic Polypeptide
MALPVTALLLPLALLLHAARPEVQLVESGGGLVQPGGSLRLSCAASGFSFSDFWMSWVRQAPGKGLEWVATISQAGSEKDYVDSVKGRFTISRDNAKKSLYLQMNSLRAEDTAVYYCASGVYSFDYRGQGTLVTVSSGTGGGGSGGGGSGGGGSEFDIQMTQSPSSLSASVGDRVTITCRASQGISSWLAWYQQKPEKAPKSLIYAASSLQSGVPSRFSGSGSGTDFTLTISSLQPEDFATYYCQQYNSYPYTFGQGTKLEIKLEIQNPDPAVYQLRDSKSSDKSVCLFTDFDSQTNVSQSKDSDVYITDKCVLDMRSMDFKSNSAVAWSNKSDFACANAFNNSIIPEDTFFPSPESSCDVKLVEKSFETDTNLNFQNLSVIGFRILLLKVAGFNLLMTLRLWSSRAKRSGSGVKQTLNFDLLKLAGDVESNPGPTSMDWIWRILFLVGAATGAHSGPQLQLQESGPGLVKPSETLSLTCTVSGDSISSGDYYWGWIRQPPGKGLEWIGHIYYSGVTYYNPSLKSRVTISVDTSRNQFSLKLSSVTAADTAVYYCTREDSSNWRSRGQGTLVTVSSGSGGGGSGGGGSGGGGSFEEVQLVQSGGGLVHPGGSLRLSCAGSGFTFSTYLMYWVRQAPGKTLEWVSAIGSGGDTYYADSVKGRFTISRDNAKNSLYLQMNSLRAEDMAVYYCARGLGYWGQGTLVTVSSTREDLKNVFPPEVAVFEPSEAEISHTQKATLVCLATGFYPDHVELSWWVNGKEVHSGVCTDPQPLKEQPALNDSRYCLSSRLRVSATFWQNPRNHFRCQVQFYGLSENDEWTQDRAKPVTQIVSAEAWGRADCGFTSESYQQGVLSATILYEILLGKATLYAVLVSALVLMAMVKRKDSRG

SEQ ID NO: 13341 - protein, 907 aa, Artificial Sequence
  Synthetic Polypeptide
MALPVTALLLPLALLLHAARPEVQLVESGGGLVQPGGSLRLSCAASGFSFSDFWMSWVRQAPGKGLEWVATISQAGSEKDYVDSVKGRFTISRDNAKKSLYLQMNSLRAEDTAVYYCASGVYSFDYRGQGTLVTVSSGTGGGGSGGGGSGGGGSEFLPVLTQPPSVSVAPGKTARITCGGNNIGSKSVHWYQQKPGQAPVLVVYDDSDRPSGIPERFSGSNSGNTATLTISRVEAGDEADYYCQVWDSSSDYVVFGGGTKLTVLLEIQNPDPAVYQLRDSKSSDKSVCLFTDFDSQTNVSQSKDSDVYITDKCVLDMRSMDFKSNSAVAWSNKSDFACANAFNNSIIPEDTFFPSPESSCDVKLVEKSFETDTNLNFQNLSVIGFRILLLKVAGFNLLMTLRLWSSRAKRSGSGVKQTLNFDLLKLAGDVESNPGPTSMDWIWRILFLVGAATGAHSGPQLQLQESGPGLVKPSETLSLTCTVSGDSISSGDYYWGWIRQPPGKGLEWIGHIYYSGVTYYNPSLKSRVTISVDTSRNQFSLKLSSVTAADTAVYYCTREDSSNWRSRGQGTLVTVSSGSGGGGSGGGGSGGGGSFEEVQLVQSGAEVKKPGESLKISCKGSGYSFTSYWIGWVRQMPGKGLEWMGIIYPGDSDTRYSPSFQGQVTISADKSISTAYLQWSSLKASDTAMYYCARQVWGWQGGMYPRSNWWYNLDSWGQGTLVTVSSTREDLKNVFPPEVAVFEPSEAEISHTQKATLVCLATGFYPDHVELSWWVNGKEVHSGVCTDPQPLKEQPALNDSRYCLSSRLRVSATFWQNPRNHFRCQVQFYGLSENDEWTQDRAKPVTQIVSAEAWGRADCGFTSESYQQGVLSATILYEILLGKATLYAVLVSALVLMAMVKRKDSRG

SEQ ID NO: 13342 - protein, 900 aa, Artificial Sequence
  Synthetic Polypeptide
MALPVTALLLPLALLLHAARPEVQLVESGGGLVQPGGSLRLSCAASGFSFSDFWMSWVRQAPGKGLEWVATISQAGSEKDYVDSVKGRFTISRDNAKKSLYLQMNSLRAEDTAVYYCASGVYSFDYRGQGTLVTVSSGTGGGGSGGGGSGGGGSEFELVMTQSPASLAVSLGQRATISCRASESVDSYGKSFMHWYQLKPGQPPKLLIYRASNLESGVPARFSGSGSRTDFTLTIDPVEADDAATYYCQQNNEDPWTFGGGTKLEIKLEIQNPDPAVYQLRDSKSSDKSVCLFTDFDSQTNVSQSKDSDVYITDKCVLDMRSMDFKSNSAVAWSNKSDFACANAFNNSIIPEDTFFPSPESSCDVKLVEKSFETDTNLNFQNLSVIGFRILLLKVAGFNLLMTLRLWSSRAKRSGSGVKQTLNFDLLKLAGDVESNPGPTSMDWIWRILFLVGAATGAHSGPQLQLQESGPGLVKPSETLSLTCTVSGDSISSGDYYWGWIRQPPGKGLEWIGHIYYSGVTYYNPSLKSRVTISVDTSRNQFSLKLSSVTAADTAVYYCTREDSSNWRSRGQGTLVTVSSGSGGGGSGGGGSGGGGSFEEVQLEQSGPELVKPGASVKMSCKASGYTFTNYYMKWVKQSHGKSLEWIGDLNPNNGDTFYNQKFKGKATLTVDKSSNTAYMQLNSLTSEDSAVYYCARTGRYEENAMDYWGQGTSVTVSSTREDLKNVFPPEVAVFEPSEAEISHTQKATLVCLATGFYPDHVELSWWVNGKEVHSGVCTDPQPLKEQPALNDSRYCLSSRLRVSATFWQNPRNHFRCQVQFYGLSENDEWTQDRAKPVTQIVSAEAWGRADCGFTSESYQQGVLSATILYEILLGKATLYAVLVSALVLMAMVKRKDSRG

SEQ ID NO: 13343 - protein, 894 aa, Artificial Sequence
  Synthetic Polypeptide
MALPVTALLLPLALLLHAARPEVQLVESGGGLVQPGGSLRLSCAASGFSFSDFWMSWVRQAPGKGLEWVATISQAGSEKDYVDSVKGRFTISRDNAKKSLYLQMNSLRAEDTAVYYCASGVYSFDYRGQGTLVTVSSGTGGGGSGGGGSGGGGSEFDVVMTQSPSSLSASVGDRVTITCMASEDIYIRLAWYQQKPGNAPKLLIYAATSLETGVPSRFSGSGSGTDFTLTISSLQPEDFATYYCQQYWSSPWTFGGGTKVEIKLEIQNPDPAVYQLRDSKSSDKSVCLFTDFDSQTNVSQSKDSDVYITDKCVLDMRSMDFKSNSAVAWSNKSDFACANAFNNSIIPEDTFFPSPESSCDVKLVEKSFETDTNLNFQNLSVIGFRILLLKVAGFNLLMTLRLWSSRAKRSGSGVKQTLNFDLLKLAGDVESNPGPTSMDWIWRILFLVGAATGAHSGPQLQLQESGPGLVKPSETLSLTCTVSGDSISSGDYYWGWIRQPPGKGLEWIGHIYYSGVTYYNPSLKSRVTISVDTSRNQFSLKLSSVTAADTAVYYCTREDSSNWRSRGQGTLVTVSSGSGGGGSGGGGSGGGGSFEQVQLQESGPGLVKPSQTLSLTCTVSGYSITSDYTWNWIRQPPGNGLEWIGYITYSGSTSYNPSLKSRVLISVDTSKNQVSLKLSSVTAADTAVYYCARLGRRYTMDYWGQGTTVTVSSTREDLKNVFPPEVAVFEPSEAEISHTQKATLVCLATGFYPDHVELSWWVNGKEVHSGVCTDPQPLKEQPALNDSRYCLSSRLRVSATFWQNPRNHFRCQVQFYGLSENDEWTQDRAKPVTQIVSAEAWGRADCGFTSESYQQGVLSATILYEILLGKATLYAVLVSALVLMAMVKRKDSRG

SEQ ID NO: 13344 - protein, 898 aa, Artificial Sequence; identical to SEQ ID NO: 13207
  Synthetic Polypeptide

SEQ ID NO: 13345 - protein, 898 aa, Artificial Sequence
  Synthetic Polypeptide
MALPVTALLLPLALLLHAARPEVQLVESGGGLVQPGGSLRLSCAASGFSFSDFWMSWVRQAPGKGLEWVATISQAGSEKDYVDSVKGRFTISRDNAKKSLYLQMNSLRAEDTAVYYCASGVYSFDYRGQGTLVTVSSGTGGGGSGGGGSGGGGSEFDIVLTQSPATLSLSPGDRATLSCRASESVTILGSHLIYWYQQKPGQAPRLLIQLASNVQTGIPARFSGSGSRTDFTLTISSLEPEDFAVYYCLQSRTIPRTFGQGTKLEIKRLEIQNPDPAVYQLRDSKSSDKSVCLFTDFDSQTNVSQSKDSDVYITDKCVLDMRSMDFKSNSAVAWSNKSDFACANAFNNSIIPEDTFFPSPESSCDVKLVEKSFETDTNLNFQNLSVIGFRILLLKVAGFNLLMTLRLWSSRAKRSGSGVKQTLNFDLLKLAGDVESNPGPTSMDWIWRILFLVGAATGAHSGPQLQLQESGPGLVKPSETLSLTCTVSGDSISSGDYYWGWIRQPPGKGLEWIGHIYYSGVTYYNPSLKSRVTISVDTSRNQFSLKLSSVTAADTAVYYCTREDSSNWRSRGQGTLVTVSSGSGGGGSGGGGSGGGGSFEQVQLVQSGSELKKPGESVKISCKASGYTFTHYSMNWVRQAPGQGLEWMGRINTETGEPLYADDFKGRFVFSLDTSASTAYLQISSLKAEDTAVYYCSNDYLYSLDYWGQGTLVTVSSTREDLKNVFPPEVAVFEPSEAEISHTQKATLVCLATGFYPDHVELSWWVNGKEVHSGVCTDPQPLKEQPALNDSRYCLSSRLRVSATFWQNPRNHFRCQVQFYGLSENDEWTQDRAKPVTQIVSAEAWGRADCGFTSESYQQGVLSATILYEILLGKATLYAVLVSALVLMAMVKRKDSRG

SEQ ID NO: 13346 - protein, 899 aa, Artificial Sequence
  Synthetic Polypeptide
MALPVTALLLPLALLLHAARPEVQLVESGGGLVQPGGSLRLSCAASGFSFSDFWMSWVRQAPGKGLEWVATISQAGSEKDYVDSVKGRFTISRDNAKKSLYLQMNSLRAEDTAVYYCASGVYSFDYRGQGTLVTVSSGTGGGGSGGGGSGGGGSEFDIQLTQSPSFLSASVGDRVTITCRASQGISTDLNWYQQKPGKAPKLLIYAASNLESGVPSRFSGSGSGTEFTLTISSLQPEDFATYYCQQSYNWPYTFGGGTKVEIKRLEIQNPDPAVYQLRDSKSSDKSVCLFTDFDSQTNVSQSKDSDVYITDKCVLDMRSMDFKSNSAVAWSNKSDFACANAFNNSIIPEDTFFPSPESSCDVKLVEKSFETDTNLNFQNLSVIGFRILLLKVAGFNLLMTLRLWSSRAKRSGSGVKQTLNFDLLKLAGDVESNPGPTSMDWIWRILFLVGAATGAHSGPQLQLQESGPGLVKPSETLSLTCTVSGDSISSGDYYWGWIRQPPGKGLEWIGHIYYSGVTYYNPSLKSRVTISVDTSRNQFSLKLSSVTAADTAVYYCTREDSSNWRSRGQGTLVTVSSGSGGGGSGGGGSGGGGSFEEVQLVESGGGLVKPGGSLRLSCAASGFTFSNFEMNWVRQAPGKGLEWVSGISSNGRYINYADSVKGRFTISRDNAKNSLYLQMNSLRAEDTAVYYCARVVDFDQDYNGFDYWGQGTLVTVSSTREDLKNVFPPEVAVFEPSEAEISHTQKATLVCLATGFYPDHVELSWWVNGKEVHSGVCTDPQPLKEQPALNDSRYCLSSRLRVSATFWQNPRNHFRCQVQFYGLSENDEWTQDRAKPVTQIVSAEAWGRADCGFTSESYQQGVLSATILYEILLGKATLYAVLVSALVLMAMVKRKDSRG

SEQ ID NO: 13347 - protein, 897 aa, Artificial Sequence
  Synthetic Polypeptide
MALPVTALLLPLALLLHAARPEVQLVESGGGLVQPGGSLRLSCAASGFSFSDFWMSWVRQAPGKGLEWVATISQAGSEKDYVDSVKGRFTISRDNAKKSLYLQMNSLRAEDTAVYYCASGVYSFDYRGQGTLVTVSSGTGGGGSGGGGSGGGGSEFDIQLTQSPSFLSASVGDRVTITCSLSLGISTWRDWFPPRLGRGLEPLTYAASTLQSGVPSRFSGSGSGTEFTLTISSLQPEDFATYYCQQLNSYPLTFGGGTKVEIKRLEIQNPDPAVYQLRDSKSSDKSVCLFTDFDSQTNVSQSKDSDVYITDKCVLDMRSMDFKSNSAVAWSNKSDFACANAFNNSIIPEDTFFPSPESSCDVKLVEKSFETDTNLNFQNLSVIGFRILLLKVAGFNLLMTLRLWSSRAKRSGSGVKQTLNFDLLKLAGDVESNPGPTSMDWIWRILFLVGAATGAHSGPQLQLQESGPGLVKPSETLSLTCTVSGDSISSGDYYWGWIRQPPGKGLEWIGHIYYSGVTYYNPSLKSRVTISVDTSRNQFSLKLSSVTAADTAVYYCTREDSSNWRSRGQGTLVTVSSGSGGGGSGGGGSGGGGSFEEVQLVESGGGLVKPGGSLRLSCAASGFTFSTYGMSWVRQAPGKGLEWVAYINNGSGYIYYADSVKGRFTISRDNAKNSLYLQMNSLRAEDTAVYYCARGQWWSGGDFDYWGQGTLVTVSSTREDLKNVFPPEVAVFEPSEAEISHTQKATLVCLATGFYPDHVELSWWVNGKEVHSGVCTDPQPLKEQPALNDSRYCLSSRLRVSATFWQNPRNHFRCQVQFYGLSENDEWTQDRAKPVTQIVSAEAWGRADCGFTSESYQQGVLSATILYEILLGKATLYAVLVSALVLMAMVKRKDSRG

SEQ ID NO: 13348 - protein, 898 aa, Artificial Sequence
  Synthetic Polypeptide
MALPVTALLLPLALLLHAARPEVQLVESGGGLVQPGGSLRLSCAASGFSFSDFWMSWVRQAPGKGLEWVATISQAGSEKDYVDSVKGRFTISRDNAKKSLYLQMNSLRAEDTAVYYCASGVYSFDYRGQGTLVTVSSGTGGGGSGGGGSGGGGSEFEIVLTQSPATLSLSPGERATLSCSASSSVSYMYWYQQKPGQAPRLLIYRTSNLASGIPARFSGSGSGTDFTLTISSLEPEDFAVYYCQQYHSYPTTFGQGTKVEIKRTVLEIQNPDPAVYQLRDSKSSDKSVCLFTDFDSQTNVSQSKDSDVYITDKCVLDMRSMDFKSNSAVAWSNKSDFACANAFNNSIIPEDTFFPSPESSCDVKLVEKSFETDTNLNFQNLSVIGFRILLLKVAGFNLLMTLRLWSSRAKRSGSGVKQTLNFDLLKLAGDVESNPGPTSMDWIWRILFLVGAATGAHSGPQLQLQESGPGLVKPSETLSLTCTVSGDSISSGDYYWGWIRQPPGKGLEWIGHIYYSGVTYYNPSLKSRVTISVDTSRNQFSLKLSSVTAADTAVYYCTREDSSNWRSRGQGTLVTVSSGSGGGGSGGGGSGGGGSFEEVQLVESGGGLVQPGGSLRLSCAASGFSFNTYAMNWVRQAPGKGLEWVSHIRSKSNNFATYYADSVKDRFTISRDNAKNSLYLQMNSLRAEDTAVYYCARQGGDFPMDYWGQGTLVTVSSTREDLKNVFPPEVAVFEPSEAEISHTQKATLVCLATGFYPDHVELSWWVNGKEVHSGVCTDPQPLKEQPALNDSRYCLSSRLRVSATFWQNPRNHFRCQVQFYGLSENDEWTQDRAKPVTQIVSAEAWGRADCGFTSESYQQGVLSATILYEILLGKATLYAVLVSALVLMAMVKRKDSRG

SEQ ID NO: 13349 - protein, 894 aa, Artificial Sequence
  Synthetic Polypeptide
MALPVTALLLPLALLLHAARPEVQLVESGGGLVQPGGSLRLSCAASGFSFSDFWMSWVRQAPGKGLEWVATISQAGSEKDYVDSVKGRFTISRDNAKKSLYLQMNSLRAEDTAVYYCASGVYSFDYRGQGTLVTVSSGTGGGGSGGGGSGGGGSEFDVVMTQSPSSLSASVGDRVTITCKASEDIYIRLAWYQQKPGKAPKLLIYAATSLETGVPSRFSGSGSGTDFTLTISSLQPEDFATYYCQQYWTTPWTFGGGTKVEIKLEIQNPDPAVYQLRDSKSSDKSVCLFTDFDSQTNVSQSKDSDVYITDKCVLDMRSMDFKSNSAVAWSNKSDFACANAFNNSIIPEDTFFPSPESSCDVKLVEKSFETDTNLNFQNLSVIGFRILLLKVAGFNLLMTLRLWSSRAKRSGSGVKQTLNFDLLKLAGDVESNPGPTSMDWIWRILFLVGAATGAHSGPQLQLQESGPGLVKPSETLSLTCTVSGDSISSGDYYWGWIRQPPGKGLEWIGHIYYSGVTYYNPSLKSRVTISVDTSRNQFSLKLSSVTAADTAVYYCTREDSSNWRSRGQGTLVTVSSGSGGGGSGGGGSGGGGSFEQVQLQESGPGLVKPSQTLSLTCTVSGYSITIDYTWNWIRQPPGKGLEWIGYITYSGSTDYNPSLKSRVLISVDTSKNQVSLKLSSVTAADTAVYYCARLGRRYALDYWGQGTTVTVSSTREDLKNVFPPEVAVFEPSEAEISHTQKATLVCLATGFYPDHVELSWWVNGKEVHSGVCTDPQPLKEQPALNDSRYCLSSRLRVSATFWQNPRNHFRCQVQFYGLSENDEWTQDRAKPVTQIVSAEAWGRADCGFTSESYQQGVLSATILYEILLGKATLYAVLVSALVLMAMVKRKDSRG

SEQ ID NO: 13350 - protein, 898 aa, Artificial Sequence
  Synthetic Polypeptide
MALPVTALLLPLALLLHAARPEVQLVESGGGLVQPGGSLRLSCAASGFSFSDFWMSWVRQAPGKGLEWVATISQAGSEKDYVDSVKGRFTISRDNAKKSLYLQMNSLRAEDTAVYYCASGVYSFDYRGQGTLVTVSSGTGGGGSGGGGSGGGGSEFDIQMTQTTSSLSASLGDRVTISCRASQDISNYLNWYQQKPDGTVKLLIYYTSILHSGVPSRFSGSGSGTDYSLTISNLEQEDFATYFCQQGNTLPWTFGGGTKLEIKALEIQNPDPAVYQLRDSKSSDKSVCLFTDFDSQTNVSQSKDSDVYITDKCVLDMRSMDFKSNSAVAWSNKSDFACANAFNNSIIPEDTFFPSPESSCDVKLVEKSFETDTNLNFQNLSVIGFRILLLKVAGFNLLMTLRLWSSRAKRSGSGVKQTLNFDLLKLAGDVESNPGPTSMDWIWRILFLVGAATGAHSGPQLQLQESGPGLVKPSETLSLTCTVSGDSISSGDYYWGWIRQPPGKGLEWIGHIYYSGVTYYNPSLKSRVTISVDTSRNQFSLKLSSVTAADTAVYYCTREDSSNWRSRGQGTLVTVSSGSGGGGSGGGGSGGGGSFEVQLVESGGGLVKPGGSLKLSCAASGFAFSIYDMSWVRQTPEKRLEWVAYISSGGGTYYPDTVKGRFTISRDNAKNTLYLQMSSLKSEDTAMYYCARHSGYGTHWGVLFAYWGQGTLVTVSATREDLKNVFPPEVAVFEPSEAEISHTQKATLVCLATGFYPDHVELSWWVNGKEVHSGVCTDPQPLKEQPALNDSRYCLSSRLRVSATFWQNPRNHFRCQVQFYGLSENDEWTQDRAKPVTQIVSAEAWGRADCGFTSESYQQGVLSATILYEILLGKATLYAVLVSALVLMAMVKRKDSRG

SEQ ID NO: 13351 - protein, 909 aa, Artificial Sequence
  Synthetic Polypeptide
MALPVTALLLPLALLLHAARPEVQLVESGGGLVQPGGSLRLSCAASGFSFSDFWMSWVRQAPGKGLEWVATISQAGSEKDYVDSVKGRFTISRDNAKKSLYLQMNSLRAEDTAVYYCASGVYSFDYRGQGTLVTVSSGTGGGGSGGGGSGGGGSEFDIVMTQSPDSLAVSLGERATINCKSSQSLLYRSNQKNYLAWYQQKPGQPPKLLIYWASTRESGVPDRFSGSGSGTDFTLTISSLQAEDVAVYYCQQYYNYPRTFGQGTKVEIKRTVLEIQNPDPAVYQLRDSKSSDKSVCLFTDFDSQTNVSQSKDSDVYITDKCVLDMRSMDFKSNSAVAWSNKSDFACANAFNNSIIPEDTFFPSPESSCDVKLVEKSFETDTNLNFQNLSVIGFRILLLKVAGFNLLMTLRLWSSRAKRSGSGVKQTLNFDLLKLAGDVESNPGPTSMDWIWRILFLVGAATGAHSGPQLQLQESGPGLVKPSETLSLTCTVSGDSISSGDYYWGWIRQPPGKGLEWIGHIYYSGVTYYNPSLKSRVTISVDTSRNQFSLKLSSVTAADTAVYYCTREDSSNWRSRGQGTLVTVSSGSGGGGSGGGGSGGGGSFEEVQLLESGGGLVQPGGSLRLSCAASGYSITSDYAWNWVRQAPGKGLEWVSYISNSGSTSYNPSLKSRFTISRDNSKNTLYLQMNSLRAEDTAVYYCAKERNYDYDDYYYAMDYWGQGTLVTVSSTREDLKNVFPPEVAVFEPSEAEISHTQKATLVCLATGFYPDHVELSWWVNGKEVHSGVCTDPQPLKEQPALNDSRYCLSSRLRVSATFWQNPRNHFRCQVQFYGLSENDEWTQDRAKPVTQIVSAEAWGRADCGFTSESYQQGVLSATILYEILLGKATLYAVLVSALVLMAMVKRKDSRG

SEQ ID NO: 13352 - protein, 902 aa, Artificial Sequence
  Synthetic Polypeptide
MALPVTALLLPLALLLHAARPEVQLVESGGGLVQPGGSLRLSCAASGFSFSDFWMSWVRQAPGKGLEWVATISQAGSEKDYVDSVKGRFTISRDNAKKSLYLQMNSLRAEDTAVYYCASGVYSFDYRGQGTLVTVSSGTGGGGSGGGGSGGGGSEFDVVMTQSPLSLPVTLGQPASISCRSSQSLLHSSGNTYLEWYQQRPGQSPRPLIYKISTRFSGVPDRFSGSGSGTDFTLKISRVEAEDVGVYYCFQGSHVPYTFGGGTKVEIKRLEIQNPDPAVYQLRDSKSSDKSVCLFTDFDSQTNVSQSKDSDVYITDKCVLDMRSMDFKSNSAVAWSNKSDFACANAFNNSIIPEDTFFPSPESSCDVKLVEKSFETDTNLNFQNLSVIGFRILLLKVAGFNLLMTLRLWSSRAKRSGSGVKQTLNFDLLKLAGDVESNPGPTSMDWIWRILFLVGAATGAHSGPQLQLQESGPGLVKPSETLSLTCTVSGDSISSGDYYWGWIRQPPGKGLEWIGHIYYSGVTYYNPSLKSRVTISVDTSRNQFSLKLSSVTAADTAVYYCTREDSSNWRSRGQGTLVTVSSGSGGGGSGGGGSGGGGSFEQVQLVQSGAEVKKPGASVKVSCKASGLTIEDYYMHWVRQAPGQGLEWMGWIDPENGDTEYGPKFQGRVTMTRDTSINTAYMELSRLRSDDTAVYYCAVHNAHYGTWFAYWGQGTLVTVSSTREDLKNVFPPEVAVFEPSEAEISHTQKATLVCLATGFYPDHVELSWWVNGKEVHSGVCTDPQPLKEQPALNDSRYCLSSRLRVSATFWQNPRNHFRCQVQFYGLSENDEWTQDRAKPVTQIVSAEAWGRADCGFTSESYQQGVLSATILYEILLGKATLYAVLVSALVLMAMVKRKDSRG

SEQ ID NO: 13353 - protein, 894 aa, Artificial Sequence
  Synthetic Polypeptide
MALPVTALLLPLALLLHAARPEVQLVESGGGLVQPGGSLRLSCAASGFSFSDFWMSWVRQAPGKGLEWVATISQAGSEKDYVDSVKGRFTISRDNAKKSLYLQMNSLRAEDTAVYYCASGVYSFDYRGQGTLVTVSSGTGGGGSGGGGSGGGGSEFDIQMTQSPSSLSASVGDRVTITCRASENIYSNLAWYQQKPGKAPKLLIYAATNLADGVPSRFSGSGSGTDFTLTISSLQPEDFATYYCQHFWGTPTFGQGTKVEIKRTVLEIQNPDPAVYQLRDSKSSDKSVCLFTDFDSQTNVSQSKDSDVYITDKCVLDMRSMDFKSNSAVAWSNKSDFACANAFNNSIIPEDTFFPSPESSCDVKLVEKSFETDTNLNFQNLSVIGFRILLLKVAGFNLLMTLRLWSSRAKRSGSGVKQTLNFDLLKLAGDVESNPGPTSMDWIWRILFLVGAATGAHSGPQLQLQESGPGLVKPSETLSLTCTVSGDSISSGDYYWGWIRQPPGKGLEWIGHIYYSGVTYYNPSLKSRVTISVDTSRNQFSLKLSSVTAADTAVYYCTREDSSNWRSRGQGTLVTVSSGSGGGGSGGGGSGGGGSFEEVQLVESGGGLVQPGGSLRLSCAASGFSLTNYGVHWVRQAPGKGLEWVSVIWSGGSTDYNAAFISRFTISADTSKNTAYLQMNSLRAEDTAVYYCARELIHAMDNWGQGTLVTVSSTREDLKNVFPPEVAVFEPSEAEISHTQKATLVCLATGFYPDHVELSWWVNGKEVHSGVCTDPQPLKEQPALNDSRYCLSSRLRVSATFWQNPRNHFRCQVQFYGLSENDEWTQDRAKPVTQIVSAEAWGRADCGFTSESYQQGVLSATILYEILLGKATLYAVLVSALVLMAMVKRKDSRG

SEQ ID NO: 13354 - protein, 901 aa, Artificial Sequence
  Synthetic Polypeptide
MALPVTALLLPLALLLHAARPEVQLVESGGGLVQPGGSLRLSCAASGFSFSDFWMSWVRQAPGKGLEWVATISQAGSEKDYVDSVKGRFTISRDNAKKSLYLQMNSLRAEDTAVYYCASGVYSFDYRGQGTLVTVSSGTGGGGSGGGGSGGGGSEFDFVMTQSPLSLPVTPGEPASISCRSSQSIVHSNGNTYLEWYLQKPGQSPQLLIYKVSNRFSGVPDRFSGSGSGTDFTLKISRVEAEDVGVYYCFQGSHVPLTFGQGTKLEIKRLEIQNPDPAVYQLRDSKSSDKSVCLFTDFDSQTNVSQSKDSDVYITDKCVLDMRSMDFKSNSAVAWSNKSDFACANAFNNSIIPEDTFFPSPESSCDVKLVEKSFETDTNLNFQNLSVIGFRILLLKVAGFNLLMTLRLWSSRAKRSGSGVKQTLNFDLLKLAGDVESNPGPTSMDWIWRILFLVGAATGAHSGPQLQLQESGPGLVKPSETLSLTCTVSGDSISSGDYYWGWIRQPPGKGLEWIGHIYYSGVTYYNPSLKSRVTISVDTSRNQFSLKLSSVTAADTAVYYCTREDSSNWRSRGQGTLVTVSSGSGGGGSGGGGSGGGGSFEEVQLVESGAEVKKPGASVKVSCKASGYTFTSYWIHWVRQAPGQGLEWMGENDPSNGRTNYNEKFKNRVTLTVDTSISTAYMELSRLRSDDTAVYYCARGPNYFYSMDYWGQGTMVTVSSTREDLKNVFPPEVAVFEPSEAEISHTQKATLVCLATGFYPDHVELSWWVNGKEVHSGVCTDPQPLKEQPALNDSRYCLSSRLRVSATFWQNPRNHFRCQVQFYGLSENDEWTQDRAKPVTQIVSAEAWGRADCGFTSESYQQGVLSATILYEILLGKATLYAVLVSALVLMAMVKRKDSRG

SEQ ID NO: 13355 - protein, 894 aa, Artificial Sequence
  Synthetic Polypeptide
MALPVTALLLPLALLLHAARPEVQLVESGGGLVQPGGSLRLSCAASGFSFSDFWMSWVRQAPGKGLEWVATISQAGSEKDYVDSVKGRFTISRDNAKKSLYLQMNSLRAEDTAVYYCASGVYSFDYRGQGTLVTVSSGTGGGGSGGGGSGGGGSEFDIQLTQSPSFLSASVGDRVTITCSARSSISFMYWYQQKPGKAPKLLIYDTSNLASGVPSRFSGSGSGTEFTLTISSLEAEDAATYYCQQWSSYPLTFGQGTKLEIKLEIQNPDPAVYQLRDSKSSDKSVCLFTDFDSQTNVSQSKDSDVYITDKCVLDMRSMDFKSNSAVAWSNKSDFACANAFNNSIIPEDTFFPSPESSCDVKLVEKSFETDTNLNFQNLSVIGFRILLLKVAGFNLLMTLRLWSSRAKRSGSGVKQTLNFDLLKLAGDVESNPGPTSMDWIWRILFLVGAATGAHSGPQLQLQESGPGLVKPSETLSLTCTVSGDSISSGDYYWGWIRQPPGKGLEWIGHIYYSGVTYYNPSLKSRVTISVDTSRNQFSLKLSSVTAADTAVYYCTREDSSNWRSRGQGTLVTVSSGSGGGGSGGGGSGGGGSFEQVQLVQSGAEVKKPGASVKVSCKASGYTFTGSWMNWVRQAPGQGLEWIGRIYPGDGETNYNGKFKDRVTITADKSTSTAYMELSSLRSEDTAVYYCARIYGNNVYFDVWGQGTTVTVSSTREDLKNVFPPEVAVFEPSEAEISHTQKATLVCLATGFYPDHVELSWWVNGKEVHSGVCTDPQPLKEQPALNDSRYCLSSRLRVSATFWQNPRNHFRCQVQFYGLSENDEWTQDRAKPVTQIVSAEAWGRADCGFTSESYQQGVLSATILYEILLGKATLYAVLVSALVLMAMVKRKDSRG

SEQ ID NO: 13356 - protein, 902 aa, Artificial Sequence
  Synthetic Polypeptide
MALPVTALLLPLALLLHAARPEVQLVESGGGLVQPGGSLRLSCAASGFSFSDFWMSWVRQAPGKGLEWVATISQAGSEKDYVDSVKGRFTISRDNAKKSLYLQMNSLRAEDTAVYYCASGVYSFDYRGQGTLVTVSSGTGGGGSGGGGSGGGGSEFQLVLTQSPSASASLGSSVKLTCTLSSGHKTDTIDWYQQQPGKAPRYLMKLEGSGSYNKGSGVPDRFSGSSSGADWYLTISSLQSEDEADYYCGTDYPGNYLFGGGTQLTVLGLEIQNPDPAVYQLRDSKSSDKSVCLFTDFDSQTNVSQSKDSDVYITDKCVLDMRSMDFKSNSAVAWSNKSDFACANAFNNSIIPEDTFFPSPESSCDVKLVEKSFETDTNLNFQNLSVIGFRILLLKVAGFNLLMTLRLWSSRAKRSGSGVKQTLNFDLLKLAGDVESNPGPTSMDWIWRILFLVGAATGAHSGPQLQLQESGPGLVKPSETLSLTCTVSGDSISSGDYYWGWIRQPPGKGLEWIGHIYYSGVTYYNPSLKSRVTISVDTSRNQFSLKLSSVTAADTAVYYCTREDSSNWRSRGQGTLVTVSSGSGGGGSGGGGSGGGGSFEQEQLVESGGGLVQPGGSLRLSCAASGFTFSDYYMSWIRQAPGKGLEWVATIYPSSGKTYYADSAKGRLTISSDNAKDSLYLQMNSLRAEDTAVYYCTRDSYADDAALFDIWGQGTTVTVSSTREDLKNVFPPEVAVFEPSEAEISHTQKATLVCLATGFYPDHVELSWWVNGKEVHSGVCTDPQPLKEQPALNDSRYCLSSRLRVSATFWQNPRNHFRCQVQFYGLSENDEWTQDRAKPVTQIVSAEAWGRADCGFTSESYQQGVLSATILYEILLGKATLYAVLVSALVLMAMVKRKDSRG

SEQ ID NO: 13357 - protein, 867 aa, Artificial Sequence
  Synthetic Polypeptide
MALPVTALLLPLALLLHAARPEVQLVESGGGLVQPGGSLRLSCAASGFSFSDFWMSWVRQAPGKGLEWVATISQAGSEKDYVDSVKGRFTISRDNAKKSLYLQMNSLRAEDTAVYYCASGVYSFDYRGQGTLVTVSSGTGGGGSGGGGSGGGGSEFEIVLTQSPDTLSLSPGEKATLSCRASQSVSSSFLAWYQQKPGQAPSLLIYVASRRAAGIPDRFSGSGSGTDFTLTISRLEPEDFGMFYCQHYGRTPFTFGPGTKVDIKRASRSRTLILPCTSCGIARAATRACVCSPTSTARPTCPRARTPTCTSPISACWTCGAWTSRATPPWPGPTSPISPAPTPSTTALSPRTHSSQAPRAAATSWWKRASRQTPTTSRTASASESCCKWPALTCPCGCGPAAPREADLASRPISTCSWLATWNPTQALLVWTGFGASFSLSALLPARIPGPSSSCKSLDLAWSSLARHAPVPCPAIASAAAITTGAGSDSLLAKDWNGSATSTTAAPTTTPASPEPSAWTPAGTSSPSCLAQPPIPPCTTAPERTAATGGVEAREHWSQLALDPAEAEVEAEDLAAEALSNRSSWWNQGAVWCSRVGADCHAWRLASHSRTTACTGCDRPPERVWSGSPSGTTDLMSITEILREGSPSPATIAKICSTCKTHSGRMIRRSTIALAQGLLWPAHSITGDRVPWQYQARVRTRTCSHLRWPCSSLARPRSATPRKPPSCAWLPASTPTMWNCLGGSTAKRCTAACVPTPSHKNSPPTTAGTAAADECPPPSGRTPGTTSDARCSSTAARTTSGPRTEPSPPRSCLPKPGAEPIAALPARATSRACAPPSCTRSCWARPPCTPCWCLPWCWLWSSGRTAG

SEQ ID NO: 13358 - protein, 904 aa, Artificial Sequence
  Synthetic Polypeptide
MALPVTALLLPLALLLHAARPEVQLVESGGGLVQPGGSLRLSCAASGFSFSDFWMSWVRQAPGKGLEWVATISQAGSEKDYVDSVKGRFTISRDNAKKSLYLQMNSLRAEDTAVYYCASGVYSFDYRGQGTLVTVSSGTGGGGSGGGGSGGGGSEFDIQMTQSPSSLSASLGDRVTITCRASQGIRNDLGWYQQKPGKAPKRLIYASSTLQSGVPSRFSGSGSGTEFTLTISSLQPEDFATYYCLQHNNFPWTFGQGTKVEIKRLEIQNPDPAVYQLRDSKSSDKSVCLFTDFDSQTNVSQSKDSDVYITDKCVLDMRSMDFKSNSAVAWSNKSDFACANAFNNSIIPEDTFFPSPESSCDVKLVEKSFETDTNLNFQNLSVIGFRILLLKVAGFNLLMTLRLWSSRAKRSGSGVKQTLNFDLLKLAGDVESNPGPTSMDWIWRILFLVGAATGAHSGPQLQLQESGPGLVKPSETLSLTCTVSGDSISSGDYYWGWIRQPPGKGLEWIGHIYYSGVTYYNPSLKSRVTISVDTSRNQFSLKLSSVTAADTAVYYCTREDSSNWRSRGQGTLVTVSSGSGGGGSGGGGSGGGGSFEQVTLKESGPVLVKPTETLTLTCTVSGFSLINARMGVSWIRQPPGKALEWLAHIFSNAEKSYRTSLKSRLTISKDTSKSQVVLTMTNMDPVDTATYYCARIPGYGGNGDYHYYGMDVWGQGTTVTVSSTREDLKNVFPPEVAVFEPSEAEISHTQKATLVCLATGFYPDHVELSWWVNGKEVHSGVCTDPQPLKEQPALNDSRYCLSSRLRVSATFWQNPRNHFRCQVQFYGLSENDEWTQDRAKPVTQIVSAEAWGRADCGFTSESYQQGVLSATILYEILLGKATLYAVLVSALVLMAMVKRKDSRG

SEQ ID NO: 13359 - protein, 897 aa, Artificial Sequence
  Synthetic Polypeptide
MALPVTALLLPLALLLHAARPEVQLVESGGGLVQPGGSLRLSCAASGFSFSDFWMSWVRQAPGKGLEWVATISQAGSEKDYVDSVKGRFTISRDNAKKSLYLQMNSLRAEDTAVYYCASGVYSFDYRGQGTLVTVSSGTGGGGSGGGGSGGGGSEFDIVLTQSPPSLAMSLGKRATISCRASESVTILGSHLIHWYQQKPGQPPTLLIQLASNVQTGVPARFSGSGSRTDFTLTIDPVEEDDVAVYYCLQSRTIPRTFGGGTKLEIKLEIQNPDPAVYQLRDSKSSDKSVCLFTDFDSQTNVSQSKDSDVYITDKCVLDMRSMDFKSNSAVAWSNKSDFACANAFNNSIIPEDTFFPSPESSCDVKLVEKSFETDTNLNFQNLSVIGFRILLLKVAGFNLLMTLRLWSSRAKRSGSGVKQTLNFDLLKLAGDVESNPGPTSMDWIWRILFLVGAATGAHSGPQLQLQESGPGLVKPSETLSLTCTVSGDSISSGDYYWGWIRQPPGKGLEWIGHIYYSGVTYYNPSLKSRVTISVDTSRNQFSLKLSSVTAADTAVYYCTREDSSNWRSRGQGTLVTVSSGSGGGGSGGGGSGGGGSFEQIQLVQSGPELKKPGETVKISCKASGYTFTDYSINWVKRAPGKGLKWMGWINTETREPAYAYDFRGRFAFSLETSASTAYLQINNLKYEDTATYFCALDYSYAMDYWGQGTSVTVSSTREDLKNVFPPEVAVFEPSEAEISHTQKATLVCLATGFYPDHVELSWWVNGKEVHSGVCTDPQPLKEQPALNDSRYCLSSRLRVSATFWQNPRNHFRCQVQFYGLSENDEWTQDRAKPVTQIVSAEAWGRADCGFTSESYQQGVLSATILYEILLGKATLYAVLVSALVLMAMVKRKDSRG

SEQ ID NO: 13360 - protein, 899 aa, Artificial Sequence
  Synthetic Polypeptide
MALPVTALLLPLALLLHAARPEVQLVESGGGLVQPGGSLRLSCAASGFSFSDFWMSWVRQAPGKGLEWVATISQAGSEKDYVDSVKGRFTISRDNAKKSLYLQMNSLRAEDTAVYYCASGVYSFDYRGQGTLVTVSSGTGGGGSGGGGSGGGGSEFDIQLTQSPSSLSASVGDRVSFTCQASQDINNFLNWYQQKPGKAPKLLIYDASNLETGVPSRFSGSGSGTDFTFTISSLQPEDIATYYCQQYGNLPFTFGGGTKVEIKRLEIQNPDPAVYQLRDSKSSDKSVCLFTDFDSQTNVSQSKDSDVYITDKCVLDMRSMDFKSNSAVAWSNKSDFACANAFNNSIIPEDTFFPSPESSCDVKLVEKSFETDTNLNFQNLSVIGFRILLLKVAGFNLLMTLRLWSSRAKRSGSGVKQTLNFDLLKLAGDVESNPGPTSMDWIWRILFLVGAATGAHSGPQLQLQESGPGLVKPSETLSLTCTVSGDSISSGDYYWGWIRQPPGKGLEWIGHIYYSGVTYYNPSLKSRVTISVDTSRNQFSLKLSSVTAADTAVYYCTREDSSNWRSRGQGTLVTVSSGSGGGGSGGGGSGGGGSFEQVQLQESGPGLVKPSETLSLTCTVSGGSISSYYWSWIRQPPGKGLEWIGYIYYSGSTNYNPSLKSRVTISVDTSKNQFSLKLSSVTAADTAVYYCVSLVYCGGDCYSGFDYWGQGTLVTVSSTREDLKNVFPPEVAVFEPSEAEISHTQKATLVCLATGFYPDHVELSWWVNGKEVHSGVCTDPQPLKEQPALNDSRYCLSSRLRVSATFWQNPRNHFRCQVQFYGLSENDEWTQDRAKPVTQIVSAEAWGRADCGFTSESYQQGVLSATILYEILLGKATLYAVLVSALVLMAMVKRKDSRG

SEQ ID NO: 13361 - protein, 901 aa, Artificial Sequence
  Synthetic Polypeptide
MALPVTALLLPLALLLHAARPEVQLVESGGGLVQPGGSLRLSCAASGFSFSDFWMSWVRQAPGKGLEWVATISQAGSEKDYVDSVKGRFTISRDNAKKSLYLQMNSLRAEDTAVYYCASGVYSFDYRGQGTLVTVSSGTGGGGSGGGGSGGGGSEFDIQLTQSPSSLSASVGDRVSFTCQASQDINNFLNWYQQKPGKAPKLLIYDASNLETGVPSRFSGSGSGTDFTFTISSLQPEDIATYYCQQYGNLPFTFGGGTKVEIKRLEIQNPDPAVYQLRDSKSSDKSVCLFTDFDSQTNVSQSKDSDVYITDKCVLDMRSMDFKSNSAVAWSNKSDFACANAFNNSIIPEDTFFPSPESSCDVKLVEKSFETDTNLNFQNLSVIGFRILLLKVAGFNLLMTLRLWSSRAKRSGSGVKQTLNFDLLKLAGDVESNPGPTSMDWIWRILFLVGAATGAHSGPQLQLQESGPGLVKPSETLSLTCTVSGDSISSGDYYWGWIRQPPGKGLEWIGHIYYSGVTYYNPSLKSRVTISVDTSRNQFSLKLSSVTAADTAVYYCTREDSSNWRSRGQGTLVTVSSGSGGGGSGGGGSGGGGSFEQVQLQESGPGLVKPSQTLSLTCTVSGGSISSGGFYWSWIRQHPGKGLEWIGYIHHSGSTHYNPSLKSRVTISIDTSKNLFSLRLSSVTAADTAVYYCASLVYCGGDCYSGFDYWGQGTLVTVSSTREDLKNVFPPEVAVFEPSEAEISHTQKATLVCLATGFYPDHVELSWWVNGKEVHSGVCTDPQPLKEQPALNDSRYCLSSRLRVSATFWQNPRNHFRCQVQFYGLSENDEWTQDRAKPVTQIVSAEAWGRADCGFTSESYQQGVLSATILYEILLGKATLYAVLVSALVLMAMVKRKDSRG

SEQ ID NO: 13362 - protein, 897 aa, Artificial Sequence
  Synthetic Polypeptide
MALPVTALLLPLALLLHAARPEVQLVESGGGLVQPGGSLRLSCAASGFSFSDFWMSWVRQAPGKGLEWVATISQAGSEKDYVDSVKGRFTISRDNAKKSLYLQMNSLRAEDTAVYYCASGVYSFDYRGQGTLVTVSSGTGGGGSGGGGSGGGGSEFDIQMTQSPSSLSASVGDRVTITCKSSQSVLYSSNQKNYLAWFQQKPGKAPKLLIYWASTRESGVPSRFSGSGSGTDFTLTISSLQPEDFATYFCHQYLSSYTFGQGTKVEIKRLEIQNPDPAVYQLRDSKSSDKSVCLFTDFDSQTNVSQSKDSDVYITDKCVLDMRSMDFKSNSAVAWSNKSDFACANAFNNSIIPEDTFFPSPESSCDVKLVEKSFETDTNLNFQNLSVIGFRILLLKVAGFNLLMTLRLWSSRAKRSGSGVKQTLNFDLLKLAGDVESNPGPTSMDWIWRILFLVGAATGAHSGPQLQLQESGPGLVKPSETLSLTCTVSGDSISSGDYYWGWIRQPPGKGLEWIGHIYYSGVTYYNPSLKSRVTISVDTSRNQFSLKLSSVTAADTAVYYCTREDSSNWRSRGQGTLVTVSSGSGGGGSGGGGSGGGGSFEEVQLVESGGGLVQPGGSLRLSCAASGYTFTTYWMHWVRQAPGKGLEWVGYIRPSTGYTEYNQKFKDRFTISADTSKNTAYLQMNSLRAEDTAVYYCARSRWLLDYWGQGTLVTVSTREDLKNVFPPEVAVFEPSEAEISHTQKATLVCLATGFYPDHVELSWWVNGKEVHSGVCTDPQPLKEQPALNDSRYCLSSRLRVSATFWQNPRNHFRCQVQFYGLSENDEWTQDRAKPVTQIVSAEAWGRADCGFTSESYQQGVLSATILYEILLGKATLYAVLVSALVLMAMVKRKDSRG

SEQ ID NO: 13363 - protein, 894 aa, Artificial Sequence
  Synthetic Polypeptide
MALPVTALLLPLALLLHAARPEVQLVESGGGLVQPGGSLRLSCAASGFSFSDFWMSWVRQAPGKGLEWVATISQAGSEKDYVDSVKGRFTISRDNAKKSLYLQMNSLRAEDTAVYYCASGVYSFDYRGQGTLVTVSSGTGGGGSGGGGSGGGGSEFDIQMTQSPSSLSASVGDRVTITCRASQDISNYLNWYQQKPGKAPKLLIYYTSRLHSGVPSRFSGSGSGTDFTLTISSLQPEDFATYYCQQGNTLPYTFGQGTKVEIKRLEIQNPDPAVYQLRDSKSSDKSVCLFTDFDSQTNVSQSKDSDVYITDKCVLDMRSMDFKSNSAVAWSNKSDFACANAFNNSIIPEDTFFPSPESSCDVKLVEKSFETDTNLNFQNLSVIGFRILLLKVAGFNLLMTLRLWSSRAKRSGSGVKQTLNFDLLKLAGDVESNPGPTSMDWIWRILFLVGAATGAHSGPQLQLQESGPGLVKPSETLSLTCTVSGDSISSGDYYWGWIRQPPGKGLEWIGHIYYSGVTYYNPSLKSRVTISVDTSRNQFSLKLSSVTAADTAVYYCTREDSSNWRSRGQGTLVTVSSGSGGGGSGGGGSGGGGSFEEVQLVESGGGLVQPGGSLRLSCAASGFTFSDYFMSWVRQAPGKGLEWVATISNGGTYTYYPDSVKGRFTISRDNSKNTLYLQMNSLRAEDTAVYYCARFDGYIFDYWGQGTLVTVSSTREDLKNVFPPEVAVFEPSEAEISHTQKATLVCLATGFYPDHVELSWWVNGKEVHSGVCTDPQPLKEQPALNDSRYCLSSRLRVSATFWQNPRNHFRCQVQFYGLSENDEWTQDRAKPVTQIVSAEAWGRADCGFTSESYQQGVLSATILYEILLGKATLYAVLVSALVLMAMVKRKDSRG

SEQ ID NO: 13364 - protein, 1087 aa, Artificial Sequence
  Synthetic Polypeptide
MALPVTALLLPLALLLHAARPEVQLVESGGGLVQPGGSLRLSCAASGFSFSDFWMSWVRQAPGKGLEWVATISQAGSEKDYVDSVKGRFTISRDNAKKSLYLQMNSLRAEDTAVYYCASGVYSFDYRGQGTLVTVSSGTGGGGSGGGGSGGGGSEFDIQMTQTTSSLSASLGDRVTISCRASQDISKYLNWYQQKPDGTVKLLIYHTSRLHSGVPSRFSGSGSGTDYSLTISNLEQEDIATYFCQQGNTLPYTFGGGTKLEITLEDLKNVFPPEVAVFEPSEAEISHTQKATLVCLATGFYPDHVELSWWVNGKEVHSGVSTDPQPLKEQPALNDSRYCLSSRLRVSATFWQNPRNHFRCQVQFYGLSENDEWTQDRAKPVTQIVSAEAWGRADCGSQSFGLLDPKLCYLLDGILFIYGVILTALFLRVKFSRSADAPAYQQGQNQLYNELNLGRREEYDVLDKRRGRDPEMGGKPQRRKNPQEGLYNELQKDKMAEAYSEIGMKGERRRGKGHDGLYQGLSTATKDTYDALHMQALPPRRAKRSGSGATNFSLLKQAGDVEENPGPTSMDWIWRILFLVGAATGAHSGPQLQLQESGPGLVKPSETLSLTCTVSGDSISSGDYYWGWIRQPPGKGLEWIGHIYYSGVTYYNPSLKSRVTISVDTSRNQFSLKLSSVTAADTAVYYCTREDSSNWRSRGQGTLVTVSSGSGGGGSGGGGSGGGGSFEVKLQESGPGLVAPSQSLSVTCTVSGVSLPDYGVSWIRQPPRKGLEWLGVIWGSETTYYNSALKSRLTIIKDNSKSQVFLKMNSLQTDDTAIYYCAKHYYYGGSYAMDYWGQGTSVTVSSTRIQNPDPAVYQLRDSKSSDKSVCLFTDFDSQTNVSQSKDSDVYITDKTVLDMRSMDFKSNSAVAWSNKSDFACANAFNNSIIPEDTFFPSPESSCGTQSFGLLDPKLCYLLDGILFIYGVILTALFLRVKFSRSADAPAYQQGQNQLYNELNLGRREEYDVLDKRRGRDPEMGGKPQRRKNPQEGLYNELQKDKMAEAYSEIGMKGERRRGKGHDGLYQGLSTATKDTYDALHMQALPPR

SEQ ID NO: 13365 - protein, 1088 aa, Artificial Sequence
  Synthetic Polypeptide
MALPVTALLLPLALLLHAARPEVQLVESGGGLVQPGGSLRLSCAASGFSFSDFWMSWVRQAPGKGLEWVATISQAGSEKDYVDSVKGRFTISRDNAKKSLYLQMNSLRAEDTAVYYCASGVYSFDYRGQGTLVTVSSGTGGGGSGGGGSGGGGSEFEIVMTQSPATLSLSPGERATLSCRASQDISKYLNWYQQKPGQAPRLLIYHTSRLHSGIPARFSGSGSGTDYTLTISSLQPEDFAVYFCQQGNTLPYTFGQGTKLEIKLEDLKNVFPPEVAVFEPSEAEISHTQKATLVCLATGFYPDHVELSWWVNGKEVHSGVSTDPQPLKEQPALNDSRYCLSSRLRVSATFWQNPRNHFRCQVQFYGLSENDEWTQDRAKPVTQIVSAEAWGRADCGSQSFGLLDPKLCYLLDGILFIYGVILTALFLRVKFSRSADAPAYQQGQNQLYNELNLGRREEYDVLDKRRGRDPEMGGKPQRRKNPQEGLYNELQKDKMAEAYSEIGMKGERRRGKGHDGLYQGLSTATKDTYDALHMQALPPRRAKRSGSGATNFSLLKQAGDVEENPGPTSMDWIWRILFLVGAATGAHSGPQLQLQESGPGLVKPSETLSLTCTVSGDSISSGDYYWGWIRQPPGKGLEWIGHIYYSGVTYYNPSLKSRVTISVDTSRNQFSLKLSSVTAADTAVYYCTREDSSNWRSRGQGTLVTVSSGSGGGGSGGGGSGGGGSFEQVQLQESGPGLVKPSETLSLTCTVSGVSLPDYGVSWIRQPPGKGLEWIGVIWGSETTYYNSSLKSRVTISKDNSKNQVSLKLSSVTAADTAVYYCAKHYYYGGSYAMDYWGQGTLVTVSSTRIQNPDPAVYQLRDSKSSDKSVCLFTDFDSQTNVSQSKDSDVYITDKTVLDMRSMDFKSNSAVAWSNKSDFACANAFNNSIIPEDTFFPSPESSCGTQSFGLLDPKLCYLLDGILFIYGVILTALFLRVKFSRSADAPAYQQGQNQLYNELNLGRREEYDVLDKRRGRDPEMGGKPQRRKNPQEGLYNELQKDKMAEAYSEIGMKGERRRGKGHDGLYQGLSTATKDTYDALHMQALPPR

SEQ ID NO: 13366 - protein, 1089 aa, Artificial Sequence
  Synthetic Polypeptide
MALPVTALLLPLALLLHAARPEVQLVESGGGLVQPGGSLRLSCAASGFSFSDFWMSWVRQAPGKGLEWVATISQAGSEKDYVDSVKGRFTISRDNAKKSLYLQMNSLRAEDTAVYYCASGVYSFDYRGQGTLVTVSSGTGGGGSGGGGSGGGGSEFDEIVLTQSPATLSLSPGERATLSCSASSSVSYMHWYQQKPGQAPRLLIYDTSKLASGIPARFSGSGSGTDFTLTISSLEPEDVAVYYCFQGSVYPFTFGQGTKLEIKRLEDLKNVFPPEVAVFEPSEAEISHTQKATLVCLATGFYPDHVELSWWVNGKEVHSGVSTDPQPLKEQPALNDSRYCLSSRLRVSATFWQNPRNHFRCQVQFYGLSENDEWTQDRAKPVTQIVSAEAWGRADCGSQSFGLLDPKLCYLLDGILFIYGVILTALFLRVKFSRSADAPAYQQGQNQLYNELNLGRREEYDVLDKRRGRDPEMGGKPQRRKNPQEGLYNELQKDKMAEAYSEIGMKGERRRGKGHDGLYQGLSTATKDTYDALHMQALPPRRAKRSGSGATNFSLLKQAGDVEENPGPTSMDWIWRILFLVGAATGAHSGPQLQLQESGPGLVKPSETLSLTCTVSGDSISSGDYYWGWIRQPPGKGLEWIGHIYYSGVTYYNPSLKSRVTISVDTSRNQFSLKLSSVTAADTAVYYCTREDSSNWRSRGQGTLVTVSSGSGGGGSGGGGSGGGGSFEQVQLQESGPGLVKPSQTLSLTCTVSGGSISTSGMGVGWIRQHPGKGLEWIGHIWWDDDKRYNPALKSRVTISVDTSKNQFSLKLSSVTAADTAVYYCARMELWSYYFDYWGQGTLVTVSSTRIQNPDPAVYQLRDSKSSDKSVCLFTDFDSQTNVSQSKDSDVYITDKTVLDMRSMDFKSNSAVAWSNKSDFACANAFNNSIIPEDTFFPSPESSCGTQSFGLLDPKLCYLLDGILFIYGVILTALFLRVKFSRSADAPAYQQGQNQLYNELNLGRREEYDVLDKRRGRDPEMGGKPQRRKNPQEGLYNELQKDKMAEAYSEIGMKGERRRGKGHDGLYQGLSTATKDTYDALHMQALPPR

SEQ ID NO: 13367 - protein, 1087 aa, Artificial Sequence
  Synthetic Polypeptide
MALPVTALLLPLALLLHAARPEVQLVESGGGLVQPGGSLRLSCAASGFSFSDFWMSWVRQAPGKGLEWVATISQAGSEKDYVDSVKGRFTISRDNAKKSLYLQMNSLRAEDTAVYYCASGVYSFDYRGQGTLVTVSSGTGGGGSGGGGSGGGGSEFDYIHVTQSPSSLSVSIGDRVTINCQTSQGVGSDLHWYQHKPGRAPKLLIHHASSVEDGVPSRFSGTGFHTSFNLTINDLQADDIGTYYCQVLQSFGRGSRLDTKLEDLKNVFPPEVAVFEPSEAEISHTQKATLVCLATGFYPDHVELSWWVNGKEVHSGVSTDPQPLKEQPALNDSRYCLSSRLRVSATFWQNPRNHFRCQVQFYGLSENDEWTQDRAKPVTQIVSAEAWGRADCGSQSFGLLDPKLCYLLDGILFIYGVILTALFLRVKFSRSADAPAYQQGQNQLYNELNLGRREEYDVLDKRRGRDPEMGGKPQRRKNPQEGLYNELQKDKMAEAYSEIGMKGERRRGKGHDGLYQGLSTATKDTYDALHMQALPPRRAKRSGSGATNFSLLKQAGDVEENPGPTSMDWIWRILFLVGAATGAHSGPQLQLQESGPGLVKPSETLSLTCTVSGDSISSGDYYWGWIRQPPGKGLEWIGHIYYSGVTYYNPSLKSRVTISVDTSRNQFSLKLSSVTAADTAVYYCTREDSSNWRSRGQGTLVTVSSGSGGGGSGGGGSGGGGSFERAHLVQSGTAMKKPGASVRVSCQTSGYTFTAHILFWFRQAPGRGLEWVGWIKPQYGAVNFGGGFRDRVTLTRDVYREIAYMDIRGLKPDDTAVYYCARDRSYGDSSWALDAWGQGTTVVVSATRIQNPDPAVYQLRDSKSSDKSVCLFTDFDSQTNVSQSKDSDVYITDKTVLDMRSMDFKSNSAVAWSNKSDFACANAFNNSIIPEDTFFPSPESSCGTQSFGLLDPKLCYLLDGILFIYGVILTALFLRVKFSRSADAPAYQQGQNQLYNELNLGRREEYDVLDKRRGRDPEMGGKPQRRKNPQEGLYNELQKDKMAEAYSEIGMKGERRRGKGHDGLYQGLSTATKDTYDALHMQALPPR

SEQ ID NO: 13368 - protein, 1097 aa, Artificial Sequence
  Synthetic Polypeptide
MALPVTALLLPLALLLHAARPEVQLVESGGGLVQPGGSLRLSCAASGFSFSDFWMSWVRQAPGKGLEWVATISQAGSEKDYVDSVKGRFTISRDNAKKSLYLQMNSLRAEDTAVYYCASGVYSFDYRGQGTLVTVSSGTGGGGSGGGGSGGGGSEFDVQMIQTPDSLAVSLGQRATISCRASESVDNYGISFMHWYQQKPGQSPKLLIYRASNLESGIPARFSGSGSRTDFTLTINPVETDDVATYYCQQNNKDPPTFGGGTKLEIKLEDLKNVFPPEVAVFEPSEAEISHTQKATLVCLATGFYPDHVELSWWVNGKEVHSGVSTDPQPLKEQPALNDSRYCLSSRLRVSATFWQNPRNHFRCQVQFYGLSENDEWTQDRAKPVTQIVSAEAWGRADCGSQSFGLLDPKLCYLLDGILFIYGVILTALFLRVKFSRSADAPAYQQGQNQLYNELNLGRREEYDVLDKRRGRDPEMGGKPQRRKNPQEGLYNELQKDKMAEAYSEIGMKGERRRGKGHDGLYQGLSTATKDTYDALHMQALPPRRAKRSGSGATNFSLLKQAGDVEENPGPTSMDWIWRILFLVGAATGAHSGPQLQLQESGPGLVKPSETLSLTCTVSGDSISSGDYYWGWIRQPPGKGLEWIGHIYYSGVTYYNPSLKSRVTISVDTSRNQFSLKLSSVTAADTAVYYCTREDSSNWRSRGQGTLVTVSSGSGGGGSGGGGSGGGGSFEGGGGSQVQLQQSGAELVKPGASVKISCKASGYAFSSYWMNWVKQRPGKGLEWIGQIYPGDGDTTYNGKFKGKATLTADKSSSTVYMQLNSLTSEDSAVYFCVRYYYGSSGYFDYWGQGTTLTVSSTRIQNPDPAVYQLRDSKSSDKSVCLFTDFDSQTNVSQSKDSDVYITDKTVLDMRSMDFKSNSAVAWSNKSDFACANAFNNSIIPEDTFFPSPESSCGTQSFGLLDPKLCYLLDGILFIYGVILTALFLRVKFSRSADAPAYQQGQNQLYNELNLGRREEYDVLDKRRGRDPEMGGKPQRRKNPQEGLYNELQKDKMAEAYSEIGMKGERRRGKGHDGLYQGLSTATKDTYDALHMQALPPR

SEQ ID NO: 13369 - protein, 1088 aa, Artificial Sequence
  Synthetic Polypeptide
MALPVTALLLPLALLLHAARPEVQLVESGGGLVQPGGSLRLSCAASGFSFSDFWMSWVRQAPGKGLEWVATISQAGSEKDYVDSVKGRFTISRDNAKKSLYLQMNSLRAEDTAVYYCASGVYSFDYRGQGTLVTVSSGTGGGGSGGGGSGGGGSEFDVQMIQTPSSLSASLGDRVTISCRASQDIGNYLNWYQQKPDGTVKLLIYYTSRLHSGVPSRFSGSGSGTEYSLTISNLEQEDIATYFCQQGSALPPTFGGGTKLEINLEDLKNVFPPEVAVFEPSEAEISHTQKATLVCLATGFYPDHVELSWWVNGKEVHSGVSTDPQPLKEQPALNDSRYCLSSRLRVSATFWQNPRNHFRCQVQFYGLSENDEWTQDRAKPVTQIVSAEAWGRADCGSQSFGLLDPKLCYLLDGILFIYGVILTALFLRVKFSRSADAPAYQQGQNQLYNELNLGRREEYDVLDKRRGRDPEMGGKPQRRKNPQEGLYNELQKDKMAEAYSEIGMKGERRRGKGHDGLYQGLSTATKDTYDALHMQALPPRRAKRSGSGATNFSLLKQAGDVEENPGPTSMDWIWRILFLVGAATGAHSGPQLQLQESGPGLVKPSETLSLTCTVSGDSISSGDYYWGWIRQPPGKGLEWIGHIYYSGVTYYNPSLKSRVTISVDTSRNQFSLKLSSVTAADTAVYYCTREDSSNWRSRGQGTLVTVSSGSGGGGSGGGGSGGGGSFEALQLQQSGAELVRPGASVTLSCKASGYTFTDYEMHWVKQTPVHGLEWIGAIDPETGGTAYNQKFEGKAILTADKSSSTAYMELRSLTSEDSPVYYCARRRYYGSSSFDYWGQGTTLTVSSTRIQNPDPAVYQLRDSKSSDKSVCLFTDFDSQTNVSQSKDSDVYITDKTVLDMRSMDFKSNSAVAWSNKSDFACANAFNNSIIPEDTFFPSPESSCGTQSFGLLDPKLCYLLDGILFIYGVILTALFLRVKFSRSADAPAYQQGQNQLYNELNLGRREEYDVLDKRRGRDPEMGGKPQRRKNPQEGLYNELQKDKMAEAYSEIGMKGERRRGKGHDGLYQGLSTATKDTYDALHMQALPPR

SEQ ID NO: 13370 - protein, 1092 aa, Artificial Sequence
  Synthetic Polypeptide
MALPVTALLLPLALLLHAARPEVQLVESGGGLVQPGGSLRLSCAASGFSFSDFWMSWVRQAPGKGLEWVATISQAGSEKDYVDSVKGRFTISRDNAKKSLYLQMNSLRAEDTAVYYCASGVYSFDYRGQGTLVTVSSGTGGGGSGGGGSGGGGSEFDIVLTQSPASLAVSLGQRATISCRASKSVSTSGYSYLHWYQQKPGQPPKLLIYLASNLESGVPARFSGSGSGTDFTLNIHPVEEEDAATYYCQHSRELPFTFGSGTKLEIKLEDLKNVFPPEVAVFEPSEAEISHTQKATLVCLATGFYPDHVELSWWVNGKEVHSGVSTDPQPLKEQPALNDSRYCLSSRLRVSATFWQNPRNHFRCQVQFYGLSENDEWTQDRAKPVTQIVSAEAWGRADCGSQSFGLLDPKLCYLLDGILFIYGVILTALFLRVKFSRSADAPAYQQGQNQLYNELNLGRREEYDVLDKRRGRDPEMGGKPQRRKNPQEGLYNELQKDKMAEAYSEIGMKGERRRGKGHDGLYQGLSTATKDTYDALHMQALPPRRAKRSGSGATNFSLLKQAGDVEENPGPTSMDWIWRILFLVGAATGAHSGPQLQLQESGPGLVKPSETLSLTCTVSGDSISSGDYYWGWIRQPPGKGLEWIGHIYYSGVTYYNPSLKSRVTISVDTSRNQFSLKLSSVTAADTAVYYCTREDSSNWRSRGQGTLVTVSSGSGGGGSGGGGSGGGGSFEQVQLVESGGGLVQPGGSLKLSCAASGFDFSRYWMSWVRQAPGKGLEWIGEINPTSSTINFTPSLKDKVFISRDNAKNTLYLQMSKVRSEDTALYYCARGNYYRYGDAMDYWGQGTSVTVSTRIQNPDPAVYQLRDSKSSDKSVCLFTDFDSQTNVSQSKDSDVYITDKTVLDMRSMDFKSNSAVAWSNKSDFACANAFNNSIIPEDTFFPSPESSCGTQSFGLLDPKLCYLLDGILFIYGVILTALFLRVKFSRSADAPAYQQGQNQLYNELNLGRREEYDVLDKRRGRDPEMGGKPQRRKNPQEGLYNELQKDKMAEAYSEIGMKGERRRGKGHDGLYQGLSTATKDTYDALHMQALPPR

SEQ ID NO: 13371 - protein, 1090 aa, Artificial Sequence
  Synthetic Polypeptide
MALPVTALLLPLALLLHAARPEVQLVESGGGLVQPGGSLRLSCAASGFSFSDFWMSWVRQAPGKGLEWVATISQAGSEKDYVDSVKGRFTISRDNAKKSLYLQMNSLRAEDTAVYYCASGVYSFDYRGQGTLVTVSSGTGGGGSGGGGSGGGGSEFDIQMTQSPSSLSASVGDRVTITCSASQDISNYLNWYQQKPGKAPKLLIYYTSNLHSGVPSRFSGSGSGTDFTLTISSLQPEDFATYYCQQYRKLPWTFGQGTKLEIKRLEDLKNVFPPEVAVFEPSEAEISHTQKATLVCLATGFYPDHVELSWWVNGKEVHSGVSTDPQPLKEQPALNDSRYCLSSRLRVSATFWQNPRNHFRCQVQFYGLSENDEWTQDRAKPVTQIVSAEAWGRADCGSQSFGLLDPKLCYLLDGILFIYGVILTALFLRVKFSRSADAPAYQQGQNQLYNELNLGRREEYDVLDKRRGRDPEMGGKPQRRKNPQEGLYNELQKDKMAEAYSEIGMKGERRRGKGHDGLYQGLSTATKDTYDALHMQALPPRRAKRSGSGATNFSLLKQAGDVEENPGPTSMDWIWRILFLVGAATGAHSGPQLQLQESGPGLVKPSETLSLTCTVSGDSISSGDYYWGWIRQPPGKGLEWIGHIYYSGVTYYNPSLKSRVTISVDTSRNQFSLKLSSVTAADTAVYYCTREDSSNWRSRGQGTLVTVSSGSGGGGSGGGGSGGGGSFEQVQLVQSGAEVKKPGSSVKVSCKASGGTFSNYWMHWVRQAPGQGLEWMGATYRGHSDTYYNQKFKGRVTITADKSTSTAYMELSSLRSEDTAVYYCARGAIYDGYDVLDNWGQGTLVTVSSTRIQNPDPAVYQLRDSKSSDKSVCLFTDFDSQTNVSQSKDSDVYITDKTVLDMRSMDFKSNSAVAWSNKSDFACANAFNNSIIPEDTFFPSPESSCGTQSFGLLDPKLCYLLDGILFIYGVILTALFLRVKFSRSADAPAYQQGQNQLYNELNLGRREEYDVLDKRRGRDPEMGGKPQRRKNPQEGLYNELQKDKMAEAYSEIGMKGERRRGKGHDGLYQGLSTATKDTYDALHMQALPPR

SEQ ID NO: 13372 - protein, 1090 aa, Artificial Sequence
  Synthetic Polypeptide
MALPVTALLLPLALLLHAARPEVQLVESGGGLVQPGGSLRLSCAASGFSFSDFWMSWVRQAPGKGLEWVATISQAGSEKDYVDSVKGRFTISRDNAKKSLYLQMNSLRAEDTAVYYCASGVYSFDYRGQGTLVTVSSGTGGGGSGGGGSGGGGSEFDIVLTQSPATLSLSPGDRATISCRASESVTILGSHLIYWYQQKPGQPPRLLIQLASNVQTGVPARFSGSGSRTDFTLTISSVEPEDFAVYYCLQSRTIPRTFGQGTKLEIKRLEDLKNVFPPEVAVFEPSEAEISHTQKATLVCLATGFYPDHVELSWWVNGKEVHSGVSTDPQPLKEQPALNDSRYCLSSRLRVSATFWQNPRNHFRCQVQFYGLSENDEWTQDRAKPVTQIVSAEAWGRADCGSQSFGLLDPKLCYLLDGILFIYGVILTALFLRVKFSRSADAPAYQQGQNQLYNELNLGRREEYDVLDKRRGRDPEMGGKPQRRKNPQEGLYNELQKDKMAEAYSEIGMKGERRRGKGHDGLYQGLSTATKDTYDALHMQALPPRRAKRSGSGATNFSLLKQAGDVEENPGPTSMDWIWRILFLVGAATGAHSGPQLQLQESGPGLVKPSETLSLTCTVSGDSISSGDYYWGWIRQPPGKGLEWIGHIYYSGVTYYNPSLKSRVTISVDTSRNQFSLKLSSVTAADTAVYYCTREDSSNWRSRGQGTLVTVSSGSGGGGSGGGGSGGGGSFEQVQLVQSGPEVKKPGESVKISCKASGYTFRHYSMNWVKQAPGQGLKWMGRINTESGVPIYADDFKGRFSFTVDTSASTAYLEISSLTSEDTAVYFCSNDYLYSLDFWGQGTTLTVSSTRIQNPDPAVYQLRDSKSSDKSVCLFTDFDSQTNVSQSKDSDVYITDKTVLDMRSMDFKSNSAVAWSNKSDFACANAFNNSIIPEDTFFPSPESSCGTQSFGLLDPKLCYLLDGILFIYGVILTALFLRVKFSRSADAPAYQQGQNQLYNELNLGRREEYDVLDKRRGRDPEMGGKPQRRKNPQEGLYNELQKDKMAEAYSEIGMKGERRRGKGHDGLYQGLSTATKDTYDALHMQALPPR

SEQ ID NO: 13373 - protein, 1091 aa, Artificial Sequence
  Synthetic Polypeptide
MALPVTALLLPLALLLHAARPEVQLVESGGGLVQPGGSLRLSCAASGFSFSDFWMSWVRQAPGKGLEWVATISQAGSEKDYVDSVKGRFTISRDNAKKSLYLQMNSLRAEDTAVYYCASGVYSFDYRGQGTLVTVSSGTGGGGSGGGGSGGGGSEFQSVLTQPPSVSGAPGQRVTISCTGSSSNIGAGFDVHWYQQLPGTAPKLLIYGNSNRPSGVPDRFSGSKSGTSASLAITGLQAEDEADYYCQSYDSSLSGYVFGTGTKVTVLGLEDLKNVFPPEVAVFEPSEAEISHTQKATLVCLATGFYPDHVELSWWVNGKEVHSGVSTDPQPLKEQPALNDSRYCLSSRLRVSATFWQNPRNHFRCQVQFYGLSENDEWTQDRAKPVTQIVSAEAWGRADCGSQSFGLLDPKLCYLLDGILFIYGVILTALFLRVKFSRSADAPAYQQGQNQLYNELNLGRREEYDVLDKRRGRDPEMGGKPQRRKNPQEGLYNELQKDKMAEAYSEIGMKGERRRGKGHDGLYQGLSTATKDTYDALHMQALPPRRAKRSGSGATNFSLLKQAGDVEENPGPTSMDWIWRILFLVGAATGAHSGPQLQLQESGPGLVKPSETLSLTCTVSGDSISSGDYYWGWIRQPPGKGLEWIGHIYYSGVTYYNPSLKSRVTISVDTSRNQFSLKLSSVTAADTAVYYCTREDSSNWRSRGQGTLVTVSSGSGGGGSGGGGSGGGGSFEQVQLVQSGAEVKKPGASVKVSCKASGYTFTDYYMHWVRQAPGQRLEWMGWINPNSGGTNYAQKFQDRITVTRDTSSNTGYMELTRLRSDDTAVYYCARSPYSGVLDKWGQGTLVTVSSTRIQNPDPAVYQLRDSKSSDKSVCLFTDFDSQTNVSQSKDSDVYITDKTVLDMRSMDFKSNSAVAWSNKSDFACANAFNNSIIPEDTFFPSPESSCGTQSFGLLDPKLCYLLDGILFIYGVILTALFLRVKFSRSADAPAYQQGQNQLYNELNLGRREEYDVLDKRRGRDPEMGGKPQRRKNPQEGLYNELQKDKMAEAYSEIGMKGERRRGKGHDGLYQGLSTATKDTYDALHMQALPPR

SEQ ID NO: 13374 - protein, 1088 aa, Artificial Sequence
  Synthetic Polypeptide
MALPVTALLLPLALLLHAARPEVQLVESGGGLVQPGGSLRLSCAASGFSFSDFWMSWVRQAPGKGLEWVATISQAGSEKDYVDSVKGRFTISRDNAKKSLYLQMNSLRAEDTAVYYCASGVYSFDYRGQGTLVTVSSGTGGGGSGGGGSGGGGSEFQAVLTQPPSASGTPGQRVTISCSGSSSNIGSYTVSWYQQLPGTAPKFLIYSNNQRPSGVPDRFSGSKSGTSASLAISGLQSEDEADYYCAAWDDSLNGYVFGTGTKVTVLGLEDLKNVFPPEVAVFEPSEAEISHTQKATLVCLATGFYPDHVELSWWVNGKEVHSGVSTDPQPLKEQPALNDSRYCLSSRLRVSATFWQNPRNHFRCQVQFYGLSENDEWTQDRAKPVTQIVSAEAWGRADCGSQSFGLLDPKLCYLLDGILFIYGVILTALFLRVKFSRSADAPAYQQGQNQLYNELNLGRREEYDVLDKRRGRDPEMGGKPQRRKNPQEGLYNELQKDKMAEAYSEIGMKGERRRGKGHDGLYQGLSTATKDTYDALHMQALPPRRAKRSGSGATNFSLLKQAGDVEENPGPTSMDWIWRILFLVGAATGAHSGPQLQLQESGPGLVKPSETLSLTCTVSGDSISSGDYYWGWIRQPPGKGLEWIGHIYYSGVTYYNPSLKSRVTISVDTSRNQFSLKLSSVTAADTAVYYCTREDSSNWRSRGQGTLVTVSSGSGGGGSGGGGSGGGGSFEVQLVQSGAEVKKPGESLKISCKGSGYDFTTYWIGWVRQMPGKGLEWMGIIYPGDSDTRYSPSVRGRVTISADKSINTAYLQWSSLEASDTAMYYCARMWTFSQDGWGQGTLVTVSSTRIQNPDPAVYQLRDSKSSDKSVCLFTDFDSQTNVSQSKDSDVYITDKTVLDMRSMDFKSNSAVAWSNKSDFACANAFNNSIIPEDTFFPSPESSCGTQSFGLLDPKLCYLLDGILFIYGVILTALFLRVKFSRSADAPAYQQGQNQLYNELNLGRREEYDVLDKRRGRDPEMGGKPQRRKNPQEGLYNELQKDKMAEAYSEIGMKGERRRGKGHDGLYQGLSTATKDTYDALHMQALPPR

SEQ ID NO: 13375 - protein, 1091 aa, Artificial Sequence
  Synthetic Polypeptide
MALPVTALLLPLALLLHAARPEVQLVESGGGLVQPGGSLRLSCAASGFSFSDFWMSWVRQAPGKGLEWVATISQAGSEKDYVDSVKGRFTISRDNAKKSLYLQMNSLRAEDTAVYYCASGVYSFDYRGQGTLVTVSSGTGGGGSGGGGSGGGGSEFDIVMTQSPDSLAVSLGERATINCKSSQSILYSSNQKNYLAWYQQKPGQSPKLLIYWASTRESGVPDRFSGSGSGTDFTLTISSLQAEDVAVYYCHQYISSYTFGQGTKLEIKLEDLKNVFPPEVAVFEPSEAEISHTQKATLVCLATGFYPDHVELSWWVNGKEVHSGVSTDPQPLKEQPALNDSRYCLSSRLRVSATFWQNPRNHFRCQVQFYGLSENDEWTQDRAKPVTQIVSAEAWGRADCGSQSFGLLDPKLCYLLDGILFIYGVILTALFLRVKFSRSADAPAYQQGQNQLYNELNLGRREEYDVLDKRRGRDPEMGGKPQRRKNPQEGLYNELQKDKMAEAYSEIGMKGERRRGKGHDGLYQGLSTATKDTYDALHMQALPPRRAKRSGSGATNFSLLKQAGDVEENPGPTSMDWIWRILFLVGAATGAHSGPQLQLQESGPGLVKPSETLSLTCTVSGDSISSGDYYWGWIRQPPGKGLEWIGHIYYSGVTYYNPSLKSRVTISVDTSRNQFSLKLSSVTAADTAVYYCTREDSSNWRSRGQGTLVTVSSGSGGGGSGGGGSGGGGSFEQVQLVQSGAEVKKPGASVKVSCKASGYTFASQWMHWMRQAPGQGLEWIGWINPGNVNTKYNEKFKGRATLTVDTSTNTAYMELSSLRSEDTAVYYCARSTWYRPLDYWGQGTLVTVSSTRIQNPDPAVYQLRDSKSSDKSVCLFTDFDSQTNVSQSKDSDVYITDKTVLDMRSMDFKSNSAVAWSNKSDFACANAFNNSIIPEDTFFPSPESSCGTQSFGLLDPKLCYLLDGILFIYGVILTALFLRVKFSRSADAPAYQQGQNQLYNELNLGRREEYDVLDKRRGRDPEMGGKPQRRKNPQEGLYNELQKDKMAEAYSEIGMKGERRRGKGHDGLYQGLSTATKDTYDALHMQALPPR

SEQ ID NO: 13376 - protein, 1091 aa, Artificial Sequence
  Synthetic Polypeptide
MALPVTALLLPLALLLHAARPEVQLVESGGGLVQPGGSLRLSCAASGFSFSDFWMSWVRQAPGKGLEWVATISQAGSEKDYVDSVKGRFTISRDNAKKSLYLQMNSLRAEDTAVYYCASGVYSFDYRGQGTLVTVSSGTGGGGSGGGGSGGGGSEFDHIVLTQSPSSLSASLGDRVTISCRASQDISTYLNWYQQKPDGTVKLLIFYTSRLHAGVPSRFSGSGSGTHHSLTISNLEQEDIATYFCQQGNSLPFTFGSGTKLEIKRLEDLKNVFPPEVAVFEPSEAEISHTQKATLVCLATGFYPDHVELSWWVNGKEVHSGVSTDPQPLKEQPALNDSRYCLSSRLRVSATFWQNPRNHFRCQVQFYGLSENDEWTQDRAKPVTQIVSAEAWGRADCGSQSFGLLDPKLCYLLDGILFIYGVILTALFLRVKFSRSADAPAYQQGQNQLYNELNLGRREEYDVLDKRRGRDPEMGGKPQRRKNPQEGLYNELQKDKMAEAYSEIGMKGERRRGKGHDGLYQGLSTATKDTYDALHMQALPPRRAKRSGSGATNFSLLKQAGDVEENPGPTSMDWIWRILFLVGAATGAHSGPQLQLQESGPGLVKPSETLSLTCTVSGDSISSGDYYWGWIRQPPGKGLEWIGHIYYSGVTYYNPSLKSRVTISVDTSRNQFSLKLSSVTAADTAVYYCTREDSSNWRSRGQGTLVTVSSGSGGGGSGGGGSGGGGSFEQVQLKESGPELEKPGASVKISCKASGYSFTAYSMNWVKQNNGMSLEWIGSIDPYYGDTKYAQKFKGKATLTVDKASSTAYLQLKSLTSEDSAVYYCARRMITTGDWYFDVWGAGTTVTVSSTRIQNPDPAVYQLRDSKSSDKSVCLFTDFDSQTNVSQSKDSDVYITDKTVLDMRSMDFKSNSAVAWSNKSDFACANAFNNSIIPEDTFFPSPESSCGTQSFGLLDPKLCYLLDGILFIYGVILTALFLRVKFSRSADAPAYQQGQNQLYNELNLGRREEYDVLDKRRGRDPEMGGKPQRRKNPQEGLYNELQKDKMAEAYSEIGMKGERRRGKGHDGLYQGLSTATKDTYDALHMQALPPR

SEQ ID NO: 13377 - protein, 1091 aa, Artificial Sequence; identical to SEQ ID NO: 13376
  Synthetic Polypeptide

SEQ ID NO: 13378 - protein, 1091 aa, Artificial Sequence
  Synthetic Polypeptide
MALPVTALLLPLALLLHAARPEVQLVESGGGLVQPGGSLRLSCAASGFSFSDFWMSWVRQAPGKGLEWVATISQAGSEKDYVDSVKGRFTISRDNAKKSLYLQMNSLRAEDTAVYYCASGVYSFDYRGQGTLVTVSSGTGGGGSGGGGSGGGGSEFDEIVLTQSPATLSLSPGERATLSCRASQSVSSYLAWYQQKPGQAPRLLIYDASNRATGIPARFSGSGSGTDFTLTISSLEPEDFAVYYCQQRSNWPITFGQGTRLEIKLEDLKNVFPPEVAVFEPSEAEISHTQKATLVCLATGFYPDHVELSWWVNGKEVHSGVSTDPQPLKEQPALNDSRYCLSSRLRVSATFWQNPRNHFRCQVQFYGLSENDEWTQDRAKPVTQIVSAEAWGRADCGSQSFGLLDPKLCYLLDGILFIYGVILTALFLRVKFSRSADAPAYQQGQNQLYNELNLGRREEYDVLDKRRGRDPEMGGKPQRRKNPQEGLYNELQKDKMAEAYSEIGMKGERRRGKGHDGLYQGLSTATKDTYDALHMQALPPRRAKRSGSGATNFSLLKQAGDVEENPGPTSMDWIWRILFLVGAATGAHSGPQLQLQESGPGLVKPSETLSLTCTVSGDSISSGDYYWGWIRQPPGKGLEWIGHIYYSGVTYYNPSLKSRVTISVDTSRNQFSLKLSSVTAADTAVYYCTREDSSNWRSRGQGTLVTVSSGSGGGGSGGGGSGGGGSFEEVQLVESGGGLVQPGRSLRLSCAASGFTFNDYAMHWVRQAPGKGLEWVSTISWNSGSIGYADSVKGRFTISRDNAKKSLYLQMNSLRAEDTALYYCAKDIQYGNYYYGMDVWGQGTTVTVSSTRIQNPDPAVYQLRDSKSSDKSVCLFTDFDSQTNVSQSKDSDVYITDKTVLDMRSMDFKSNSAVAWSNKSDFACANAFNNSIIPEDTFFPSPESSCGTQSFGLLDPKLCYLLDGILFIYGVILTALFLRVKFSRSADAPAYQQGQNQLYNELNLGRREEYDVLDKRRGRDPEMGGKPQRRKNPQEGLYNELQKDKMAEAYSEIGMKGERRRGKGHDGLYQGLSTATKDTYDALHMQALPPR

SEQ ID NO: 13379 - protein, 1093 aa, Artificial Sequence
  Synthetic Polypeptide
MALPVTALLLPLALLLHAARPEVQLVESGGGLVQPGGSLRLSCAASGFSFSDFWMSWVRQAPGKGLEWVATISQAGSEKDYVDSVKGRFTISRDNAKKSLYLQMNSLRAEDTAVYYCASGVYSFDYRGQGTLVTVSSGTGGGGSGGGGSGGGGSEFDIVMTQTPLSLPVTPGEPASISCRSSKSLLHSNGITYLYWYLQKPGQSPQLLIYQMSNLVSGVPDRFSGSGSGTDFTLKISRVEAEDVGVYYCAQNLELPYTFGGGTKVEIKRLEDLKNVFPPEVAVFEPSEAEISHTQKATLVCLATGFYPDHVELSWWVNGKEVHSGVSTDPQPLKEQPALNDSRYCLSSRLRVSATFWQNPRNHFRCQVQFYGLSENDEWTQDRAKPVTQIVSAEAWGRADCGSQSFGLLDPKLCYLLDGILFIYGVILTALFLRVKFSRSADAPAYQQGQNQLYNELNLGRREEYDVLDKRRGRDPEMGGKPQRRKNPQEGLYNELQKDKMAEAYSEIGMKGERRRGKGHDGLYQGLSTATKDTYDALHMQALPPRRAKRSGSGATNFSLLKQAGDVEENPGPTSMDWIWRILFLVGAATGAHSGPQLQLQESGPGLVKPSETLSLTCTVSGDSISSGDYYWGWIRQPPGKGLEWIGHIYYSGVTYYNPSLKSRVTISVDTSRNQFSLKLSSVTAADTAVYYCTREDSSNWRSRGQGTLVTVSSGSGGGGSGGGGSGGGGSFEQVQLVQSGAEVKKPGSSVKVSCKASGYAFSYSWINWVRQAPGQGLEWMGRIFPGDGDTDYNGKFKGRVTITADKSTSTAYMELSSLRSEDTAVYYCARNVFDGYWLVYWGQGTLVTVSSTRIQNPDPAVYQLRDSKSSDKSVCLFTDFDSQTNVSQSKDSDVYITDKTVLDMRSMDFKSNSAVAWSNKSDFACANAFNNSIIPEDTFFPSPESSCGTQSFGLLDPKLCYLLDGILFIYGVILTALFLRVKFSRSADAPAYQQGQNQLYNELNLGRREEYDVLDKRRGRDPEMGGKPQRRKNPQEGLYNELQKDKMAEAYSEIGMKGERRRGKGHDGLYQGLSTATKDTYDALHMQALPPR

SEQ ID NO: 13380 - protein, 1094 aa, Artificial Sequence
  Synthetic Polypeptide
MALPVTALLLPLALLLHAARPEVQLVESGGGLVQPGGSLRLSCAASGFSFSDFWMSWVRQAPGKGLEWVATISQAGSEKDYVDSVKGRFTISRDNAKKSLYLQMNSLRAEDTAVYYCASGVYSFDYRGQGTLVTVSSGTGGGGSGGGGSGGGGSEFDIQMTQSPSSLSASVGDRVTITCRSSQSIVHSVGNTFLEWYQQKPGKAPKLLIYKVSNRFSGVPSRFSGSGSGTDFTLTISSLQPEDFATYYCFQGSQFPYTFGQGTKVEIKRLEDLKNVFPPEVAVFEPSEAEISHTQKATLVCLATGFYPDHVELSWWVNGKEVHSGVSTDPQPLKEQPALNDSRYCLSSRLRVSATFWQNPRNHFRCQVQFYGLSENDEWTQDRAKPVTQIVSAEAWGRADCGSQSFGLLDPKLCYLLDGILFIYGVILTALFLRVKFSRSADAPAYQQGQNQLYNELNLGRREEYDVLDKRRGRDPEMGGKPQRRKNPQEGLYNELQKDKMAEAYSEIGMKGERRRGKGHDGLYQGLSTATKDTYDALHMQALPPRRAKRSGSGATNFSLLKQAGDVEENPGPTSMDWIWRILFLVGAATGAHSGPQLQLQESGPGLVKPSETLSLTCTVSGDSISSGDYYWGWIRQPPGKGLEWIGHIYYSGVTYYNPSLKSRVTISVDTSRNQFSLKLSSVTAADTAVYYCTREDSSNWRSRGQGTLVTVSSGSGGGGSGGGGSGGGGSFEEVQLVESGGGLVQPGGSLRLSCAASGYEFSRSWMNWVRQAPGKGLEWVGRIYPGDGDTNYSGKFKGRFTISADTSKNTAYLQMNSLRAEDTAVYYCARDGSSWDWYFDVWGQGTLVTVSSTRIQNPDPAVYQLRDSKSSDKSVCLFTDFDSQTNVSQSKDSDVYITDKTVLDMRSMDFKSNSAVAWSNKSDFACANAFNNSIIPEDTFFPSPESSCGTQSFGLLDPKLCYLLDGILFIYGVILTALFLRVKFSRSADAPAYQQGQNQLYNELNLGRREEYDVLDKRRGRDPEMGGKPQRRKNPQEGLYNELQKDKMAEAYSEIGMKGERRRGKGHDGLYQGLSTATKDTYDALHMQALPPR

SEQ ID NO: 13381 - protein, 1092 aa, Artificial Sequence
  Synthetic Polypeptide
MALPVTALLLPLALLLHAARPEVQLVESGGGLVQPGGSLRLSCAASGFSFSDFWMSWVRQAPGKGLEWVATISQAGSEKDYVDSVKGRFTISRDNAKKSLYLQMNSLRAEDTAVYYCASGVYSFDYRGQGTLVTVSSGTGGGGSGGGGSGGGGSEFDIQMTQSPSSLSASVGDRVTITCRASQTIWSYLNWYQQRPGKAPNLLIYAASSLQSGVPSRFSGRGSGTDFTLTISSLQAEDFATYYCQQSYSIPQIFGQGTKLEIKLEDLKNVFPPEVAVFEPSEAEISHTQKATLVCLATGFYPDHVELSWWVNGKEVHSGVSTDPQPLKEQPALNDSRYCLSSRLRVSATFWQNPRNHFRCQVQFYGLSENDEWTQDRAKPVTQIVSAEAWGRADCGSQSFGLLDPKLCYLLDGILFIYGVILTALFLRVKFSRSADAPAYQQGQNQLYNELNLGRREEYDVLDKRRGRDPEMGGKPQRRKNPQEGLYNELQKDKMAEAYSEIGMKGERRRGKGHDGLYQGLSTATKDTYDALHMQALPPRRAKRSGSGATNFSLLKQAGDVEENPGPTSMDWIWRILFLVGAATGAHSGPQLQLQESGPGLVKPSETLSLTCTVSGDSISSGDYYWGWIRQPPGKGLEWIGHIYYSGVTYYNPSLKSRVTISVDTSRNQFSLKLSSVTAADTAVYYCTREDSSNWRSRGQGTLVTVSSGSGGGGSGGGGSGGGGSFEQVQLQQSGPGLVKPSQTLSLTCAISGDSVSSNSAAWNWIRQSPSRGLEWLGRTYYRSKWYNDYAVSVKSRITINPDTSKNQFSLQLNSVTPEDTAVYYCAREVTGDLEDAFDIWGQGTMVTVSSTRIQNPDPAVYQLRDSKSSDKSVCLFTDFDSQTNVSQSKDSDVYITDKTVLDMRSMDFKSNSAVAWSNKSDFACANAFNNSIIPEDTFFPSPESSCGTQSFGLLDPKLCYLLDGILFIYGVILTALFLRVKFSRSADAPAYQQGQNQLYNELNLGRREEYDVLDKRRGRDPEMGGKPQRRKNPQEGLYNELQKDKMAEAYSEIGMKGERRRGKGHDGLYQGLSTATKDTYDALHMQALPPR

SEQ ID NO: 13382 - protein, 1085 aa, Artificial Sequence
  Synthetic Polypeptide
MALPVTALLLPLALLLHAARPEVQLVESGGGLVQPGGSLRLSCAASGFSFSDFWMSWVRQAPGKGLEWVATISQAGSEKDYVDSVKGRFTISRDNAKKSLYLQMNSLRAEDTAVYYCASGVYSFDYRGQGTLVTVSSGTGGGGSGGGGSGGGGSEFDIQMTQSPATIENTSLSASVGDRVTITCRASQGISSWLTWYQQKPEKAPKSLIYAASSLQSGVPSRFSGSGSGTDFTLTISSLQPEDFATYYCQQYDSYPITFGQGTRLEIKLEDLKNVFPPEVAVFEPSEAEISHTQKATLVCLATGFYPDHVELSWWVNGKEVHSGVSTDPQPLKEQPALNDSRYCLSSRLRVSATFWQNPRNHFRCQVQFYGLSENDEWTQDRAKPVTQIVSAEAWGRADCGSQSFGLLDPKLCYLLDGILFIYGVILTALFLRVKFSRSADAPAYQQGQNQLYNELNLGRREEYDVLDKRRGRDPEMGGKPQRRKNPQEGLYNELQKDKMAEAYSEIGMKGERRRGKGHDGLYQGLSTATKDTYDALHMQALPPRRAKRSGSGATNFSLLKQAGDVEENPGPTSMDWIWRILFLVGAATGAHSGPQLQLQESGPGLVKPSETLSLTCTVSGDSISSGDYYWGWIRQPPGKGLEWIGHIYYSGVTYYNPSLKSRVTISVDTSRNQFSLKLSSVTAADTAVYYCTREDSSNWRSRGQGTLVTVSSGSGGGGSGGGGSGGGGSFEQVQLQQWGAGLLKPSETLSLTCAVYGGSFSAYYWSWIRQPPGKGLEWIGDINHGGGTNYNPSLKSRVTISVDTSKNQFSLKLNSVTAADTAVYYCASLTAYWGQGSLVTVSSTRIQNPDPAVYQLRDSKSSDKSVCLFTDFDSQTNVSQSKDSDVYITDKTVLDMRSMDFKSNSAVAWSNKSDFACANAFNNSIIPEDTFFPSPESSCGTQSFGLLDPKLCYLLDGILFIYGVILTALFLRVKFSRSADAPAYQQGQNQLYNELNLGRREEYDVLDKRRGRDPEMGGKPQRRKNPQEGLYNELQKDKMAEAYSEIGMKGERRRGKGHDGLYQGLSTATKDTYDALHMQALPPR

SEQ ID NO: 13383 - protein, 1090 aa, Artificial Sequence
  Synthetic Polypeptide
MALPVTALLLPLALLLHAARPEVQLVESGGGLVQPGGSLRLSCAASGFSFSDFWMSWVRQAPGKGLEWVATISQAGSEKDYVDSVKGRFTISRDNAKKSLYLQMNSLRAEDTAVYYCASGVYSFDYRGQGTLVTVSSGTGGGGSGGGGSGGGGSEFDEIVLTQSPDSLAVSLGERATINCKASQSVDFDGDSYLNWYQQKPGQPPKVLIYAASTLQSGVPSRFSGSGSGTDFTLTINSLEAEDAATYYCQQSNEDPWTFGGGTKVEIKLEDLKNVFPPEVAVFEPSEAEISHTQKATLVCLATGFYPDHVELSWWVNGKEVHSGVSTDPQPLKEQPALNDSRYCLSSRLRVSATFWQNPRNHFRCQVQFYGLSENDEWTQDRAKPVTQIVSAEAWGRADCGSQSFGLLDPKLCYLLDGILFIYGVILTALFLRVKFSRSADAPAYQQGQNQLYNELNLGRREEYDVLDKRRGRDPEMGGKPQRRKNPQEGLYNELQKDKMAEAYSEIGMKGERRRGKGHDGLYQGLSTATKDTYDALHMQALPPRRAKRSGSGATNFSLLKQAGDVEENPGPTSMDWIWRILFLVGAATGAHSGPQLQLQESGPGLVKPSETLSLTCTVSGDSISSGDYYWGWIRQPPGKGLEWIGHIYYSGVTYYNPSLKSRVTISVDTSRNQFSLKLSSVTAADTAVYYCTREDSSNWRSRGQGTLVTVSSGSGGGGSGGGGSGGGGSFEQVQLVQSGAEVKKPGASVKVSCKVSGYTFTDYYITWVRQAPGQALEWMGWIYPGSGNTKYSQKFQGRFVFSVDTSASTAYLQLSSLKAEDTAVYYCANYGNYWFAYWGQGTLVTVSSTRIQNPDPAVYQLRDSKSSDKSVCLFTDFDSQTNVSQSKDSDVYITDKTVLDMRSMDFKSNSAVAWSNKSDFACANAFNNSIIPEDTFFPSPESSCGTQSFGLLDPKLCYLLDGILFIYGVILTALFLRVKFSRSADAPAYQQGQNQLYNELNLGRREEYDVLDKRRGRDPEMGGKPQRRKNPQEGLYNELQKDKMAEAYSEIGMKGERRRGKGHDGLYQGLSTATKDTYDALHMQALPPR

SEQ ID NO: 13384 - protein, 1087 aa, Artificial Sequence
  Synthetic Polypeptide
MALPVTALLLPLALLLHAARPEVQLVESGGGLVQPGGSLRLSCAASGFSFSDFWMSWVRQAPGKGLEWVATISQAGSEKDYVDSVKGRFTISRDNAKKSLYLQMNSLRAEDTAVYYCASGVYSFDYRGQGTLVTVSSGTGGGGSGGGGSGGGGSEFDIQMTQSPSSLSASVGDRVTITCRASQGISSWLAWYQQKPEKAPKSLIYAASSLQSGVPSRFSGSGSGTDFTLTISSLQPEDFATYYCQQYNSYPPTFGGGTKVEIKLEDLKNVFPPEVAVFEPSEAEISHTQKATLVCLATGFYPDHVELSWWVNGKEVHSGVSTDPQPLKEQPALNDSRYCLSSRLRVSATFWQNPRNHFRCQVQFYGLSENDEWTQDRAKPVTQIVSAEAWGRADCGSQSFGLLDPKLCYLLDGILFIYGVILTALFLRVKFSRSADAPAYQQGQNQLYNELNLGRREEYDVLDKRRGRDPEMGGKPQRRKNPQEGLYNELQKDKMAEAYSEIGMKGERRRGKGHDGLYQGLSTATKDTYDALHMQALPPRRAKRSGSGATNFSLLKQAGDVEENPGPTSMDWIWRILFLVGAATGAHSGPQLQLQESGPGLVKPSETLSLTCTVSGDSISSGDYYWGWIRQPPGKGLEWIGHIYYSGVTYYNPSLKSRVTISVDTSRNQFSLKLSSVTAADTAVYYCTREDSSNWRSRGQGTLVTVSSGSGGGGSGGGGSGGGGSFEEVQLVQSGGGLVHPGGSLRLSCAGSGFAFSSSTMHWIRQAPGKGLEWISLIGSGGGIYYGDSVKGRFTISRDNAKNSLYLQMNSLRAEDMAVYYCVRGYFDWVDYFDYWGQGTLVTVSSTRIQNPDPAVYQLRDSKSSDKSVCLFTDFDSQTNVSQSKDSDVYITDKTVLDMRSMDFKSNSAVAWSNKSDFACANAFNNSIIPEDTFFPSPESSCGTQSFGLLDPKLCYLLDGILFIYGVILTALFLRVKFSRSADAPAYQQGQNQLYNELNLGRREEYDVLDKRRGRDPEMGGKPQRRKNPQEGLYNELQKDKMAEAYSEIGMKGERRRGKGHDGLYQGLSTATKDTYDALHMQALPPR

SEQ ID NO: 13385 - protein, 1097 aa, Artificial Sequence
  Synthetic Polypeptide
MALPVTALLLPLALLLHAARPEVQLVESGGGLVQPGGSLRLSCAASGFSFSDFWMSWVRQAPGKGLEWVATISQAGSEKDYVDSVKGRFTISRDNAKKSLYLQMNSLRAEDTAVYYCASGVYSFDYRGQGTLVTVSSGTGGGGSGGGGSGGGGSEFDDIVMTQSPDSLTVSLGERTTINCKSSQSVLDSSKNKNSLAWYQQKPGQPPKLLLSWASTRESGIPDRFSGSGSGTDFTLTIDSLQPEDSATYYCQQSAHFPITFGQGTRLEIKLEDLKNVFPPEVAVFEPSEAEISHTQKATLVCLATGFYPDHVELSWWVNGKEVHSGVSTDPQPLKEQPALNDSRYCLSSRLRVSATFWQNPRNHFRCQVQFYGLSENDEWTQDRAKPVTQIVSAEAWGRADCGSQSFGLLDPKLCYLLDGILFIYGVILTALFLRVKFSRSADAPAYQQGQNQLYNELNLGRREEYDVLDKRRGRDPEMGGKPQRRKNPQEGLYNELQKDKMAEAYSEIGMKGERRRGKGHDGLYQGLSTATKDTYDALHMQALPPRRAKRSGSGATNFSLLKQAGDVEENPGPTSMDWIWRILFLVGAATGAHSGPQLQLQESGPGLVKPSETLSLTCTVSGDSISSGDYYWGWIRQPPGKGLEWIGHIYYSGVTYYNPSLKSRVTISVDTSRNQFSLKLSSVTAADTAVYYCTREDSSNWRSRGQGTLVTVSSGSGGGGSGGGGSGGGGSFEQVQLVQSGAEVKKPGASVKVSCKASGYTFTNYGMNWVKQAPGQGLKWMGWINTYTGEPTYADDFKGRVTMTSDTSTSTAYLELHNLRSDDTAVYYCARWSWSDGYYVYFDYWGQGTTVTVSSTRIQNPDPAVYQLRDSKSSDKSVCLFTDFDSQTNVSQSKDSDVYITDKTVLDMRSMDFKSNSAVAWSNKSDFACANAFNNSIIPEDTFFPSPESSCGTQSFGLLDPKLCYLLDGILFIYGVILTALFLRVKFSRSADAPAYQQGQNQLYNELNLGRREEYDVLDKRRGRDPEMGGKPQRRKNPQEGLYNELQKDKMAEAYSEIGMKGERRRGKGHDGLYQGLSTATKDTYDALHMQALPPR

SEQ ID NO: 13386 - protein, 1093 aa, Artificial Sequence
  Synthetic Polypeptide
MALPVTALLLPLALLLHAARPEVQLVESGGGLVQPGGSLRLSCAASGFSFSDFWMSWVRQAPGKGLEWVATISQAGSEKDYVDSVKGRFTISRDNAKKSLYLQMNSLRAEDTAVYYCASGVYSFDYRGQGTLVTVSSGTGGGGSGGGGSGGGGSEFDEIVLTQSPGSLAVSPGERVTMSCKSSQSVFFSSSQKNYLAWYQQIPGQSPRLLIYWASTRESGVPDRFTGSGSGTDFTLTISSVQPEDLAIYYCHQYLSSRTFGQGTKLEIKRLEDLKNVFPPEVAVFEPSEAEISHTQKATLVCLATGFYPDHVELSWWVNGKEVHSGVSTDPQPLKEQPALNDSRYCLSSRLRVSATFWQNPRNHFRCQVQFYGLSENDEWTQDRAKPVTQIVSAEAWGRADCGSQSFGLLDPKLCYLLDGILFIYGVILTALFLRVKFSRSADAPAYQQGQNQLYNELNLGRREEYDVLDKRRGRDPEMGGKPQRRKNPQEGLYNELQKDKMAEAYSEIGMKGERRRGKGHDGLYQGLSTATKDTYDALHMQALPPRRAKRSGSGATNFSLLKQAGDVEENPGPTSMDWIWRILFLVGAATGAHSGPQLQLQESGPGLVKPSETLSLTCTVSGDSISSGDYYWGWIRQPPGKGLEWIGHIYYSGVTYYNPSLKSRVTISVDTSRNQFSLKLSSVTAADTAVYYCTREDSSNWRSRGQGTLVTVSSGSGGGGSGGGGSGGGGSFEQVQLQQPGAEVVKPGASVKMSCKASGYTFTSYYIHWIKQTPGQGLEWVGVIYPGNDDISYNQKFQGKATLTADKSSTTAYMQLSSLTSEDSAVYYCAREVRLRYFDVWGQGTTVTVSSTRIQNPDPAVYQLRDSKSSDKSVCLFTDFDSQTNVSQSKDSDVYITDKTVLDMRSMDFKSNSAVAWSNKSDFACANAFNNSIIPEDTFFPSPESSCGTQSFGLLDPKLCYLLDGILFIYGVILTALFLRVKFSRSADAPAYQQGQNQLYNELNLGRREEYDVLDKRRGRDPEMGGKPQRRKNPQEGLYNELQKDKMAEAYSEIGMKGERRRGKGHDGLYQGLSTATKDTYDALHMQALPPR

SEQ ID NO: 13387 - protein, 1097 aa, Artificial Sequence
  Synthetic Polypeptide
MALPVTALLLPLALLLHAARPEVQLVESGGGLVQPGGSLRLSCAASGFSFSDFWMSWVRQAPGKGLEWVATISQAGSEKDYVDSVKGRFTISRDNAKKSLYLQMNSLRAEDTAVYYCASGVYSFDYRGQGTLVTVSSGTGGGGSGGGGSGGGGSEFDVLLTQSPLSLPVTLGQPASISCRSSQTIVHSNGNTYLEWFQQRPGQSPRLLIYQVSNRFSGVPDRFSGSGSGTDFTLKISRVEAEDVGVYYCFQGSHVPRTFGGGTKVEIKRALEDLKNVFPPEVAVFEPSEAEISHTQKATLVCLATGFYPDHVELSWWVNGKEVHSGVSTDPQPLKEQPALNDSRYCLSSRLRVSATFWQNPRNHFRCQVQFYGLSENDEWTQDRAKPVTQIVSAEAWGRADCGSQSFGLLDPKLCYLLDGILFIYGVILTALFLRVKFSRSADAPAYQQGQNQLYNELNLGRREEYDVLDKRRGRDPEMGGKPQRRKNPQEGLYNELQKDKMAEAYSEIGMKGERRRGKGHDGLYQGLSTATKDTYDALHMQALPPRRAKRSGSGATNFSLLKQAGDVEENPGPTSMDWIWRILFLVGAATGAHSGPQLQLQESGPGLVKPSETLSLTCTVSGDSISSGDYYWGWIRQPPGKGLEWIGHIYYSGVTYYNPSLKSRVTISVDTSRNQFSLKLSSVTAADTAVYYCTREDSSNWRSRGQGTLVTVSSGSGGGGSGGGGSGGGGSFEQIQLVQSGSELKKPGASVKVSCKASGYTFTNYGMNWVRQAPGQGLKWMGWINTNTGEPKYAEEFKGRFALSLDTSVSTAYLQINSLKAEDTAVYFCARGYGNYARGAWLAYWGQGTLVTVSSTRIQNPDPAVYQLRDSKSSDKSVCLFTDFDSQTNVSQSKDSDVYITDKTVLDMRSMDFKSNSAVAWSNKSDFACANAFNNSIIPEDTFFPSPESSCGTQSFGLLDPKLCYLLDGILFIYGVILTALFLRVKFSRSADAPAYQQGQNQLYNELNLGRREEYDVLDKRRGRDPEMGGKPQRRKNPQEGLYNELQKDKMAEAYSEIGMKGERRRGKGHDGLYQGLSTATKDTYDALHMQALPPR

SEQ ID NO: 13388 - protein, 1082 aa, Artificial Sequence
  Synthetic Polypeptide
MALPVTALLLPLALLLHAARPEVQLVESGGGLVQPGGSLRLSCAASGFSFSDFWMSWVRQAPGKGLEWVATISQAGSEKDYVDSVKGRFTISRDNAKKSLYLQMNSLRAEDTAVYYCASGVYSFDYRGQGTLVTVSSGTGGGGSGGGGSGGGGSEFDEIVLTQSPATLSLSPGERATLSCSASSSINYIYWLQQKPGQAPRILIYLTSNLASGVPARFSGSGSGTDFTLTISSLEPEDFAVYYCLQWSSNPLTFGGGTKVEIKLEDLKNVFPPEVAVFEPSEAEISHTQKATLVCLATGFYPDHVELSWWVNGKEVHSGVSTDPQPLKEQPALNDSRYCLSSRLRVSATFWQNPRNHFRCQVQFYGLSENDEWTQDRAKPVTQIVSAEAWGRADCGSQSFGLLDPKLCYLLDGILFIYGVILTALFLRVKFSRSADAPAYQQGQNQLYNELNLGRREEYDVLDKRRGRDPEMGGKPQRRKNPQEGLYNELQKDKMAEAYSEIGMKGERRRGKGHDGLYQGLSTATKDTYDALHMQALPPRRAKRSGSGATNFSLLKQAGDVEENPGPTSMDWIWRILFLVGAATGAHSGPQLQLQESGPGLVKPSETLSLTCTVSGDSISSGDYYWGWIRQPPGKGLEWIGHIYYSGVTYYNPSLKSRVTISVDTSRNQFSLKLSSVTAADTAVYYCTREDSSNWRSRGQGTLVTVSSGSGGGGSGGGGSGGGGSFEEVQLVESGGGLVKPGGSLRLSCAASGFTFSSYDMSWVRQAPGKGLEWVSTISSGGSYTYYLDSIKGRFTISRDNAKNSLYLQMNSLRAEDTAVYYCARQGLDYWGRGTLVTVSSTRIQNPDPAVYQLRDSKSSDKSVCLFTDFDSQTNVSQSKDSDVYITDKTVLDMRSMDFKSNSAVAWSNKSDFACANAFNNSIIPEDTFFPSPESSCGTQSFGLLDPKLCYLLDGILFIYGVILTALFLRVKFSRSADAPAYQQGQNQLYNELNLGRREEYDVLDKRRGRDPEMGGKPQRRKNPQEGLYNELQKDKMAEAYSEIGMKGERRRGKGHDGLYQGLSTATKDTYDALHMQALPPR

SEQ ID NO: 13389 - protein, 1091 aa, Artificial Sequence
  Synthetic Polypeptide
MALPVTALLLPLALLLHAARPEVQLVESGGGLVQPGGSLRLSCAASGFSFSDFWMSWVRQAPGKGLEWVATISQAGSEKDYVDSVKGRFTISRDNAKKSLYLQMNSLRAEDTAVYYCASGVYSFDYRGQGTLVTVSSGTGGGGSGGGGSGGGGSEFDIVMTQSPDSLAVSLGERATINCRASKSVSTSGYSFMHWYQQKPGQPPKLLIYLASNLESGVPDRFSGSGSGTDFTLTISSLQAEDVAVYYCQHSREVPWTFGQGTKVEIKRLEDLKNVFPPEVAVFEPSEAEISHTQKATLVCLATGFYPDHVELSWWVNGKEVHSGVSTDPQPLKEQPALNDSRYCLSSRLRVSATFWQNPRNHFRCQVQFYGLSENDEWTQDRAKPVTQIVSAEAWGRADCGSQSFGLLDPKLCYLLDGILFIYGVILTALFLRVKFSRSADAPAYQQGQNQLYNELNLGRREEYDVLDKRRGRDPEMGGKPQRRKNPQEGLYNELQKDKMAEAYSEIGMKGERRRGKGHDGLYQGLSTATKDTYDALHMQALPPRRAKRSGSGATNFSLLKQAGDVEENPGPTSMDWIWRILFLVGAATGAHSGPQLQLQESGPGLVKPSETLSLTCTVSGDSISSGDYYWGWIRQPPGKGLEWIGHIYYSGVTYYNPSLKSRVTISVDTSRNQFSLKLSSVTAADTAVYYCTREDSSNWRSRGQGTLVTVSSGSGGGGSGGGGSGGGGSFEQVQLVQSGAEVKKPGASVKVSCKASGYTFTNYGMNWVRQAPGQGLEWMGWINTYTGEPTYADAFKGRFAFSLDTSTSTAYLQINSLRSDDTAVYYCARDYGDYGMDYWGQGTTVTVSSTRIQNPDPAVYQLRDSKSSDKSVCLFTDFDSQTNVSQSKDSDVYITDKTVLDMRSMDFKSNSAVAWSNKSDFACANAFNNSIIPEDTFFPSPESSCGTQSFGLLDPKLCYLLDGILFIYGVILTALFLRVKFSRSADAPAYQQGQNQLYNELNLGRREEYDVLDKRRGRDPEMGGKPQRRKNPQEGLYNELQKDKMAEAYSEIGMKGERRRGKGHDGLYQGLSTATKDTYDALHMQALPPR

SEQ ID NO: 13390 - protein, 1087 aa, Artificial Sequence
  Synthetic Polypeptide
MALPVTALLLPLALLLHAARPEVQLVESGGGLVQPGGSLRLSCAASGFSFSDFWMSWVRQAPGKGLEWVATISQAGSEKDYVDSVKGRFTISRDNAKKSLYLQMNSLRAEDTAVYYCASGVYSFDYRGQGTLVTVSSGTGGGGSGGGGSGGGGSEFDIVMTQTPLTLSVTIGQPASISCKSSQSLLDSDGKTYLNWLLQRPGQSPERLIYLVSKLDSGVPDRFTGSGSGTDFTLKISRVEAEDLGVYCCWQGTHFPYTFGGGTKVEIKGLEDLKNVFPPEVAVFEPSEAEISHTQKATLVCLATGFYPDHVELSWWVNGKEVHSGVSTDPQPLKEQPALNDSRYCLSSRLRVSATFWQNPRNHFRCQVQFYGLSENDEWTQDRAKPVTQIVSAEAWGRADCGSQSFGLLDPKLCYLLDGILFIYGVILTALFLRVKFSRSADAPAYQQGQNQLYNELNLGRREEYDVLDKRRGRDPEMGGKPQRRKNPQEGLYNELQKDKMAEAYSEIGMKGERRRGKGHDGLYQGLSTATKDTYDALHMQALPPRRAKRSGSGATNFSLLKQAGDVEENPGPTSMDWIWRILFLVGAATGAHSGPQLQLQESGPGLVKPSETLSLTCTVSGDSISSGDYYWGWIRQPPGKGLEWIGHIYYSGVTYYNPSLKSRVTISVDTSRNQFSLKLSSVTAADTAVYYCTREDSSNWRSRGQGTLVTVSSGSGGGGSGGGGSGGGGSFEQVQLQQPGAELVRPGASVKLSCKASGYTFTSYWMNWVKQRPGQGLEWIGMIDPSDSETHYNHIFKDKATLTVDKSSSTAYLQLSSLTSEDSAVYYCARNLYLWGQGTSVTVSSTRIQNPDPAVYQLRDSKSSDKSVCLFTDFDSQTNVSQSKDSDVYITDKTVLDMRSMDFKSNSAVAWSNKSDFACANAFNNSIIPEDTFFPSPESSCGTQSFGLLDPKLCYLLDGILFIYGVILTALFLRVKFSRSADAPAYQQGQNQLYNELNLGRREEYDVLDKRRGRDPEMGGKPQRRKNPQEGLYNELQKDKMAEAYSEIGMKGERRRGKGHDGLYQGLSTATKDTYDALHMQALPPR

SEQ ID NO: 13391 - protein, 1095 aa, Artificial Sequence
  Synthetic Polypeptide
MALPVTALLLPLALLLHAARPEVQLVESGGGLVQPGGSLRLSCAASGFSFSDFWMSWVRQAPGKGLEWVATISQAGSEKDYVDSVKGRFTISRDNAKKSLYLQMNSLRAEDTAVYYCASGVYSFDYRGQGTLVTVSSGTGGGGSGGGGSGGGGSEFDIVMTQSPDSLAVSLGERATINCESSQSLLNSGNQKNYLTWYQQKPGQPPKPLIYWASTRESGVPDRFSGSGSGTDFTLTISSLQAEDVAVYYCQNDYSYPYTFGQGTKLEIKRLEDLKNVFPPEVAVFEPSEAEISHTQKATLVCLATGFYPDHVELSWWVNGKEVHSGVSTDPQPLKEQPALNDSRYCLSSRLRVSATFWQNPRNHFRCQVQFYGLSENDEWTQDRAKPVTQIVSAEAWGRADCGSQSFGLLDPKLCYLLDGILFIYGVILTALFLRVKFSRSADAPAYQQGQNQLYNELNLGRREEYDVLDKRRGRDPEMGGKPQRRKNPQEGLYNELQKDKMAEAYSEIGMKGERRRGKGHDGLYQGLSTATKDTYDALHMQALPPRRAKRSGSGATNFSLLKQAGDVEENPGPTSMDWIWRILFLVGAATGAHSGPQLQLQESGPGLVKPSETLSLTCTVSGDSISSGDYYWGWIRQPPGKGLEWIGHIYYSGVTYYNPSLKSRVTISVDTSRNQFSLKLSSVTAADTAVYYCTREDSSNWRSRGQGTLVTVSSGSGGGGSGGGGSGGGGSFEEVQLVQSGAEVKKPGESLKISCKGSGYSFTDYYMKWARQMPGKGLEWMGDIIPSNGATFYNQKFKGQVTISADKSISTTYLQWSSLKASDTAMYYCARSHLLRASWFAYWGQGTMVTVSSTRIQNPDPAVYQLRDSKSSDKSVCLFTDFDSQTNVSQSKDSDVYITDKTVLDMRSMDFKSNSAVAWSNKSDFACANAFNNSIIPEDTFFPSPESSCGTQSFGLLDPKLCYLLDGILFIYGVILTALFLRVKFSRSADAPAYQQGQNQLYNELNLGRREEYDVLDKRRGRDPEMGGKPQRRKNPQEGLYNELQKDKMAEAYSEIGMKGERRRGKGHDGLYQGLSTATKDTYDALHMQALPPR

SEQ ID NO: 13392 - protein, 1090 aa, Artificial Sequence
  Synthetic Polypeptide
MALPVTALLLPLALLLHAARPEVQLVESGGGLVQPGGSLRLSCAASGFSFSDFWMSWVRQAPGKGLEWVATISQAGSEKDYVDSVKGRFTISRDNAKKSLYLQMNSLRAEDTAVYYCASGVYSFDYRGQGTLVTVSSGTGGGGSGGGGSGGGGSEFDIQMTQSTSSLSASLGDRVTISCSASQGINNYLNWYQQKPDGTVELLIYYTSTLQSGVPSRFSGSGSGTDYSLTISNLEPEDIGTYYCQQYSKLPRTFGGGTKLEIKLEDLKNVFPPEVAVFEPSEAEISHTQKATLVCLATGFYPDHVELSWWVNGKEVHSGVSTDPQPLKEQPALNDSRYCLSSRLRVSATFWQNPRNHFRCQVQFYGLSENDEWTQDRAKPVTQIVSAEAWGRADCGSQSFGLLDPKLCYLLDGILFIYGVILTALFLRVKFSRSADAPAYQQGQNQLYNELNLGRREEYDVLDKRRGRDPEMGGKPQRRKNPQEGLYNELQKDKMAEAYSEIGMKGERRRGKGHDGLYQGLSTATKDTYDALHMQALPPRRAKRSGSGATNFSLLKQAGDVEENPGPTSMDWIWRILFLVGAATGAHSGPQLQLQESGPGLVKPSETLSLTCTVSGDSISSGDYYWGWIRQPPGKGLEWIGHIYYSGVTYYNPSLKSRVTISVDTSRNQFSLKLSSVTAADTAVYYCTREDSSNWRSRGQGTLVTVSSGSGGGGSGGGGSGGGGSFEQVQLQQSGSELMMPGASVKISCKATGYTFSNYWIEWVKQRPGHGLEWIGEILPGTGRTIYNEKFKGKATFTADISSNTVQMQLSSLTSEDSAVYYCARRDYYGNFYYAMDYWGQGTSVTVSSTRIQNPDPAVYQLRDSKSSDKSVCLFTDFDSQTNVSQSKDSDVYITDKTVLDMRSMDFKSNSAVAWSNKSDFACANAFNNSIIPEDTFFPSPESSCGTQSFGLLDPKLCYLLDGILFIYGVILTALFLRVKFSRSADAPAYQQGQNQLYNELNLGRREEYDVLDKRRGRDPEMGGKPQRRKNPQEGLYNELQKDKMAEAYSEIGMKGERRRGKGHDGLYQGLSTATKDTYDALHMQALPPR

SEQ ID NO: 13393 - protein, 1085 aa, Artificial Sequence
  Synthetic Polypeptide
MALPVTALLLPLALLLHAARPEVQLVESGGGLVQPGGSLRLSCAASGFSFSDFWMSWVRQAPGKGLEWVATISQAGSEKDYVDSVKGRFTISRDNAKKSLYLQMNSLRAEDTAVYYCASGVYSFDYRGQGTLVTVSSGTGGGGSGGGGSGGGGSEFDIQMTQSPASLSVSVGETVTITCRASENIYSNLAWYQQKQGKSPQLLVYAATNLADGVPSRFSGSGSGTQYSLKINSLQSEDFGSYYCQHFWGTWTFGGGTTLEIKLEDLKNVFPPEVAVFEPSEAEISHTQKATLVCLATGFYPDHVELSWWVNGKEVHSGVSTDPQPLKEQPALNDSRYCLSSRLRVSATFWQNPRNHFRCQVQFYGLSENDEWTQDRAKPVTQIVSAEAWGRADCGSQSFGLLDPKLCYLLDGILFIYGVILTALFLRVKFSRSADAPAYQQGQNQLYNELNLGRREEYDVLDKRRGRDPEMGGKPQRRKNPQEGLYNELQKDKMAEAYSEIGMKGERRRGKGHDGLYQGLSTATKDTYDALHMQALPPRRAKRSGSGATNFSLLKQAGDVEENPGPTSMDWIWRILFLVGAATGAHSGPQLQLQESGPGLVKPSETLSLTCTVSGDSISSGDYYWGWIRQPPGKGLEWIGHIYYSGVTYYNPSLKSRVTISVDTSRNQFSLKLSSVTAADTAVYYCTREDSSNWRSRGQGTLVTVSSGSGGGGSGGGGSGGGGSFEEVQLQQSGPELVKPGASVKMSCKASGYTFTDYYMKWMKQSHGKSLEWIGDINPNNGGTTYNQKFKGKATLTVDKSSSTAYMQLNSLTSEDSAVYYCARDYGYGYFDYWGQGTTLTVSSTRIQNPDPAVYQLRDSKSSDKSVCLFTDFDSQTNVSQSKDSDVYITDKTVLDMRSMDFKSNSAVAWSNKSDFACANAFNNSIIPEDTFFPSPESSCGTQSFGLLDPKLCYLLDGILFIYGVILTALFLRVKFSRSADAPAYQQGQNQLYNELNLGRREEYDVLDKRRGRDPEMGGKPQRRKNPQEGLYNELQKDKMAEAYSEIGMKGERRRGKGHDGLYQGLSTATKDTYDALHMQALPPR

SEQ ID NO: 13394 - protein, 1088 aa, Artificial Sequence
  Synthetic Polypeptide
MALPVTALLLPLALLLHAARPEVQLVESGGGLVQPGGSLRLSCAASGFSFSDFWMSWVRQAPGKGLEWVATISQAGSEKDYVDSVKGRFTISRDNAKKSLYLQMNSLRAEDTAVYYCASGVYSFDYRGQGTLVTVSSGTGGGGSGGGGSGGGGSEFEIVLTQSPGTLSLSPGERATLSCRASQSVGGYLAWYQQKPGQAPRLLIYDASNRATGIPARFSGSGSGTDFTLTISSLEPEDFAVYYCQQRNNWPPMYTFGQGTKLEIKRLEDLKNVFPPEVAVFEPSEAEISHTQKATLVCLATGFYPDHVELSWWVNGKEVHSGVSTDPQPLKEQPALNDSRYCLSSRLRVSATFWQNPRNHFRCQVQFYGLSENDEWTQDRAKPVTQIVSAEAWGRADCGSQSFGLLDPKLCYLLDGILFIYGVILTALFLRVKFSRSADAPAYQQGQNQLYNELNLGRREEYDVLDKRRGRDPEMGGKPQRRKNPQEGLYNELQKDKMAEAYSEIGMKGERRRGKGHDGLYQGLSTATKDTYDALHMQALPPRRAKRSGSGATNFSLLKQAGDVEENPGPTSMDWIWRILFLVGAATGAHSGPQLQLQESGPGLVKPSETLSLTCTVSGDSISSGDYYWGWIRQPPGKGLEWIGHIYYSGVTYYNPSLKSRVTISVDTSRNQFSLKLSSVTAADTAVYYCTREDSSNWRSRGQGTLVTVSSGSGGGGSGGGGSGGGGSFEQVQLVQSGAEVKKPGSSVKVSCKASGGTFSSYAISWVRQAPGQGLEWMGGIIPILGTANYAQKFQGRVTITADESTSTAYMELSSLRSEDTAVYYCARWGGGAFDIWGQGTMVTVSSTRIQNPDPAVYQLRDSKSSDKSVCLFTDFDSQTNVSQSKDSDVYITDKTVLDMRSMDFKSNSAVAWSNKSDFACANAFNNSIIPEDTFFPSPESSCGTQSFGLLDPKLCYLLDGILFIYGVILTALFLRVKFSRSADAPAYQQGQNQLYNELNLGRREEYDVLDKRRGRDPEMGGKPQRRKNPQEGLYNELQKDKMAEAYSEIGMKGERRRGKGHDGLYQGLSTATKDTYDALHMQALPPR

SEQ ID NO: 13395 - protein, 1083 aa, Artificial Sequence
  Synthetic Polypeptide
MALPVTALLLPLALLLHAARPEVQLVESGGGLVQPGGSLRLSCAASGFSFSDFWMSWVRQAPGKGLEWVATISQAGSEKDYVDSVKGRFTISRDNAKKSLYLQMNSLRAEDTAVYYCASGVYSFDYRGQGTLVTVSSGTGGGGSGGGGSGGGGSEFQIVLTQSPALMSASPGEKVTMTCSASSSVRYMYWYQQKPRSSPKPWIHLTSNLASGVPARFSGSGSGTSYSLTISSMEAEDAATYYCQQWSSHPFTFGSGTKLEIKLEDLKNVFPPEVAVFEPSEAEISHTQKATLVCLATGFYPDHVELSWWVNGKEVHSGVSTDPQPLKEQPALNDSRYCLSSRLRVSATFWQNPRNHFRCQVQFYGLSENDEWTQDRAKPVTQIVSAEAWGRADCGSQSFGLLDPKLCYLLDGILFIYGVILTALFLRVKFSRSADAPAYQQGQNQLYNELNLGRREEYDVLDKRRGRDPEMGGKPQRRKNPQEGLYNELQKDKMAEAYSEIGMKGERRRGKGHDGLYQGLSTATKDTYDALHMQALPPRRAKRSGSGATNFSLLKQAGDVEENPGPTSMDWIWRILFLVGAATGAHSGPQLQLQESGPGLVKPSETLSLTCTVSGDSISSGDYYWGWIRQPPGKGLEWIGHIYYSGVTYYNPSLKSRVTISVDTSRNQFSLKLSSVTAADTAVYYCTREDSSNWRSRGQGTLVTVSSGSGGGGSGGGGSGGGGSFEDVQLQESGPGLVKPSQSLSLTCTVTGFSITSDYSWNWIRQFPGNKLEWMGYISYSGHTSYNPSLESRISITRDTSKNQFFLQLNSVTTEDTATYYCTRGNWDVVYWGQGTLVTVSATRIQNPDPAVYQLRDSKSSDKSVCLFTDFDSQTNVSQSKDSDVYITDKTVLDMRSMDFKSNSAVAWSNKSDFACANAFNNSIIPEDTFFPSPESSCGTQSFGLLDPKLCYLLDGILFIYGVILTALFLRVKFSRSADAPAYQQGQNQLYNELNLGRREEYDVLDKRRGRDPEMGGKPQRRKNPQEGLYNELQKDKMAEAYSEIGMKGERRRGKGHDGLYQGLSTATKDTYDALHMQALPPR

SEQ ID NO: 13396 - protein, 1093 aa, Artificial Sequence
  Synthetic Polypeptide
MALPVTALLLPLALLLHAARPEVQLVESGGGLVQPGGSLRLSCAASGFSFSDFWMSWVRQAPGKGLEWVATISQAGSEKDYVDSVKGRFTISRDNAKKSLYLQMNSLRAEDTAVYYCASGVYSFDYRGQGTLVTVSSGTGGGGSGGGGSGGGGSEFDVVMTQSPLSLPVTLGQPASISCRSSQSIVHSDGNTYLEWYQQRPGQSPRRLIYKVSNRFSGVPDRFSGSGSGTDFTLKISRVEAEDVGVYYCFQGSHAPWTFGGGTKVEIKLEDLKNVFPPEVAVFEPSEAEISHTQKATLVCLATGFYPDHVELSWWVNGKEVHSGVSTDPQPLKEQPALNDSRYCLSSRLRVSATFWQNPRNHFRCQVQFYGLSENDEWTQDRAKPVTQIVSAEAWGRADCGSQSFGLLDPKLCYLLDGILFIYGVILTALFLRVKFSRSADAPAYQQGQNQLYNELNLGRREEYDVLDKRRGRDPEMGGKPQRRKNPQEGLYNELQKDKMAEAYSEIGMKGERRRGKGHDGLYQGLSTATKDTYDALHMQALPPRRAKRSGSGATNFSLLKQAGDVEENPGPTSMDWIWRILFLVGAATGAHSGPQLQLQESGPGLVKPSETLSLTCTVSGDSISSGDYYWGWIRQPPGKGLEWIGHIYYSGVTYYNPSLKSRVTISVDTSRNQFSLKLSSVTAADTAVYYCTREDSSNWRSRGQGTLVTVSSGSGGGGSGGGGSGGGGSFEEVQLVESGGGLVQPGGSLRLSCAASGFTFSSYGMHWVRQAPGKGLEWVAYITTRSSTIYYADSVKGRFTISRDNAKNSLYLQMNSLRAEDTAVYYCTREPLTGYYAMDYWGQGTSVTVSSTRIQNPDPAVYQLRDSKSSDKSVCLFTDFDSQTNVSQSKDSDVYITDKTVLDMRSMDFKSNSAVAWSNKSDFACANAFNNSIIPEDTFFPSPESSCGTQSFGLLDPKLCYLLDGILFIYGVILTALFLRVKFSRSADAPAYQQGQNQLYNELNLGRREEYDVLDKRRGRDPEMGGKPQRRKNPQEGLYNELQKDKMAEAYSEIGMKGERRRGKGHDGLYQGLSTATKDTYDALHMQALPPR

SEQ ID NO: 13397 - protein, 1085 aa, Artificial Sequence
  Synthetic Polypeptide
MALPVTALLLPLALLLHAARPEVQLVESGGGLVQPGGSLRLSCAASGFSFSDFWMSWVRQAPGKGLEWVATISQAGSEKDYVDSVKGRFTISRDNAKKSLYLQMNSLRAEDTAVYYCASGVYSFDYRGQGTLVTVSSGTGGGGSGGGGSGGGGSEFDIQMTQSPSSLSASVGDRVTITCRASQSISLWLNWYQQKPGKAPKLLIYAASTLQSGVPSRFSGSGSGTDFTLTISSLQPEDFATYYCQQYYTSPYTFGQGTKVEIKRLEDLKNVFPPEVAVFEPSEAEISHTQKATLVCLATGFYPDHVELSWWVNGKEVHSGVSTDPQPLKEQPALNDSRYCLSSRLRVSATFWQNPRNHFRCQVQFYGLSENDEWTQDRAKPVTQIVSAEAWGRADCGSQSFGLLDPKLCYLLDGILFIYGVILTALFLRVKFSRSADAPAYQQGQNQLYNELNLGRREEYDVLDKRRGRDPEMGGKPQRRKNPQEGLYNELQKDKMAEAYSEIGMKGERRRGKGHDGLYQGLSTATKDTYDALHMQALPPRRAKRSGSGATNFSLLKQAGDVEENPGPTSMDWIWRILFLVGAATGAHSGPQLQLQESGPGLVKPSETLSLTCTVSGDSISSGDYYWGWIRQPPGKGLEWIGHIYYSGVTYYNPSLKSRVTISVDTSRNQFSLKLSSVTAADTAVYYCTREDSSNWRSRGQGTLVTVSSGSGGGGSGGGGSGGGGSFEQVQLLESGGGLVQPGGSLRLSCAASGFTFSSYAMSWVRQAPGKGLEWVSVIRSSGSSTYYADSVKGRFTISRDNSKNTLYLQMNSLRAEDTAVYYCARGGGYFDYWGQGTLVTVSSTRIQNPDPAVYQLRDSKSSDKSVCLFTDFDSQTNVSQSKDSDVYITDKTVLDMRSMDFKSNSAVAWSNKSDFACANAFNNSIIPEDTFFPSPESSCGTQSFGLLDPKLCYLLDGILFIYGVILTALFLRVKFSRSADAPAYQQGQNQLYNELNLGRREEYDVLDKRRGRDPEMGGKPQRRKNPQEGLYNELQKDKMAEAYSEIGMKGERRRGKGHDGLYQGLSTATKDTYDALHMQALPPR

SEQ ID NO: 13398 - protein, 1088 aa, Artificial Sequence
  Synthetic Polypeptide
MALPVTALLLPLALLLHAARPEVQLVESGGGLVQPGGSLRLSCAASGFSFSDFWMSWVRQAPGKGLEWVATISQAGSEKDYVDSVKGRFTISRDNAKKSLYLQMNSLRAEDTAVYYCASGVYSFDYRGQGTLVTVSSGTGGGGSGGGGSGGGGSEFDIQMTQSPSSLSASVGDRVTITCRASQSISSYLNWYQQKPGKAPKLLIYAVSTLQSGVPSRFSGSGSGTDFTLTISSLQPEDFATYYCQQSGTFPPTTFGQGTKVEIKRLEDLKNVFPPEVAVFEPSEAEISHTQKATLVCLATGFYPDHVELSWWVNGKEVHSGVSTDPQPLKEQPALNDSRYCLSSRLRVSATFWQNPRNHFRCQVQFYGLSENDEWTQDRAKPVTQIVSAEAWGRADCGSQSFGLLDPKLCYLLDGILFIYGVILTALFLRVKFSRSADAPAYQQGQNQLYNELNLGRREEYDVLDKRRGRDPEMGGKPQRRKNPQEGLYNELQKDKMAEAYSEIGMKGERRRGKGHDGLYQGLSTATKDTYDALHMQALPPRRAKRSGSGATNFSLLKQAGDVEENPGPTSMDWIWRILFLVGAATGAHSGPQLQLQESGPGLVKPSETLSLTCTVSGDSISSGDYYWGWIRQPPGKGLEWIGHIYYSGVTYYNPSLKSRVTISVDTSRNQFSLKLSSVTAADTAVYYCTREDSSNWRSRGQGTLVTVSSGSGGGGSGGGGSGGGGSFEQVQLLESGGGLVQPGGSLRLSCAASGFTFSSHGMHWVRQAPGKGLEWVSVISGSGSNTGYADSVKGRFTISRDNSKNTLYLQMNSLRAEDTAVYYCARQWGSYAFDSWGQGTLVTVSSTRIQNPDPAVYQLRDSKSSDKSVCLFTDFDSQTNVSQSKDSDVYITDKTVLDMRSMDFKSNSAVAWSNKSDFACANAFNNSIIPEDTFFPSPESSCGTQSFGLLDPKLCYLLDGILFIYGVILTALFLRVKFSRSADAPAYQQGQNQLYNELNLGRREEYDVLDKRRGRDPEMGGKPQRRKNPQEGLYNELQKDKMAEAYSEIGMKGERRRGKGHDGLYQGLSTATKDTYDALHMQALPPR

SEQ ID NO: 13399 - protein, 1098 aa, Artificial Sequence
  Synthetic Polypeptide
MALPVTALLLPLALLLHAARPEVQLVESGGGLVQPGGSLRLSCAASGFSFSDFWMSWVRQAPGKGLEWVATISQAGSEKDYVDSVKGRFTISRDNAKKSLYLQMNSLRAEDTAVYYCASGVYSFDYRGQGTLVTVSSGTGGGGSGGGGSGGGGSEFDIVMSQSPSSLAVSVGEKVTMSCKSSQSLLHSSNQKNYLAWYQQKPGQSPKVLIYWASTRESGVPDRFTGSGSGTDFTLTITSVKSEDLAVYYCQQYYSYPWTFGGGTRLEIKRLEDLKNVFPPEVAVFEPSEAEISHTQKATLVCLATGFYPDHVELSWWVNGKEVHSGVSTDPQPLKEQPALNDSRYCLSSRLRVSATFWQNPRNHFRCQVQFYGLSENDEWTQDRAKPVTQIVSAEAWGRADCGSQSFGLLDPKLCYLLDGILFIYGVILTALFLRVKFSRSADAPAYQQGQNQLYNELNLGRREEYDVLDKRRGRDPEMGGKPQRRKNPQEGLYNELQKDKMAEAYSEIGMKGERRRGKGHDGLYQGLSTATKDTYDALHMQALPPRRAKRSGSGATNFSLLKQAGDVEENPGPTSMDWIWRILFLVGAATGAHSGPQLQLQESGPGLVKPSETLSLTCTVSGDSISSGDYYWGWIRQPPGKGLEWIGHIYYSGVTYYNPSLKSRVTISVDTSRNQFSLKLSSVTAADTAVYYCTREDSSNWRSRGQGTLVTVSSGSGGGGSGGGGSGGGGSFEEVQLQQSVAELVKPGASVKMSCKVSGYTLTDHTIHWMKQRPEQGLEWIGYIYPRDGITGYNEKFKGKATLTADTSSSTAYMQLNSLTSEDSAVYFCARWGYSYRNYAYYYDYWGQGTTLTVSSTRIQNPDPAVYQLRDSKSSDKSVCLFTDFDSQTNVSQSKDSDVYITDKTVLDMRSMDFKSNSAVAWSNKSDFACANAFNNSIIPEDTFFPSPESSCGTQSFGLLDPKLCYLLDGILFIYGVILTALFLRVKFSRSADAPAYQQGQNQLYNELNLGRREEYDVLDKRRGRDPEMGGKPQRRKNPQEGLYNELQKDKMAEAYSEIGMKGERRRGKGHDGLYQGLSTATKDTYDALHMQALPPR

SEQ ID NO: 13400 - protein, 1095 aa, Artificial Sequence
  Synthetic Polypeptide
MALPVTALLLPLALLLHAARPEVQLVESGGGLVQPGGSLRLSCAASGFSFSDFWMSWVRQAPGKGLEWVATISQAGSEKDYVDSVKGRFTISRDNAKKSLYLQMNSLRAEDTAVYYCASGVYSFDYRGQGTLVTVSSGTGGGGSGGGGSGGGGSEFEIVLTQSPGTLSLSPGERATLSCRASQSVSSSYLAWYQQKPGQAPRLLIYGTSSRATGIPDRFSGSGSGTDFTLTISRLEPEDFAVYYCQQYGSSPFTFGGGTKVEIKRLEDLKNVFPPEVAVFEPSEAEISHTQKATLVCLATGFYPDHVELSWWVNGKEVHSGVSTDPQPLKEQPALNDSRYCLSSRLRVSATFWQNPRNHFRCQVQFYGLSENDEWTQDRAKPVTQIVSAEAWGRADCGSQSFGLLDPKLCYLLDGILFIYGVILTALFLRVKFSRSADAPAYQQGQNQLYNELNLGRREEYDVLDKRRGRDPEMGGKPQRRKNPQEGLYNELQKDKMAEAYSEIGMKGERRRGKGHDGLYQGLSTATKDTYDALHMQALPPRRAKRSGSGATNFSLLKQAGDVEENPGPTSMDWIWRILFLVGAATGAHSGPQLQLQESGPGLVKPSETLSLTCTVSGDSISSGDYYWGWIRQPPGKGLEWIGHIYYSGVTYYNPSLKSRVTISVDTSRNQFSLKLSSVTAADTAVYYCTREDSSNWRSRGQGTLVTVSSGSGGGGSGGGGSGGGGSFEQVQLQESGPGLAKPSETLSLTCTVSGDSITSYYWSWIRQPPGKGLEWIGYIYYSGSTNYNPSLKSRVTISVDTSKNQFSLKLSSVTAADTAVYYCARDQRRIAAAGTHFYGMDVWGQGTTVTVSSTRIQNPDPAVYQLRDSKSSDKSVCLFTDFDSQTNVSQSKDSDVYITDKTVLDMRSMDFKSNSAVAWSNKSDFACANAFNNSIIPEDTFFPSPESSCGTQSFGLLDPKLCYLLDGILFIYGVILTALFLRVKFSRSADAPAYQQGQNQLYNELNLGRREEYDVLDKRRGRDPEMGGKPQRRKNPQEGLYNELQKDKMAEAYSEIGMKGERRRGKGHDGLYQGLSTATKDTYDALHMQALPPR

SEQ ID NO: 13401 - protein, 1087 aa, Artificial Sequence
  Synthetic Polypeptide
MALPVTALLLPLALLLHAARPEVQLVESGGGLVQPGGSLRLSCAASGFSFSDFWMSWVRQAPGKGLEWVATISQAGSEKDYVDSVKGRFTISRDNAKKSLYLQMNSLRAEDTAVYYCASGVYSFDYRGQGTLVTVSSGTGGGGSGGGGSGGGGSEFDILLTQSPVILSVSPGERVSFSCRASQSIGTNIHWYQQRTNGSPRLLIKYASESISGIPSRFSGSGSGTDFTLSINSVESEDIADYYCQQNNNWPTTFGAGTKLELKLEDLKNVFPPEVAVFEPSEAEISHTQKATLVCLATGFYPDHVELSWWVNGKEVHSGVSTDPQPLKEQPALNDSRYCLSSRLRVSATFWQNPRNHFRCQVQFYGLSENDEWTQDRAKPVTQIVSAEAWGRADCGSQSFGLLDPKLCYLLDGILFIYGVILTALFLRVKFSRSADAPAYQQGQNQLYNELNLGRREEYDVLDKRRGRDPEMGGKPQRRKNPQEGLYNELQKDKMAEAYSEIGMKGERRRGKGHDGLYQGLSTATKDTYDALHMQALPPRRAKRSGSGATNFSLLKQAGDVEENPGPTSMDWIWRILFLVGAATGAHSGPQLQLQESGPGLVKPSETLSLTCTVSGDSISSGDYYWGWIRQPPGKGLEWIGHIYYSGVTYYNPSLKSRVTISVDTSRNQFSLKLSSVTAADTAVYYCTREDSSNWRSRGQGTLVTVSSGSGGGGSGGGGSGGGGSFEQVQLKQSGPGLVQPSQSLSITCTVSGFSLTNYGVHWVRQSPGKGLEWLGVIWSGGNTDYNTPFTSRLSINKDNSKSQVFFKMNSLQSNDTAIYYCARALTYYDYEFAYWGQGTLVTVSATRIQNPDPAVYQLRDSKSSDKSVCLFTDFDSQTNVSQSKDSDVYITDKTVLDMRSMDFKSNSAVAWSNKSDFACANAFNNSIIPEDTFFPSPESSCGTQSFGLLDPKLCYLLDGILFIYGVILTALFLRVKFSRSADAPAYQQGQNQLYNELNLGRREEYDVLDKRRGRDPEMGGKPQRRKNPQEGLYNELQKDKMAEAYSEIGMKGERRRGKGHDGLYQGLSTATKDTYDALHMQALPPR

SEQ ID NO: 13402 - protein, 1080 aa, Artificial Sequence
  Synthetic Polypeptide
MALPVTALLLPLALLLHAARPEVQLVESGGGLVQPGGSLRLSCAASGFSFSDFWMSWVRQAPGKGLEWVATISQAGSEKDYVDSVKGRFTISRDNAKKSLYLQMNSLRAEDTAVYYCASGVYSFDYRGQGTLVTVSSGTGGGGSGGGGSGGGGSEFMTQSPKFLLVSAGDRVTLTCKASQSVNNDVYWYQQEPGQSPKLLIYWASTRESGVPDRFTGSGSGTDFTLTISSVQAEDLAVYYCKQSYNLYTFGGGTKLEIKRLEDLKNVFPPEVAVFEPSEAEISHTQKATLVCLATGFYPDHVELSWWVNGKEVHSGVSTDPQPLKEQPALNDSRYCLSSRLRVSATFWQNPRNHFRCQVQFYGLSENDEWTQDRAKPVTQIVSAEAWGRADCGSQSFGLLDPKLCYLLDGILFIYGVILTALFLRVKFSRSADAPAYQQGQNQLYNELNLGRREEYDVLDKRRGRDPEMGGKPQRRKNPQEGLYNELQKDKMAEAYSEIGMKGERRRGKGHDGLYQGLSTATKDTYDALHMQALPPRRAKRSGSGATNFSLLKQAGDVEENPGPTSMDWIWRILFLVGAATGAHSGPQLQLQESGPGLVKPSETLSLTCTVSGDSISSGDYYWGWIRQPPGKGLEWIGHIYYSGVTYYNPSLKSRVTISVDTSRNQFSLKLSSVTAADTAVYYCTREDSSNWRSRGQGTLVTVSSGSGGGGSGGGGSGGGGSFEESGRGLVQPGGSRKLSCAASGFTFSTSGMHWVRQAPEKGLEWVAYISSGSTTIYHADTVKGRFTISRDNPKNTLFLQMTSLRSEDTAMYYCCARSGQFGNYFDYWGQGTTLTVSSTRIQNPDPAVYQLRDSKSSDKSVCLFTDFDSQTNVSQSKDSDVYITDKTVLDMRSMDFKSNSAVAWSNKSDFACANAFNNSIIPEDTFFPSPESSCGTQSFGLLDPKLCYLLDGILFIYGVILTALFLRVKFSRSADAPAYQQGQNQLYNELNLGRREEYDVLDKRRGRDPEMGGKPQRRKNPQEGLYNELQKDKMAEAYSEIGMKGERRRGKGHDGLYQGLSTATKDTYDALHMQALPPR

SEQ ID NO: 13403 - protein, 1085 aa, Artificial Sequence
  Synthetic Polypeptide
MALPVTALLLPLALLLHAARPEVQLVESGGGLVQPGGSLRLSCAASGFSFSDFWMSWVRQAPGKGLEWVATISQAGSEKDYVDSVKGRFTISRDNAKKSLYLQMNSLRAEDTAVYYCASGVYSFDYRGQGTLVTVSSGTGGGGSGGGGSGGGGSEFQSPSSLAVSAGEKVTMSCKSSQSLLNSRTRKNYLAWYQQKPGQSPKLLIYWASTRESGVPDRFTGSGSGTDFTLTISSVQAEDLAVYYCKQSNLYTFGGGTKLEIKLEDLKNVFPPEVAVFEPSEAEISHTQKATLVCLATGFYPDHVELSWWVNGKEVHSGVSTDPQPLKEQPALNDSRYCLSSRLRVSATFWQNPRNHFRCQVQFYGLSENDEWTQDRAKPVTQIVSAEAWGRADCGSQSFGLLDPKLCYLLDGILFIYGVILTALFLRVKFSRSADAPAYQQGQNQLYNELNLGRREEYDVLDKRRGRDPEMGGKPQRRKNPQEGLYNELQKDKMAEAYSEIGMKGERRRGKGHDGLYQGLSTATKDTYDALHMQALPPRRAKRSGSGATNFSLLKQAGDVEENPGPTSMDWIWRILFLVGAATGAHSGPQLQLQESGPGLVKPSETLSLTCTVSGDSISSGDYYWGWIRQPPGKGLEWIGHIYYSGVTYYNPSLKSRVTISVDTSRNQFSLKLSSVTAADTAVYYCTREDSSNWRSRGQGTLVTVSSGSGGGGSGGGGSGGGGSFEQVQLEESGPELVKPGASVKLSCKASGYTFTEYIIHWVKQRSGQGLEWIGWFYPGSGSIKYNEKFKDKATLTADKSSSTVYMELSGLTSEDSAVYFCARHDGYSYFDYWGQGTTLTVSSTRIQNPDPAVYQLRDSKSSDKSVCLFTDFDSQTNVSQSKDSDVYITDKTVLDMRSMDFKSNSAVAWSNKSDFACANAFNNSIIPEDTFFPSPESSCGTQSFGLLDPKLCYLLDGILFIYGVILTALFLRVKFSRSADAPAYQQGQNQLYNELNLGRREEYDVLDKRRGRDPEMGGKPQRRKNPQEGLYNELQKDKMAEAYSEIGMKGERRRGKGHDGLYQGLSTATKDTYDALHMQALPPR

SEQ ID NO: 13404 - protein, 1088 aa, Artificial Sequence
  Synthetic Polypeptide
MALPVTALLLPLALLLHAARPEVQLVESGGGLVQPGGSLRLSCAASGFSFSDFWMSWVRQAPGKGLEWVATISQAGSEKDYVDSVKGRFTISRDNAKKSLYLQMNSLRAEDTAVYYCASGVYSFDYRGQGTLVTVSSGTGGGGSGGGGSGGGGSEFDIQMTQSPSSLSASLGERVSLTCRATQELSGYLSWLQQKPDGTIKRLIYAASTLDSGVPKRFSGNRSGSDYSLTISSLESEDFADYYCLQYAIYPYTFGGGTKLEIKLEDLKNVFPPEVAVFEPSEAEISHTQKATLVCLATGFYPDHVELSWWVNGKEVHSGVSTDPQPLKEQPALNDSRYCLSSRLRVSATFWQNPRNHFRCQVQFYGLSENDEWTQDRAKPVTQIVSAEAWGRADCGSQSFGLLDPKLCYLLDGILFIYGVILTALFLRVKFSRSADAPAYQQGQNQLYNELNLGRREEYDVLDKRRGRDPEMGGKPQRRKNPQEGLYNELQKDKMAEAYSEIGMKGERRRGKGHDGLYQGLSTATKDTYDALHMQALPPRRAKRSGSGATNFSLLKQAGDVEENPGPTSMDWIWRILFLVGAATGAHSGPQLQLQESGPGLVKPSETLSLTCTVSGDSISSGDYYWGWIRQPPGKGLEWIGHIYYSGVTYYNPSLKSRVTISVDTSRNQFSLKLSSVTAADTAVYYCTREDSSNWRSRGQGTLVTVSSGSGGGGSGGGGSGGGGSFEEVQLQQSGPELVKPGASVKMSCKASGYTFTSYFIHWVKQKPGQGLEWIGFINPYNDGSKYNEKFKGKATLTSDKSSSTAYMELSSLTSEDSAVYYCTRDDGYYGYAMDYWGQGTSVTVSSTRIQNPDPAVYQLRDSKSSDKSVCLFTDFDSQTNVSQSKDSDVYITDKTVLDMRSMDFKSNSAVAWSNKSDFACANAFNNSIIPEDTFFPSPESSCGTQSFGLLDPKLCYLLDGILFIYGVILTALFLRVKFSRSADAPAYQQGQNQLYNELNLGRREEYDVLDKRRGRDPEMGGKPQRRKNPQEGLYNELQKDKMAEAYSEIGMKGERRRGKGHDGLYQGLSTATKDTYDALHMQALPPR

SEQ ID NO: 13405 - protein, 1093 aa, Artificial Sequence
  Synthetic Polypeptide
MALPVTALLLPLALLLHAARPEVQLVESGGGLVQPGGSLRLSCAASGFSFSDFWMSWVRQAPGKGLEWVATISQAGSEKDYVDSVKGRFTISRDNAKKSLYLQMNSLRAEDTAVYYCASGVYSFDYRGQGTLVTVSSGTGGGGSGGGGSGGGGSEFDTIVLTQSPASLAVSLGQRATISCRASESVDSYGNSFMHWYQQKPGQPPKLLIYLASNLESGVPARFSGSGSRTDFTLTIDPVEADDAATYYCQQNNYDPWTFGGGTKLEIKLEDLKNVFPPEVAVFEPSEAEISHTQKATLVCLATGFYPDHVELSWWVNGKEVHSGVSTDPQPLKEQPALNDSRYCLSSRLRVSATFWQNPRNHFRCQVQFYGLSENDEWTQDRAKPVTQIVSAEAWGRADCGSQSFGLLDPKLCYLLDGILFIYGVILTALFLRVKFSRSADAPAYQQGQNQLYNELNLGRREEYDVLDKRRGRDPEMGGKPQRRKNPQEGLYNELQKDKMAEAYSEIGMKGERRRGKGHDGLYQGLSTATKDTYDALHMQALPPRRAKRSGSGATNFSLLKQAGDVEENPGPTSMDWIWRILFLVGAATGAHSGPQLQLQESGPGLVKPSETLSLTCTVSGDSISSGDYYWGWIRQPPGKGLEWIGHIYYSGVTYYNPSLKSRVTISVDTSRNQFSLKLSSVTAADTAVYYCTREDSSNWRSRGQGTLVTVSSGSGGGGSGGGGSGGGGSFEEVQLQQSGPELVKPGASVKMSCKASGYTFTSYVMHWVKQKPGQGLEWIGYINPYNDGTKYNEKFKGKATLTSDTSSSTAYMELNSLTSEDSAVYFCARPIYFDNDYFDYWGQGTTLKVSSTRIQNPDPAVYQLRDSKSSDKSVCLFTDFDSQTNVSQSKDSDVYITDKTVLDMRSMDFKSNSAVAWSNKSDFACANAFNNSIIPEDTFFPSPESSCGTQSFGLLDPKLCYLLDGILFIYGVILTALFLRVKFSRSADAPAYQQGQNQLYNELNLGRREEYDVLDKRRGRDPEMGGKPQRRKNPQEGLYNELQKDKMAEAYSEIGMKGERRRGKGHDGLYQGLSTATKDTYDALHMQALPPR

SEQ ID NO: 13406 - protein, 1088 aa, Artificial Sequence
  Synthetic Polypeptide
MALPVTALLLPLALLLHAARPEVQLVESGGGLVQPGGSLRLSCAASGFSFSDFWMSWVRQAPGKGLEWVATISQAGSEKDYVDSVKGRFTISRDNAKKSLYLQMNSLRAEDTAVYYCASGVYSFDYRGQGTLVTVSSGTGGGGSGGGGSGGGGSEFDIQMTQSPSSLSASVGDRVTITCKASQDVGIAVAWYQQKPGKVPKLLIYWASTRHTGVPDRFSGSGSGTDFTLTISSLQPEDVATYYCQQYSSYPYTFGQGTKVEIKRLEDLKNVFPPEVAVFEPSEAEISHTQKATLVCLATGFYPDHVELSWWVNGKEVHSGVSTDPQPLKEQPALNDSRYCLSSRLRVSATFWQNPRNHFRCQVQFYGLSENDEWTQDRAKPVTQIVSAEAWGRADCGSQSFGLLDPKLCYLLDGILFIYGVILTALFLRVKFSRSADAPAYQQGQNQLYNELNLGRREEYDVLDKRRGRDPEMGGKPQRRKNPQEGLYNELQKDKMAEAYSEIGMKGERRRGKGHDGLYQGLSTATKDTYDALHMQALPPRRAKRSGSGATNFSLLKQAGDVEENPGPTSMDWIWRILFLVGAATGAHSGPQLQLQESGPGLVKPSETLSLTCTVSGDSISSGDYYWGWIRQPPGKGLEWIGHIYYSGVTYYNPSLKSRVTISVDTSRNQFSLKLSSVTAADTAVYYCTREDSSNWRSRGQGTLVTVSSGSGGGGSGGGGSGGGGSFEEVQLVESGGGLVQPGGSLRLSCAASGFDFSRYWMSWVRQAPGKGLEWIGEINPDSSTINYAPSLKDKFIISRDNAKNSLYLQMNSLRAEDTAVYYCARPDGNYWYFDVWGQGTLVTVSSTRIQNPDPAVYQLRDSKSSDKSVCLFTDFDSQTNVSQSKDSDVYITDKTVLDMRSMDFKSNSAVAWSNKSDFACANAFNNSIIPEDTFFPSPESSCGTQSFGLLDPKLCYLLDGILFIYGVILTALFLRVKFSRSADAPAYQQGQNQLYNELNLGRREEYDVLDKRRGRDPEMGGKPQRRKNPQEGLYNELQKDKMAEAYSEIGMKGERRRGKGHDGLYQGLSTATKDTYDALHMQALPPR

SEQ ID NO: 13407 - protein, 1088 aa, Artificial Sequence
  Synthetic Polypeptide
MALPVTALLLPLALLLHAARPEVQLVESGGGLVQPGGSLRLSCAASGFSFSDFWMSWVRQAPGKGLEWVATISQAGSEKDYVDSVKGRFTISRDNAKKSLYLQMNSLRAEDTAVYYCASGVYSFDYRGQGTLVTVSSGTGGGGSGGGGSGGGGSEFDIVMTQSQKSMSTSVGDRVSITCKASQDVITGVAWYQQKPGQSPKLLIYSASYRYTGVPDRFTGSGSGTDFTFTISNVQAEDLAVYYCQQHYSTPLTFGAGTKLELKLEDLKNVFPPEVAVFEPSEAEISHTQKATLVCLATGFYPDHVELSWWVNGKEVHSGVSTDPQPLKEQPALNDSRYCLSSRLRVSATFWQNPRNHFRCQVQFYGLSENDEWTQDRAKPVTQIVSAEAWGRADCGSQSFGLLDPKLCYLLDGILFIYGVILTALFLRVKFSRSADAPAYQQGQNQLYNELNLGRREEYDVLDKRRGRDPEMGGKPQRRKNPQEGLYNELQKDKMAEAYSEIGMKGERRRGKGHDGLYQGLSTATKDTYDALHMQALPPRRAKRSGSGATNFSLLKQAGDVEENPGPTSMDWIWRILFLVGAATGAHSGPQLQLQESGPGLVKPSETLSLTCTVSGDSISSGDYYWGWIRQPPGKGLEWIGHIYYSGVTYYNPSLKSRVTISVDTSRNQFSLKLSSVTAADTAVYYCTREDSSNWRSRGQGTLVTVSSGSGGGGSGGGGSGGGGSFEQVQLQQPGAELVRPGASVKLSCKASGYSFTTYWMNWVKQRPGQGLEWIGMIHPSDSETRLNQKFKDKATLTVDKSSSTAYMQLSSPTSEDSAVYYCARSTMIATRAMDYWGQGTSVTVSSTRIQNPDPAVYQLRDSKSSDKSVCLFTDFDSQTNVSQSKDSDVYITDKTVLDMRSMDFKSNSAVAWSNKSDFACANAFNNSIIPEDTFFPSPESSCGTQSFGLLDPKLCYLLDGILFIYGVILTALFLRVKFSRSADAPAYQQGQNQLYNELNLGRREEYDVLDKRRGRDPEMGGKPQRRKNPQEGLYNELQKDKMAEAYSEIGMKGERRRGKGHDGLYQGLSTATKDTYDALHMQALPPR

SEQ ID NO: 13408 - protein, 1094 aa, Artificial Sequence
  Synthetic Polypeptide
MALPVTALLLPLALLLHAARPEVQLVESGGGLVQPGGSLRLSCAASGFSFSDFWMSWVRQAPGKGLEWVATISQAGSEKDYVDSVKGRFTISRDNAKKSLYLQMNSLRAEDTAVYYCASGVYSFDYRGQGTLVTVSSGTGGGGSGGGGSGGGGSEFQSVLTQPPSVSGAPGQRVTISCTGSGSNIGAPYDVSWYQQLPGTAPKLLIYHNNKRPSGVPDRFSGSKSGTSASLAITGLQAEDEADYYCATVEAGLSGSVFGGGTKLTVLGALEDLKNVFPPEVAVFEPSEAEISHTQKATLVCLATGFYPDHVELSWWVNGKEVHSGVSTDPQPLKEQPALNDSRYCLSSRLRVSATFWQNPRNHFRCQVQFYGLSENDEWTQDRAKPVTQIVSAEAWGRADCGSQSFGLLDPKLCYLLDGILFIYGVILTALFLRVKFSRSADAPAYQQGQNQLYNELNLGRREEYDVLDKRRGRDPEMGGKPQRRKNPQEGLYNELQKDKMAEAYSEIGMKGERRRGKGHDGLYQGLSTATKDTYDALHMQALPPRRAKRSGSGATNFSLLKQAGDVEENPGPTSMDWIWRILFLVGAATGAHSGPQLQLQESGPGLVKPSETLSLTCTVSGDSISSGDYYWGWIRQPPGKGLEWIGHIYYSGVTYYNPSLKSRVTISVDTSRNQFSLKLSSVTAADTAVYYCTREDSSNWRSRGQGTLVTVSSGSGGGGSGGGGSGGGGSFEQVQLVQSGAEVKKPGASVKVSCKVSGYTLTELSIHWVRQAPGKGLEWMGGFDPEENEIVYAQRFQGRVTMTEDTSTDTAYMELSSLRSEDTAVYYCAIVGSFSPLTLGLWGQGTMVTVSSTRIQNPDPAVYQLRDSKSSDKSVCLFTDFDSQTNVSQSKDSDVYITDKTVLDMRSMDFKSNSAVAWSNKSDFACANAFNNSIIPEDTFFPSPESSCGTQSFGLLDPKLCYLLDGILFIYGVILTALFLRVKFSRSADAPAYQQGQNQLYNELNLGRREEYDVLDKRRGRDPEMGGKPQRRKNPQEGLYNELQKDKMAEAYSEIGMKGERRRGKGHDGLYQGLSTATKDTYDALHMQALPPR

SEQ ID NO: 13409 - protein, 1094 aa, Artificial Sequence
  Synthetic Polypeptide
MALPVTALLLPLALLLHAARPEVQLVESGGGLVQPGGSLRLSCAASGFSFSDFWMSWVRQAPGKGLEWVATISQAGSEKDYVDSVKGRFTISRDNAKKSLYLQMNSLRAEDTAVYYCASGVYSFDYRGQGTLVTVSSGTGGGGSGGGGSGGGGSEFQSVLTQPPSVSGAPGQRVTISCTGSGSNIGAPYDVSWYQQLPGTAPKLLIYHNNKRPSGVPDRFSGSKSGTSASLAITGLQAEDEADYYCQSYDSSSISTIFGGGTKLTVLGALEDLKNVFPPEVAVFEPSEAEISHTQKATLVCLATGFYPDHVELSWWVNGKEVHSGVSTDPQPLKEQPALNDSRYCLSSRLRVSATFWQNPRNHFRCQVQFYGLSENDEWTQDRAKPVTQIVSAEAWGRADCGSQSFGLLDPKLCYLLDGILFIYGVILTALFLRVKFSRSADAPAYQQGQNQLYNELNLGRREEYDVLDKRRGRDPEMGGKPQRRKNPQEGLYNELQKDKMAEAYSEIGMKGERRRGKGHDGLYQGLSTATKDTYDALHMQALPPRRAKRSGSGATNFSLLKQAGDVEENPGPTSMDWIWRILFLVGAATGAHSGPQLQLQESGPGLVKPSETLSLTCTVSGDSISSGDYYWGWIRQPPGKGLEWIGHIYYSGVTYYNPSLKSRVTISVDTSRNQFSLKLSSVTAADTAVYYCTREDSSNWRSRGQGTLVTVSSGSGGGGSGGGGSGGGGSFEQVQLVQSGAEVKKPGASVKVSCKVSGYTLTELSIHWVRQAPGKGLEWMGGFDPEENEIVYAQRFQGRVTMTEDTSTDTAYMELSSLRSEDTAVYYCAIVGSFSGIAYRPWGQGTMVTVSSTRIQNPDPAVYQLRDSKSSDKSVCLFTDFDSQTNVSQSKDSDVYITDKTVLDMRSMDFKSNSAVAWSNKSDFACANAFNNSIIPEDTFFPSPESSCGTQSFGLLDPKLCYLLDGILFIYGVILTALFLRVKFSRSADAPAYQQGQNQLYNELNLGRREEYDVLDKRRGRDPEMGGKPQRRKNPQEGLYNELQKDKMAEAYSEIGMKGERRRGKGHDGLYQGLSTATKDTYDALHMQALPPR

SEQ ID NO: 13410 - protein, 1082 aa, Artificial Sequence
  Synthetic Polypeptide
MALPVTALLLPLALLLHAARPEVQLVESGGGLVQPGGSLRLSCAASGFSFSDFWMSWVRQAPGKGLEWVATISQAGSEKDYVDSVKGRFTISRDNAKKSLYLQMNSLRAEDTAVYYCASGVYSFDYRGQGTLVTVSSGTGGGGSGGGGSGGGGSEFDIQMTQSPSSLSASVGDRVTITCRASQGIRNNLAWYQQKPGKAPKRLIYAASNLQSGVPSRFTGSGSGTEFTLIVSSLQPEDFATYYCLQHHSYPLTSGGGTKVELEDLKNVFPPEVAVFEPSEAEISHTQKATLVCLATGFYPDHVELSWWVNGKEVHSGVSTDPQPLKEQPALNDSRYCLSSRLRVSATFWQNPRNHFRCQVQFYGLSENDEWTQDRAKPVTQIVSAEAWGRADCGSQSFGLLDPKLCYLLDGILFIYGVILTALFLRVKFSRSADAPAYQQGQNQLYNELNLGRREEYDVLDKRRGRDPEMGGKPQRRKNPQEGLYNELQKDKMAEAYSEIGMKGERRRGKGHDGLYQGLSTATKDTYDALHMQALPPRRAKRSGSGATNFSLLKQAGDVEENPGPTSMDWIWRILFLVGAATGAHSGPQLQLQESGPGLVKPSETLSLTCTVSGDSISSGDYYWGWIRQPPGKGLEWIGHIYYSGVTYYNPSLKSRVTISVDTSRNQFSLKLSSVTAADTAVYYCTREDSSNWRSRGQGTLVTVSSGSGGGGSGGGGSGGGGSFEEVQVLESGGGLVQPGGSLRLSCAASGFTFSSYAMSWVRQAPGKGLEWVSAISGSGGSTNYADSVKGRFTISRDNSKNTLYLQMNSLRAEDTAVYYCAGSSGWSEYWGQGTLVTVSSTRIQNPDPAVYQLRDSKSSDKSVCLFTDFDSQTNVSQSKDSDVYITDKTVLDMRSMDFKSNSAVAWSNKSDFACANAFNNSIIPEDTFFPSPESSCGTQSFGLLDPKLCYLLDGILFIYGVILTALFLRVKFSRSADAPAYQQGQNQLYNELNLGRREEYDVLDKRRGRDPEMGGKPQRRKNPQEGLYNELQKDKMAEAYSEIGMKGERRRGKGHDGLYQGLSTATKDTYDALHMQALPPR

SEQ ID NO: 13411 - protein, 1088 aa, Artificial Sequence
  Synthetic Polypeptide
MALPVTALLLPLALLLHAARPEVQLVESGGGLVQPGGSLRLSCAASGFSFSDFWMSWVRQAPGKGLEWVATISQAGSEKDYVDSVKGRFTISRDNAKKSLYLQMNSLRAEDTAVYYCASGVYSFDYRGQGTLVTVSSGTGGGGSGGGGSGGGGSEFDEIQLVQSGAEVKKPGESLRISCKGSGFNIEDYYIHWVRQMPGKGLEWMGRIDPENDETKYGPIFQGHVTISADTSINTVYLQWSSLKASDTAMYYCAFRGGVYWGQGTTVTVSSLEDLKNVFPPEVAVFEPSEAEISHTQKATLVCLATGFYPDHVELSWWVNGKEVHSGVSTDPQPLKEQPALNDSRYCLSSRLRVSATFWQNPRNHFRCQVQFYGLSENDEWTQDRAKPVTQIVSAEAWGRADCGSQSFGLLDPKLCYLLDGILFIYGVILTALFLRVKFSRSADAPAYQQGQNQLYNELNLGRREEYDVLDKRRGRDPEMGGKPQRRKNPQEGLYNELQKDKMAEAYSEIGMKGERRRGKGHDGLYQGLSTATKDTYDALHMQALPPRRAKRSGSGATNFSLLKQAGDVEENPGPTSMDWIWRILFLVGAATGAHSGPQLQLQESGPGLVKPSETLSLTCTVSGDSISSGDYYWGWIRQPPGKGLEWIGHIYYSGVTYYNPSLKSRVTISVDTSRNQFSLKLSSVTAADTAVYYCTREDSSNWRSRGQGTLVTVSSGSGGGGSGGGGSGGGGSFEDVVMTQSPDSLAVSLGERATINCKSSQSLLDSDGKTYLNWLQQKPGQPPKRLISLVSKLDSGVPDRFSGSGSGTDFTLTISSLQAEDVAVYYCWQGTHFPGTFGGGTKVEIKTRIQNPDPAVYQLRDSKSSDKSVCLFTDFDSQTNVSQSKDSDVYITDKTVLDMRSMDFKSNSAVAWSNKSDFACANAFNNSIIPEDTFFPSPESSCGTQSFGLLDPKLCYLLDGILFIYGVILTALFLRVKFSRSADAPAYQQGQNQLYNELNLGRREEYDVLDKRRGRDPEMGGKPQRRKNPQEGLYNELQKDKMAEAYSEIGMKGERRRGKGHDGLYQGLSTATKDTYDALHMQALPPR

SEQ ID NO: 13412 - protein, 1095 aa, Artificial Sequence
  Synthetic Polypeptide
MALPVTALLLPLALLLHAARPEVQLVESGGGLVQPGGSLRLSCAASGFSFSDFWMSWVRQAPGKGLEWVATISQAGSEKDYVDSVKGRFTISRDNAKKSLYLQMNSLRAEDTAVYYCASGVYSFDYRGQGTLVTVSSGTGGGGSGGGGSGGGGSEFDELVMTQSPSSLTVTAGEKVTMSCKSSQSLLNSGNQKNYLTWYQQKPGQPPKLLIYWASTRESGVPDRFTGSGSGTDFTLTISSVQAEDLAVYYCQNDYSYPLTFGAGTKLEIKLEDLKNVFPPEVAVFEPSEAEISHTQKATLVCLATGFYPDHVELSWWVNGKEVHSGVSTDPQPLKEQPALNDSRYCLSSRLRVSATFWQNPRNHFRCQVQFYGLSENDEWTQDRAKPVTQIVSAEAWGRADCGSQSFGLLDPKLCYLLDGILFIYGVILTALFLRVKFSRSADAPAYQQGQNQLYNELNLGRREEYDVLDKRRGRDPEMGGKPQRRKNPQEGLYNELQKDKMAEAYSEIGMKGERRRGKGHDGLYQGLSTATKDTYDALHMQALPPRRAKRSGSGATNFSLLKQAGDVEENPGPTSMDWIWRILFLVGAATGAHSGPQLQLQESGPGLVKPSETLSLTCTVSGDSISSGDYYWGWIRQPPGKGLEWIGHIYYSGVTYYNPSLKSRVTISVDTSRNQFSLKLSSVTAADTAVYYCTREDSSNWRSRGQGTLVTVSSGSGGGGSGGGGSGGGGSFEEVQLLEQSGAELVRPGTSVKISCKASGYAFTNYWLGWVKQRPGHGLEWIGDIFPGSGNIHYNEKFKGKATLTADKSSSTAYMQLSSLTFEDSAVYFCARLRNWDEPMDYWGQGTTVTVSSTRIQNPDPAVYQLRDSKSSDKSVCLFTDFDSQTNVSQSKDSDVYITDKTVLDMRSMDFKSNSAVAWSNKSDFACANAFNNSIIPEDTFFPSPESSCGTQSFGLLDPKLCYLLDGILFIYGVILTALFLRVKFSRSADAPAYQQGQNQLYNELNLGRREEYDVLDKRRGRDPEMGGKPQRRKNPQEGLYNELQKDKMAEAYSEIGMKGERRRGKGHDGLYQGLSTATKDTYDALHMQALPPR

SEQ ID NO: 13413 - protein, 1096 aa, Artificial Sequence
  Synthetic Polypeptide
MALPVTALLLPLALLLHAARPEVQLVESGGGLVQPGGSLRLSCAASGFSFSDFWMSWVRQAPGKGLEWVATISQAGSEKDYVDSVKGRFTISRDNAKKSLYLQMNSLRAEDTAVYYCASGVYSFDYRGQGTLVTVSSGTGGGGSGGGGSGGGGSEFDELQMTQSPSSLSASVGDRVTITCRASQSISSYLNWYQQKPGQPPKLLIYWASTRESGVPDRFSGSESGTNYTLTISSLQPEDFATYFCQQSDSLPITFGQGTRLDIQLEDLKNVFPPEVAVFEPSEAEISHTQKATLVCLATGFYPDHVELSWWVNGKEVHSGVSTDPQPLKEQPALNDSRYCLSSRLRVSATFWQNPRNHFRCQVQFYGLSENDEWTQDRAKPVTQIVSAEAWGRADCGSQSFGLLDPKLCYLLDGILFIYGVILTALFLRVKFSRSADAPAYQQGQNQLYNELNLGRREEYDVLDKRRGRDPEMGGKPQRRKNPQEGLYNELQKDKMAEAYSEIGMKGERRRGKGHDGLYQGLSTATKDTYDALHMQALPPRRAKRSGSGATNFSLLKQAGDVEENPGPTSMDWIWRILFLVGAATGAHSGPQLQLQESGPGLVKPSETLSLTCTVSGDSISSGDYYWGWIRQPPGKGLEWIGHIYYSGVTYYNPSLKSRVTISVDTSRNQFSLKLSSVTAADTAVYYCTREDSSNWRSRGQGTLVTVSSGSGGGGSGGGGSGGGGSFEEVQLLESGGGVVQPGRSLRLSCAASGFTFSSYGMHWVRQAPGKGLEWVAVISYDGSNKYYADSVKGRFTISRDNSKNTLYLQMNSLRAEDTAVYYCAKDMGWGSGWRPYYYYGMDVWGQGTTVTVSSTRIQNPDPAVYQLRDSKSSDKSVCLFTDFDSQTNVSQSKDSDVYITDKTVLDMRSMDFKSNSAVAWSNKSDFACANAFNNSIIPEDTFFPSPESSCGTQSFGLLDPKLCYLLDGILFIYGVILTALFLRVKFSRSADAPAYQQGQNQLYNELNLGRREEYDVLDKRRGRDPEMGGKPQRRKNPQEGLYNELQKDKMAEAYSEIGMKGERRRGKGHDGLYQGLSTATKDTYDALHMQALPPR

SEQ ID NO: 13414 - protein, 1093 aa, Artificial Sequence
  Synthetic Polypeptide
MALPVTALLLPLALLLHAARPEVQLVESGGGLVQPGGSLRLSCAASGFSFSDFWMSWVRQAPGKGLEWVATISQAGSEKDYVDSVKGRFTISRDNAKKSLYLQMNSLRAEDTAVYYCASGVYSFDYRGQGTLVTVSSGTGGGGSGGGGSGGGGSEFDDIQMTQSPSSLSASVGDRVTITCRASQSISSYLNWYQQKPGKAPKLLIYAASSLQSGVPSRFSGSGSGTDFTLTISSLQPEDLATYYCQQSYSTPFTFGPGTKVDIKLEDLKNVFPPEVAVFEPSEAEISHTQKATLVCLATGFYPDHVELSWWVNGKEVHSGVSTDPQPLKEQPALNDSRYCLSSRLRVSATFWQNPRNHFRCQVQFYGLSENDEWTQDRAKPVTQIVSAEAWGRADCGSQSFGLLDPKLCYLLDGILFIYGVILTALFLRVKFSRSADAPAYQQGQNQLYNELNLGRREEYDVLDKRRGRDPEMGGKPQRRKNPQEGLYNELQKDKMAEAYSEIGMKGERRRGKGHDGLYQGLSTATKDTYDALHMQALPPRRAKRSGSGATNFSLLKQAGDVEENPGPTSMDWIWRILFLVGAATGAHSGPQLQLQESGPGLVKPSETLSLTCTVSGDSISSGDYYWGWIRQPPGKGLEWIGHIYYSGVTYYNPSLKSRVTISVDTSRNQFSLKLSSVTAADTAVYYCTREDSSNWRSRGQGTLVTVSSGSGGGGSGGGGSGGGGSFEVHEVQLVQSGAEVKKPGSSVKVSCKASGGTFSSYAISWVRQAPGQGLEWMGGIIPIFGTANYAQKFQGRVTITADKSTSTAYMELSSLRSEDTAVYYCATFALFGFREQAFDIWGQGTTVTVSSTRIQNPDPAVYQLRDSKSSDKSVCLFTDFDSQTNVSQSKDSDVYITDKTVLDMRSMDFKSNSAVAWSNKSDFACANAFNNSIIPEDTFFPSPESSCGTQSFGLLDPKLCYLLDGILFIYGVILTALFLRVKFSRSADAPAYQQGQNQLYNELNLGRREEYDVLDKRRGRDPEMGGKPQRRKNPQEGLYNELQKDKMAEAYSEIGMKGERRRGKGHDGLYQGLSTATKDTYDALHMQALPPR

SEQ ID NO: 13415 - protein, 1091 aa, Artificial Sequence
  Synthetic Polypeptide
MALPVTALLLPLALLLHAARPEVQLVESGGGLVQPGGSLRLSCAASGFSFSDFWMSWVRQAPGKGLEWVATISQAGSEKDYVDSVKGRFTISRDNAKKSLYLQMNSLRAEDTAVYYCASGVYSFDYRGQGTLVTVSSGTGGGGSGGGGSGGGGSEFDIVLTQSPLSLAVSLGQPAIISCKASQSVSFAGTSLMHWYHQKPGQQPRLLIYRASNLEAGVPDRFSGSGSKTDFTLTISPVEAEDAATYYCQQSREYPYTFGGGTKLEIKRLEDLKNVFPPEVAVFEPSEAEISHTQKATLVCLATGFYPDHVELSWWVNGKEVHSGVSTDPQPLKEQPALNDSRYCLSSRLRVSATFWQNPRNHFRCQVQFYGLSENDEWTQDRAKPVTQIVSAEAWGRADCGSQSFGLLDPKLCYLLDGILFIYGVILTALFLRVKFSRSADAPAYQQGQNQLYNELNLGRREEYDVLDKRRGRDPEMGGKPQRRKNPQEGLYNELQKDKMAEAYSEIGMKGERRRGKGHDGLYQGLSTATKDTYDALHMQALPPRRAKRSGSGATNFSLLKQAGDVEENPGPTSMDWIWRILFLVGAATGAHSGPQLQLQESGPGLVKPSETLSLTCTVSGDSISSGDYYWGWIRQPPGKGLEWIGHIYYSGVTYYNPSLKSRVTISVDTSRNQFSLKLSSVTAADTAVYYCTREDSSNWRSRGQGTLVTVSSGSGGGGSGGGGSGGGGSFEQVQLVQSGAEVVKPGASVKISCKASGYTFTGYFMNWVKQSPGQSLEWIGRIHPYDGDTFYNQKFQGKATLTVDKSSNTAHMELLSLTSEDFAVYYCTRYDGSRAMDYWGQGTTVTVSSTRIQNPDPAVYQLRDSKSSDKSVCLFTDFDSQTNVSQSKDSDVYITDKTVLDMRSMDFKSNSAVAWSNKSDFACANAFNNSIIPEDTFFPSPESSCGTQSFGLLDPKLCYLLDGILFIYGVILTALFLRVKFSRSADAPAYQQGQNQLYNELNLGRREEYDVLDKRRGRDPEMGGKPQRRKNPQEGLYNELQKDKMAEAYSEIGMKGERRRGKGHDGLYQGLSTATKDTYDALHMQALPPR

SEQ ID NO: 13416 - protein, 1088 aa, Artificial Sequence
  Synthetic Polypeptide
MALPVTALLLPLALLLHAARPEVQLVESGGGLVQPGGSLRLSCAASGFSFSDFWMSWVRQAPGKGLEWVATISQAGSEKDYVDSVKGRFTISRDNAKKSLYLQMNSLRAEDTAVYYCASGVYSFDYRGQGTLVTVSSGTGGGGSGGGGSGGGGSEFDDVVMTQTPLSLPVTPGEPASISCRSSQSLVHRNGNTYLHWYLQKPGQSPKLLIHKVSNRFSGVPDRFSGSGSGTDFTLKISRVEAEDLGVYFCSQSTHVPPLTFGAGTKLELKLEDLKNVFPPEVAVFEPSEAEISHTQKATLVCLATGFYPDHVELSWWVNGKEVHSGVSTDPQPLKEQPALNDSRYCLSSRLRVSATFWQNPRNHFRCQVQFYGLSENDEWTQDRAKPVTQIVSAEAWGRADCGSQSFGLLDPKLCYLLDGILFIYGVILTALFLRVKFSRSADAPAYQQGQNQLYNELNLGRREEYDVLDKRRGRDPEMGGKPQRRKNPQEGLYNELQKDKMAEAYSEIGMKGERRRGKGHDGLYQGLSTATKDTYDALHMQALPPRRAKRSGSGATNFSLLKQAGDVEENPGPTSMDWIWRILFLVGAATGAHSGPQLQLQESGPGLVKPSETLSLTCTVSGDSISSGDYYWGWIRQPPGKGLEWIGHIYYSGVTYYNPSLKSRVTISVDTSRNQFSLKLSSVTAADTAVYYCTREDSSNWRSRGQGTLVTVSSGSGGGGSGGGGSGGGGSFEEVQLVQSGAEVEKPGASVKISCKASGSSFTGYNMNWVRQNIGKSLEWIGAIDPYYGGTSYNQKFKGRATLTVDKSTSTAYMHLKSLRSEDTAVYYCVSGMEYWGQGTSVTVSSTRIQNPDPAVYQLRDSKSSDKSVCLFTDFDSQTNVSQSKDSDVYITDKTVLDMRSMDFKSNSAVAWSNKSDFACANAFNNSIIPEDTFFPSPESSCGTQSFGLLDPKLCYLLDGILFIYGVILTALFLRVKFSRSADAPAYQQGQNQLYNELNLGRREEYDVLDKRRGRDPEMGGKPQRRKNPQEGLYNELQKDKMAEAYSEIGMKGERRRGKGHDGLYQGLSTATKDTYDALHMQALPPR

SEQ ID NO: 13417 - protein, 1086 aa, Artificial Sequence
  Synthetic Polypeptide
MALPVTALLLPLALLLHAARPEVQLVESGGGLVQPGGSLRLSCAASGFSFSDFWMSWVRQAPGKGLEWVATISQAGSEKDYVDSVKGRFTISRDNAKKSLYLQMNSLRAEDTAVYYCASGVYSFDYRGQGTLVTVSSGTGGGGSGGGGSGGGGSEFDEIVMTQTPATLSVSAGERVTITCKASQSVSNDVTWYQQKPGQAPRLLIYSASNRYSGVPARFSGSGYGTEFTFTISSVQSEDFAVYFCQQDYSSFGQGTKLEIKRLEDLKNVFPPEVAVFEPSEAEISHTQKATLVCLATGFYPDHVELSWWVNGKEVHSGVSTDPQPLKEQPALNDSRYCLSSRLRVSATFWQNPRNHFRCQVQFYGLSENDEWTQDRAKPVTQIVSAEAWGRADCGSQSFGLLDPKLCYLLDGILFIYGVILTALFLRVKFSRSADAPAYQQGQNQLYNELNLGRREEYDVLDKRRGRDPEMGGKPQRRKNPQEGLYNELQKDKMAEAYSEIGMKGERRRGKGHDGLYQGLSTATKDTYDALHMQALPPRRAKRSGSGATNFSLLKQAGDVEENPGPTSMDWIWRILFLVGAATGAHSGPQLQLQESGPGLVKPSETLSLTCTVSGDSISSGDYYWGWIRQPPGKGLEWIGHIYYSGVTYYNPSLKSRVTISVDTSRNQFSLKLSSVTAADTAVYYCTREDSSNWRSRGQGTLVTVSSGSGGGGSGGGGSGGGGSFEQVQLVESGPGVVQPGRSLRISCAVSGFSVTNYGVHWVRQPPGKGLEWLGVIWAGGITNYNSAFMSRLTISKDNSKNTVYLQMNSLRAEDTAMYYCASRGGHYGYALDYWGQGTLVTVSSTRIQNPDPAVYQLRDSKSSDKSVCLFTDFDSQTNVSQSKDSDVYITDKTVLDMRSMDFKSNSAVAWSNKSDFACANAFNNSIIPEDTFFPSPESSCGTQSFGLLDPKLCYLLDGILFIYGVILTALFLRVKFSRSADAPAYQQGQNQLYNELNLGRREEYDVLDKRRGRDPEMGGKPQRRKNPQEGLYNELQKDKMAEAYSEIGMKGERRRGKGHDGLYQGLSTATKDTYDALHMQALPPR

SEQ ID NO: 13418 - protein, 1088 aa, Artificial Sequence
  Synthetic Polypeptide
MALPVTALLLPLALLLHAARPEVQLVESGGGLVQPGGSLRLSCAASGFSFSDFWMSWVRQAPGKGLEWVATISQAGSEKDYVDSVKGRFTISRDNAKKSLYLQMNSLRAEDTAVYYCASGVYSFDYRGQGTLVTVSSGTGGGGSGGGGSGGGGSEFDIQMTQTASSLPASLGDRVTISCSASQDISNYLNWYQQKPDGTVKLLIFYSSNLHSGVPSRFSGGGSGTDYSLTISNLEPEDIATYFCHQYSKLPWTFGGGTKLEIKRLEDLKNVFPPEVAVFEPSEAEISHTQKATLVCLATGFYPDHVELSWWVNGKEVHSGVSTDPQPLKEQPALNDSRYCLSSRLRVSATFWQNPRNHFRCQVQFYGLSENDEWTQDRAKPVTQIVSAEAWGRADCGSQSFGLLDPKLCYLLDGILFIYGVILTALFLRVKFSRSADAPAYQQGQNQLYNELNLGRREEYDVLDKRRGRDPEMGGKPQRRKNPQEGLYNELQKDKMAEAYSEIGMKGERRRGKGHDGLYQGLSTATKDTYDALHMQALPPRRAKRSGSGATNFSLLKQAGDVEENPGPTSMDWIWRILFLVGAATGAHSGPQLQLQESGPGLVKPSETLSLTCTVSGDSISSGDYYWGWIRQPPGKGLEWIGHIYYSGVTYYNPSLKSRVTISVDTSRNQFSLKLSSVTAADTAVYYCTREDSSNWRSRGQGTLVTVSSGSGGGGSGGGGSGGGGSFEEVTLVESGGDFVKPGGSLKVSCAASGFAFSHYAMSWVRQTPAKRLEWVAYISSGGSGTYYSDSVKGRFTISRDNAKNTLYLQMRSLRSEDSAMYFCTRVKLGTYYFDSWGQGTTLTVSSTRIQNPDPAVYQLRDSKSSDKSVCLFTDFDSQTNVSQSKDSDVYITDKTVLDMRSMDFKSNSAVAWSNKSDFACANAFNNSIIPEDTFFPSPESSCGTQSFGLLDPKLCYLLDGILFIYGVILTALFLRVKFSRSADAPAYQQGQNQLYNELNLGRREEYDVLDKRRGRDPEMGGKPQRRKNPQEGLYNELQKDKMAEAYSEIGMKGERRRGKGHDGLYQGLSTATKDTYDALHMQALPPR

SEQ ID NO: 13419 - protein, 1090 aa, Artificial Sequence
  Synthetic Polypeptide
MALPVTALLLPLALLLHAARPEVQLVESGGGLVQPGGSLRLSCAASGFSFSDFWMSWVRQAPGKGLEWVATISQAGSEKDYVDSVKGRFTISRDNAKKSLYLQMNSLRAEDTAVYYCASGVYSFDYRGQGTLVTVSSGTGGGGSGGGGSGGGGSEFQFVLTQSPSASAALGASAKLTCTLSSAHKTYTIDWYQQQKGKAPRYLIQVKSDGTYTKATGVPDRFSGSSSGADRYLIIPSVQADDEADYYCGTDYTGGYVFGGGTQLTVTLEDLKNVFPPEVAVFEPSEAEISHTQKATLVCLATGFYPDHVELSWWVNGKEVHSGVSTDPQPLKEQPALNDSRYCLSSRLRVSATFWQNPRNHFRCQVQFYGLSENDEWTQDRAKPVTQIVSAEAWGRADCGSQSFGLLDPKLCYLLDGILFIYGVILTALFLRVKFSRSADAPAYQQGQNQLYNELNLGRREEYDVLDKRRGRDPEMGGKPQRRKNPQEGLYNELQKDKMAEAYSEIGMKGERRRGKGHDGLYQGLSTATKDTYDALHMQALPPRRAKRSGSGATNFSLLKQAGDVEENPGPTSMDWIWRILFLVGAATGAHSGPQLQLQESGPGLVKPSETLSLTCTVSGDSISSGDYYWGWIRQPPGKGLEWIGHIYYSGVTYYNPSLKSRVTISVDTSRNQFSLKLSSVTAADTAVYYCTREDSSNWRSRGQGTLVTVSSGSGGGGSGGGGSGGGGSFEEQLKESGGGLFKPTDTLTLTCTVSGFSLSYYGVNWVRQAPGNGLEWIGTIGGSGDTYYASWAKSRSTIIRNTNENTVTLKMTSLTAADTATYFCVRYANIGYEYFNVWGPGTLVTVSSTRIQNPDPAVYQLRDSKSSDKSVCLFTDFDSQTNVSQSKDSDVYITDKTVLDMRSMDFKSNSAVAWSNKSDFACANAFNNSIIPEDTFFPSPESSCGTQSFGLLDPKLCYLLDGILFIYGVILTALFLRVKFSRSADAPAYQQGQNQLYNELNLGRREEYDVLDKRRGRDPEMGGKPQRRKNPQEGLYNELQKDKMAEAYSEIGMKGERRRGKGHDGLYQGLSTATKDTYDALHMQALPPR

SEQ ID NO: 13420 - protein, 1095 aa, Artificial Sequence
  Synthetic Polypeptide
MALPVTALLLPLALLLHAARPEVQLVESGGGLVQPGGSLRLSCAASGFSFSDFWMSWVRQAPGKGLEWVATISQAGSEKDYVDSVKGRFTISRDNAKKSLYLQMNSLRAEDTAVYYCASGVYSFDYRGQGTLVTVSSGTGGGGSGGGGSGGGGSEFQFVLTQSPSVSAALGASAKLTCTLSSAHKTYTIDWYQQQQGEAPRYLMQVKSDGSYTKGTGVPDRFSGSSSGADRYLIIPSVQADDEAGYVCGADDNGGYVFGGGTQLTVTLEDLKNVFPPEVAVFEPSEAEISHTQKATLVCLATGFYPDHVELSWWVNGKEVHSGVSTDPQPLKEQPALNDSRYCLSSRLRVSATFWQNPRNHFRCQVQFYGLSENDEWTQDRAKPVTQIVSAEAWGRADCGSQSFGLLDPKLCYLLDGILFIYGVILTALFLRVKFSRSADAPAYQQGQNQLYNELNLGRREEYDVLDKRRGRDPEMGGKPQRRKNPQEGLYNELQKDKMAEAYSEIGMKGERRRGKGHDGLYQGLSTATKDTYDALHMQALPPRRAKRSGSGATNFSLLKQAGDVEENPGPTSMDWIWRILFLVGAATGAHSGPQLQLQESGPGLVKPSETLSLTCTVSGDSISSGDYYWGWIRQPPGKGLEWIGHIYYSGVTYYNPSLKSRVTISVDTSRNQFSLKLSSVTAADTAVYYCTREDSSNWRSRGQGTLVTVSSGSGGGGSGGGGSGGGGSFEQSVKESEGGLFKPTDTLTLTCTVSGFSLSRHALTWVRQAPGNGLEWIGAIDNAGTTYYASWAKSRSTITRNTDLHTVTLKMTSLTASDTATYFCARVFYDINSGYYLDGMDLWGPGTLVTVSSTRIQNPDPAVYQLRDSKSSDKSVCLFTDFDSQTNVSQSKDSDVYITDKTVLDMRSMDFKSNSAVAWSNKSDFACANAFNNSIIPEDTFFPSPESSCGTQSFGLLDPKLCYLLDGILFIYGVILTALFLRVKFSRSADAPAYQQGQNQLYNELNLGRREEYDVLDKRRGRDPEMGGKPQRRKNPQEGLYNELQKDKMAEAYSEIGMKGERRRGKGHDGLYQGLSTATKDTYDALHMQALPPR

SEQ ID NO: 13421 - protein, 1089 aa, Artificial Sequence
  Synthetic Polypeptide
MALPVTALLLPLALLLHAARPEVQLVESGGGLVQPGGSLRLSCAASGFSFSDFWMSWVRQAPGKGLEWVATISQAGSEKDYVDSVKGRFTISRDNAKKSLYLQMNSLRAEDTAVYYCASGVYSFDYRGQGTLVTVSSGTGGGGSGGGGSGGGGSEFDIQMTQSPSSLSASVGDRVTITCRASQGISSWLAWYQQKPEKAPKSLIYAASSLQSGVPSRFSGSGSGTDFTLTISSLQPEDFATYYCQQYNSYPPTFGGGTKVEIKLEDLKNVFPPEVAVFEPSEAEISHTQKATLVCLATGFYPDHVELSWWVNGKEVHSGVSTDPQPLKEQPALNDSRYCLSSRLRVSATFWQNPRNHFRCQVQFYGLSENDEWTQDRAKPVTQIVSAEAWGRADCGSQSFGLLDPKLCYLLDGILFIYGVILTALFLRVKFSRSADAPAYQQGQNQLYNELNLGRREEYDVLDKRRGRDPEMGGKPQRRKNPQEGLYNELQKDKMAEAYSEIGMKGERRRGKGHDGLYQGLSTATKDTYDALHMQALPPRRAKRSGSGATNFSLLKQAGDVEENPGPTSMDWIWRILFLVGAATGAHSGPQLQLQESGPGLVKPSETLSLTCTVSGDSISSGDYYWGWIRQPPGKGLEWIGHIYYSGVTYYNPSLKSRVTISVDTSRNQFSLKLSSVTAADTAVYYCTREDSSNWRSRGQGTLVTVSSGSGGGGSGGGGSGGGGSFEEVQLVESGGGLVQPGESLRLSCVASGFTFSRYKMNWVRQAPGKGLEWVSYISRSGRDIYYADSVKGRFTISRDNAKNSLYLQMNSLRDEDTAVYYCAGTVTTYYYFGMDVWGHGTTVTVSSTRIQNPDPAVYQLRDSKSSDKSVCLFTDFDSQTNVSQSKDSDVYITDKTVLDMRSMDFKSNSAVAWSNKSDFACANAFNNSIIPEDTFFPSPESSCGTQSFGLLDPKLCYLLDGILFIYGVILTALFLRVKFSRSADAPAYQQGQNQLYNELNLGRREEYDVLDKRRGRDPEMGGKPQRRKNPQEGLYNELQKDKMAEAYSEIGMKGERRRGKGHDGLYQGLSTATKDTYDALHMQALPPR

SEQ ID NO: 13422 - protein, 1090 aa, Artificial Sequence
  Synthetic Polypeptide
MALPVTALLLPLALLLHAARPEVQLVESGGGLVQPGGSLRLSCAASGFSFSDFWMSWVRQAPGKGLEWVATISQAGSEKDYVDSVKGRFTISRDNAKKSLYLQMNSLRAEDTAVYYCASGVYSFDYRGQGTLVTVSSGTGGGGSGGGGSGGGGSEFDIQMTQSPSSLSASVGDRVTITCRASQGISSWLAWYQQKPEKAPKSLIYAASSLQSGVPSRFSGSGSGTDFTLTISSLQPEDFATYYCQQYNSYPPTFGGGTKVEIKLEDLKNVFPPEVAVFEPSEAEISHTQKATLVCLATGFYPDHVELSWWVNGKEVHSGVSTDPQPLKEQPALNDSRYCLSSRLRVSATFWQNPRNHFRCQVQFYGLSENDEWTQDRAKPVTQIVSAEAWGRADCGSQSFGLLDPKLCYLLDGILFIYGVILTALFLRVKFSRSADAPAYQQGQNQLYNELNLGRREEYDVLDKRRGRDPEMGGKPQRRKNPQEGLYNELQKDKMAEAYSEIGMKGERRRGKGHDGLYQGLSTATKDTYDALHMQALPPRRAKRSGSGATNFSLLKQAGDVEENPGPTSMDWIWRILFLVGAATGAHSGPQLQLQESGPGLVKPSETLSLTCTVSGDSISSGDYYWGWIRQPPGKGLEWIGHIYYSGVTYYNPSLKSRVTISVDTSRNQFSLKLSSVTAADTAVYYCTREDSSNWRSRGQGTLVTVSSGSGGGGSGGGGSGGGGSFEEVQLVESGGGSVQPGESLRLSCVASGFTFSRYKMNWVRQAPGKGLEWVSYISRSGRDIYYADSVKGRFTISRDNAKNSLYLQMNSLRDEDTAVYYCAGTVTTYYYDFGMDVWGQGTTVTVSSTRIQNPDPAVYQLRDSKSSDKSVCLFTDFDSQTNVSQSKDSDVYITDKTVLDMRSMDFKSNSAVAWSNKSDFACANAFNNSIIPEDTFFPSPESSCGTQSFGLLDPKLCYLLDGILFIYGVILTALFLRVKFSRSADAPAYQQGQNQLYNELNLGRREEYDVLDKRRGRDPEMGGKPQRRKNPQEGLYNELQKDKMAEAYSEIGMKGERRRGKGHDGLYQGLSTATKDTYDALHMQALPPR

SEQ ID NO: 13423 - protein, 1088 aa, Artificial Sequence
  Synthetic Polypeptide
MALPVTALLLPLALLLHAARPEVQLVESGGGLVQPGGSLRLSCAASGFSFSDFWMSWVRQAPGKGLEWVATISQAGSEKDYVDSVKGRFTISRDNAKKSLYLQMNSLRAEDTAVYYCASGVYSFDYRGQGTLVTVSSGTGGGGSGGGGSGGGGSEFQSVLTQPPSASGTPGQRVTISCSGSRSNVGGNYVFWYQQVPGATPKLLIYRSNQRPSGVPDRFAGSKSGSSASLAISGLRSEDEADYYCATWDDSLSGFVFGTGTKVTVLGLEDLKNVFPPEVAVFEPSEAEISHTQKATLVCLATGFYPDHVELSWWVNGKEVHSGVSTDPQPLKEQPALNDSRYCLSSRLRVSATFWQNPRNHFRCQVQFYGLSENDEWTQDRAKPVTQIVSAEAWGRADCGSQSFGLLDPKLCYLLDGILFIYGVILTALFLRVKFSRSADAPAYQQGQNQLYNELNLGRREEYDVLDKRRGRDPEMGGKPQRRKNPQEGLYNELQKDKMAEAYSEIGMKGERRRGKGHDGLYQGLSTATKDTYDALHMQALPPRRAKRSGSGATNFSLLKQAGDVEENPGPTSMDWIWRILFLVGAATGAHSGPQLQLQESGPGLVKPSETLSLTCTVSGDSISSGDYYWGWIRQPPGKGLEWIGHIYYSGVTYYNPSLKSRVTISVDTSRNQFSLKLSSVTAADTAVYYCTREDSSNWRSRGQGTLVTVSSGSGGGGSGGGGSGGGGSFEVQLVESGGGLVKPGGSLRLSCAASGFTFSDYYMSWIRQAPGKGLEWVSYISSSGSTIYYADSVKGRFTISRDNAKNSLYLQMNSLRAEDTAVYYCARGYGKAYDQWGQGTLVTVSSTRIQNPDPAVYQLRDSKSSDKSVCLFTDFDSQTNVSQSKDSDVYITDKTVLDMRSMDFKSNSAVAWSNKSDFACANAFNNSIIPEDTFFPSPESSCGTQSFGLLDPKLCYLLDGILFIYGVILTALFLRVKFSRSADAPAYQQGQNQLYNELNLGRREEYDVLDKRRGRDPEMGGKPQRRKNPQEGLYNELQKDKMAEAYSEIGMKGERRRGKGHDGLYQGLSTATKDTYDALHMQALPPR

SEQ ID NO: 13424 - protein, 1087 aa, Artificial Sequence
  Synthetic Polypeptide
MALPVTALLLPLALLLHAARPEVQLVESGGGLVQPGGSLRLSCAASGFSFSDFWMSWVRQAPGKGLEWVATISQAGSEKDYVDSVKGRFTISRDNAKKSLYLQMNSLRAEDTAVYYCASGVYSFDYRGQGTLVTVSSGTGGGGSGGGGSGGGGSEFQSVVTQPPSMSAAPGQQVTISCSGGNSNIERNYVSWYLQLPGTAPKLVIFDNDRRPSGIPDRFSGSKSGTSATLGITGLQTGDEADYYCGTWDSSLRGWVFGGGTKLTVLGLEDLKNVFPPEVAVFEPSEAEISHTQKATLVCLATGFYPDHVELSWWVNGKEVHSGVSTDPQPLKEQPALNDSRYCLSSRLRVSATFWQNPRNHFRCQVQFYGLSENDEWTQDRAKPVTQIVSAEAWGRADCGSQSFGLLDPKLCYLLDGILFIYGVILTALFLRVKFSRSADAPAYQQGQNQLYNELNLGRREEYDVLDKRRGRDPEMGGKPQRRKNPQEGLYNELQKDKMAEAYSEIGMKGERRRGKGHDGLYQGLSTATKDTYDALHMQALPPRRAKRSGSGATNFSLLKQAGDVEENPGPTSMDWIWRILFLVGAATGAHSGPQLQLQESGPGLVKPSETLSLTCTVSGDSISSGDYYWGWIRQPPGKGLEWIGHIYYSGVTYYNPSLKSRVTISVDTSRNQFSLKLSSVTAADTAVYYCTREDSSNWRSRGQGTLVTVSSGSGGGGSGGGGSGGGGSFEVQLVESGGGLIQPGGSLRLSCAASGFTFSNYAMNWVRQAPGKGLEWVSTINGRGSSTIYADSVKGRFTISRDNSKNTLYLQMNSLRAEDTATYYCARYISRGLGDSWGQGTLVTVTRIQNPDPAVYQLRDSKSSDKSVCLFTDFDSQTNVSQSKDSDVYITDKTVLDMRSMDFKSNSAVAWSNKSDFACANAFNNSIIPEDTFFPSPESSCGTQSFGLLDPKLCYLLDGILFIYGVILTALFLRVKFSRSADAPAYQQGQNQLYNELNLGRREEYDVLDKRRGRDPEMGGKPQRRKNPQEGLYNELQKDKMAEAYSEIGMKGERRRGKGHDGLYQGLSTATKDTYDALHMQALPPR

SEQ ID NO: 13425 - protein, 1088 aa, Artificial Sequence
  Synthetic Polypeptide
MALPVTALLLPLALLLHAARPEVQLVESGGGLVQPGGSLRLSCAASGFSFSDFWMSWVRQAPGKGLEWVATISQAGSEKDYVDSVKGRFTISRDNAKKSLYLQMNSLRAEDTAVYYCASGVYSFDYRGQGTLVTVSSGTGGGGSGGGGSGGGGSEFDVVMTQTPLSLPVSLGDQASISCRSSQSLVHSNGNTYLHWYLQKPGQSPKLLIYKVSNRFSGVPDRFSGSGSGTDFTLKISRVEAEDLGVYFCSQNTPVPPKFGSGTKLEIKLEDLKNVFPPEVAVFEPSEAEISHTQKATLVCLATGFYPDHVELSWWVNGKEVHSGVSTDPQPLKEQPALNDSRYCLSSRLRVSATFWQNPRNHFRCQVQFYGLSENDEWTQDRAKPVTQIVSAEAWGRADCGSQSFGLLDPKLCYLLDGILFIYGVILTALFLRVKFSRSADAPAYQQGQNQLYNELNLGRREEYDVLDKRRGRDPEMGGKPQRRKNPQEGLYNELQKDKMAEAYSEIGMKGERRRGKGHDGLYQGLSTATKDTYDALHMQALPPRRAKRSGSGATNFSLLKQAGDVEENPGPTSMDWIWRILFLVGAATGAHSGPQLQLQESGPGLVKPSETLSLTCTVSGDSISSGDYYWGWIRQPPGKGLEWIGHIYYSGVTYYNPSLKSRVTISVDTSRNQFSLKLSSVTAADTAVYYCTREDSSNWRSRGQGTLVTVSSGSGGGGSGGGGSGGGGSFEQVQLQQSGAELVRPGASVKLSCKASGYTFNDYEMHWVKQTPVHGLKWIGALEPKTGDTAYSQKFKGKATLTADKSSSTAYMELRSLTSEDSAVYYCTSCYYYTYSGQGTLVTVSATRIQNPDPAVYQLRDSKSSDKSVCLFTDFDSQTNVSQSKDSDVYITDKTVLDMRSMDFKSNSAVAWSNKSDFACANAFNNSIIPEDTFFPSPESSCGTQSFGLLDPKLCYLLDGILFIYGVILTALFLRVKFSRSADAPAYQQGQNQLYNELNLGRREEYDVLDKRRGRDPEMGGKPQRRKNPQEGLYNELQKDKMAEAYSEIGMKGERRRGKGHDGLYQGLSTATKDTYDALHMQALPPR

SEQ ID NO: 13426 - protein, 1087 aa, Artificial Sequence
  Synthetic Polypeptide
MALPVTALLLPLALLLHAARPEVQLVESGGGLVQPGGSLRLSCAASGFSFSDFWMSWVRQAPGKGLEWVATISQAGSEKDYVDSVKGRFTISRDNAKKSLYLQMNSLRAEDTAVYYCASGVYSFDYRGQGTLVTVSSGTGGGGSGGGGSGGGGSEFDIQLTQSPSSLSASVGDRVTITCRASQGIRNDLGWYQQKPGKAPKRLIYAASSLQNGVPSRFSGSGSGTEFTLTISSLQPEDFATYYCLQHNTYPAFGQGTKVEIKRLEDLKNVFPPEVAVFEPSEAEISHTQKATLVCLATGFYPDHVELSWWVNGKEVHSGVSTDPQPLKEQPALNDSRYCLSSRLRVSATFWQNPRNHFRCQVQFYGLSENDEWTQDRAKPVTQIVSAEAWGRADCGSQSFGLLDPKLCYLLDGILFIYGVILTALFLRVKFSRSADAPAYQQGQNQLYNELNLGRREEYDVLDKRRGRDPEMGGKPQRRKNPQEGLYNELQKDKMAEAYSEIGMKGERRRGKGHDGLYQGLSTATKDTYDALHMQALPPRRAKRSGSGATNFSLLKQAGDVEENPGPTSMDWIWRILFLVGAATGAHSGPQLQLQESGPGLVKPSETLSLTCTVSGDSISSGDYYWGWIRQPPGKGLEWIGHIYYSGVTYYNPSLKSRVTISVDTSRNQFSLKLSSVTAADTAVYYCTREDSSNWRSRGQGTLVTVSSGSGGGGSGGGGSGGGGSFEQVQLQESGPGLVKPSQTLSLTCTVSGGSISSFNYYWSWIRHHPGKGLEWIGYIYYSGSTYSNPSLKSRVTISVDTSKNQFSLTLSSVTAADTAVYYCARGYNWNYFDYWGQGTLVTVSSTRIQNPDPAVYQLRDSKSSDKSVCLFTDFDSQTNVSQSKDSDVYITDKTVLDMRSMDFKSNSAVAWSNKSDFACANAFNNSIIPEDTFFPSPESSCGTQSFGLLDPKLCYLLDGILFIYGVILTALFLRVKFSRSADAPAYQQGQNQLYNELNLGRREEYDVLDKRRGRDPEMGGKPQRRKNPQEGLYNELQKDKMAEAYSEIGMKGERRRGKGHDGLYQGLSTATKDTYDALHMQALPPR

SEQ ID NO: 13427 - protein, 1089 aa, Artificial Sequence
  Synthetic Polypeptide
MALPVTALLLPLALLLHAARPEVQLVESGGGLVQPGGSLRLSCAASGFSFSDFWMSWVRQAPGKGLEWVATISQAGSEKDYVDSVKGRFTISRDNAKKSLYLQMNSLRAEDTAVYYCASGVYSFDYRGQGTLVTVSSGTGGGGSGGGGSGGGGSEFDDIVLTQSPASLAVSLGQSVTISCRASESVEYYGTSLMQWYQQKPGQPPKLLIYATSNVESGVPARFSGSGSGTDFSLNIHPVEEDDIAMYFCQQSRKLPSTFGGGTKLEIKLEDLKNVFPPEVAVFEPSEAEISHTQKATLVCLATGFYPDHVELSWWVNGKEVHSGVSTDPQPLKEQPALNDSRYCLSSRLRVSATFWQNPRNHFRCQVQFYGLSENDEWTQDRAKPVTQIVSAEAWGRADCGSQSFGLLDPKLCYLLDGILFIYGVILTALFLRVKFSRSADAPAYQQGQNQLYNELNLGRREEYDVLDKRRGRDPEMGGKPQRRKNPQEGLYNELQKDKMAEAYSEIGMKGERRRGKGHDGLYQGLSTATKDTYDALHMQALPPRRAKRSGSGATNFSLLKQAGDVEENPGPTSMDWIWRILFLVGAATGAHSGPQLQLQESGPGLVKPSETLSLTCTVSGDSISSGDYYWGWIRQPPGKGLEWIGHIYYSGVTYYNPSLKSRVTISVDTSRNQFSLKLSSVTAADTAVYYCTREDSSNWRSRGQGTLVTVSSGSGGGGSGGGGSGGGGSFEDVRLQESGPGQVKPSQTVSLTCSVTGYSITNGNHWWNWIRQVSGSKLEWIGYISSSGSTDSNPSLKSRISITRDTSKNQLFLQLNSVTTEDIATYYCARGYYFDYWGQGTTLTVSSTRIQNPDPAVYQLRDSKSSDKSVCLFTDFDSQTNVSQSKDSDVYITDKTVLDMRSMDFKSNSAVAWSNKSDFACANAFNNSIIPEDTFFPSPESSCGTQSFGLLDPKLCYLLDGILFIYGVILTALFLRVKFSRSADAPAYQQGQNQLYNELNLGRREEYDVLDKRRGRDPEMGGKPQRRKNPQEGLYNELQKDKMAEAYSEIGMKGERRRGKGHDGLYQGLSTATKDTYDALHMQALPPR

SEQ ID NO: 13428 - protein, 1088 aa, Artificial Sequence
  Synthetic Polypeptide
MALPVTALLLPLALLLHAARPEVQLVESGGGLVQPGGSLRLSCAASGFSFSDFWMSWVRQAPGKGLEWVATISQAGSEKDYVDSVKGRFTISRDNAKKSLYLQMNSLRAEDTAVYYCASGVYSFDYRGQGTLVTVSSGTGGGGSGGGGSGGGGSEFDIQMTQSPSSLSASVGDRVTITCRASQDVNTAVAWYQQKPGKAPKLLIYSASFLESGVPSRFSGSRSGTDFTLTISSLQPEDFATYYCQQHYTTPPTFGQTKVEIKRLEDLKNVFPPEVAVFEPSEAEISHTQKATLVCLATGFYPDHVELSWWVNGKEVHSGVSTDPQPLKEQPALNDSRYCLSSRLRVSATFWQNPRNHFRCQVQFYGLSENDEWTQDRAKPVTQIVSAEAWGRADCGSQSFGLLDPKLCYLLDGILFIYGVILTALFLRVKFSRSADAPAYQQGQNQLYNELNLGRREEYDVLDKRRGRDPEMGGKPQRRKNPQEGLYNELQKDKMAEAYSEIGMKGERRRGKGHDGLYQGLSTATKDTYDALHMQALPPRRAKRSGSGATNFSLLKQAGDVEENPGPTSMDWIWRILFLVGAATGAHSGPQLQLQESGPGLVKPSETLSLTCTVSGDSISSGDYYWGWIRQPPGKGLEWIGHIYYSGVTYYNPSLKSRVTISVDTSRNQFSLKLSSVTAADTAVYYCTREDSSNWRSRGQGTLVTVSSGSGGGGSGGGGSGGGGSFEEVQLVESGGGLVQPGGSLRLSCAASGFNIKDTYIHWVRQAPGKGLEWVARIYPTNGYTRYADSVKGRFTISADTSKNTAYLQMNSLRAEDTAVYYCSRWGGDGFYAMDVWGQGTLVTVSSTRIQNPDPAVYQLRDSKSSDKSVCLFTDFDSQTNVSQSKDSDVYITDKTVLDMRSMDFKSNSAVAWSNKSDFACANAFNNSIIPEDTFFPSPESSCGTQSFGLLDPKLCYLLDGILFIYGVILTALFLRVKFSRSADAPAYQQGQNQLYNELNLGRREEYDVLDKRRGRDPEMGGKPQRRKNPQEGLYNELQKDKMAEAYSEIGMKGERRRGKGHDGLYQGLSTATKDTYDALHMQALPPR

SEQ ID NO: 13429 - protein, 1087 aa, Artificial Sequence
  Synthetic Polypeptide
MALPVTALLLPLALLLHAARPEVQLVESGGGLVQPGGSLRLSCAASGFSFSDFWMSWVRQAPGKGLEWVATISQAGSEKDYVDSVKGRFTISRDNAKKSLYLQMNSLRAEDTAVYYCASGVYSFDYRGQGTLVTVSSGTGGGGSGGGGSGGGGSEFDQSVLTQPPSVSVAPGKTARIPCEGNYIGSSNVHWYQQKPGQAPVLVIHFDSDRPSGIPDRFSGSNSGNMATLTISRVEAGDEADYYCQVWENHGWVFGGGTKLTVLSLEDLKNVFPPEVAVFEPSEAEISHTQKATLVCLATGFYPDHVELSWWVNGKEVHSGVSTDPQPLKEQPALNDSRYCLSSRLRVSATFWQNPRNHFRCQVQFYGLSENDEWTQDRAKPVTQIVSAEAWGRADCGSQSFGLLDPKLCYLLDGILFIYGVILTALFLRVKFSRSADAPAYQQGQNQLYNELNLGRREEYDVLDKRRGRDPEMGGKPQRRKNPQEGLYNELQKDKMAEAYSEIGMKGERRRGKGHDGLYQGLSTATKDTYDALHMQALPPRRAKRSGSGATNFSLLKQAGDVEENPGPTSMDWIWRILFLVGAATGAHSGPQLQLQESGPGLVKPSETLSLTCTVSGDSISSGDYYWGWIRQPPGKGLEWIGHIYYSGVTYYNPSLKSRVTISVDTSRNQFSLKLSSVTAADTAVYYCTREDSSNWRSRGQGTLVTVSSGSGGGGSGGGGSGGGGSFEEVQLVETGGGLVQPGESLRLSCAASGFTFSDYEMNWVRQAPGKGLEWVSYISSSGSTIYYADSVKGRFTIYRDNAKNSLYLQMNSLRAEDTALYYCARAWGVGPPDYWGQGTLVTVSSTRIQNPDPAVYQLRDSKSSDKSVCLFTDFDSQTNVSQSKDSDVYITDKTVLDMRSMDFKSNSAVAWSNKSDFACANAFNNSIIPEDTFFPSPESSCGTQSFGLLDPKLCYLLDGILFIYGVILTALFLRVKFSRSADAPAYQQGQNQLYNELNLGRREEYDVLDKRRGRDPEMGGKPQRRKNPQEGLYNELQKDKMAEAYSEIGMKGERRRGKGHDGLYQGLSTATKDTYDALHMQALPPR

SEQ ID NO: 13430 - protein, 1095 aa, Artificial Sequence
  Synthetic Polypeptide
MALPVTALLLPLALLLHAARPEVQLVESGGGLVQPGGSLRLSCAASGFSFSDFWMSWVRQAPGKGLEWVATISQAGSEKDYVDSVKGRFTISRDNAKKSLYLQMNSLRAEDTAVYYCASGVYSFDYRGQGTLVTVSSGTGGGGSGGGGSGGGGSEFDIQMTQSPSSLSASVGDTVTITCQANGYLNWYQQRRGKAPKLLIYDGSKLERGVPSRFSGRRWGQEYNLTINNLQPEDIATYFCQVYEFVVPGTRLDLKRTVAAPLEDLKNVFPPEVAVFEPSEAEISHTQKATLVCLATGFYPDHVELSWWVNGKEVHSGVSTDPQPLKEQPALNDSRYCLSSRLRVSATFWQNPRNHFRCQVQFYGLSENDEWTQDRAKPVTQIVSAEAWGRADCGSQSFGLLDPKLCYLLDGILFIYGVILTALFLRVKFSRSADAPAYQQGQNQLYNELNLGRREEYDVLDKRRGRDPEMGGKPQRRKNPQEGLYNELQKDKMAEAYSEIGMKGERRRGKGHDGLYQGLSTATKDTYDALHMQALPPRRAKRSGSGATNFSLLKQAGDVEENPGPTSMDWIWRILFLVGAATGAHSGPQLQLQESGPGLVKPSETLSLTCTVSGDSISSGDYYWGWIRQPPGKGLEWIGHIYYSGVTYYNPSLKSRVTISVDTSRNQFSLKLSSVTAADTAVYYCTREDSSNWRSRGQGTLVTVSSGSGGGGSGGGGSGGGGSFEQVQLLQSGAAVTKPGASVRVSCEASGYNIRDYFIHWWRQAPGQGLQWVGWINPKTGQPNNPRQFQGRVSLTRHASWDFDTFSFYMDLKALRSDDTAVYFCARQRSDYWDFDVWGSGTQVTVSSASTKGPTRIQNPDPAVYQLRDSKSSDKSVCLFTDFDSQTNVSQSKDSDVYITDKTVLDMRSMDFKSNSAVAWSNKSDFACANAFNNSIIPEDTFFPSPESSCGTQSFGLLDPKLCYLLDGILFIYGVILTALFLRVKFSRSADAPAYQQGQNQLYNELNLGRREEYDVLDKRRGRDPEMGGKPQRRKNPQEGLYNELQKDKMAEAYSEIGMKGERRRGKGHDGLYQGLSTATKDTYDALHMQALPPR

SEQ ID NO: 13431 - protein, 1101 aa, Artificial Sequence
  Synthetic Polypeptide
MALPVTALLLPLALLLHAARPEVQLVESGGGLVQPGGSLRLSCAASGFSFSDFWMSWVRQAPGKGLEWVATISQAGSEKDYVDSVKGRFTISRDNAKKSLYLQMNSLRAEDTAVYYCASGVYSFDYRGQGTLVTVSSGTGGGGSGGGGSGGGGSEFQSALTQPPSASGSPGQSITISCTGTSNNFVSWYQQHAGKAPKLVIYDVNKRPSGVPDRFSGSKSGNTASLTVSGLQTDDEAVYYCGSLVGNWDVIFGGGTKLTVLLEDLKNVFPPEVAVFEPSEAEISHTQKATLVCLATGFYPDHVELSWWVNGKEVHSGVSTDPQPLKEQPALNDSRYCLSSRLRVSATFWQNPRNHFRCQVQFYGLSENDEWTQDRAKPVTQIVSAEAWGRADCGSQSFGLLDPKLCYLLDGILFIYGVILTALFLRVKFSRSADAPAYQQGQNQLYNELNLGRREEYDVLDKRRGRDPEMGGKPQRRKNPQEGLYNELQKDKMAEAYSEIGMKGERRRGKGHDGLYQGLSTATKDTYDALHMQALPPRRAKRSGSGATNFSLLKQAGDVEENPGPTSMDWIWRILFLVGAATGAHSGPQLQLQESGPGLVKPSETLSLTCTVSGDSISSGDYYWGWIRQPPGKGLEWIGHIYYSGVTYYNPSLKSRVTISVDTSRNQFSLKLSSVTAADTAVYYCTREDSSNWRSRGQGTLVTVSSGSGGGGSGGGGSGGGGSFEQPQLQESGPTLVEASETLSLTCAVSGDSTAACNSFWGWVRQPPGKGLEWVGSLSHCASYWNRGWTYHNPSLKSRLTLALDTPKNLVFLKLNSVTAADTATYYCARFGGEVLRYTDWPKPAWVDLWGRGTLVTVSSTRIQNPDPAVYQLRDSKSSDKSVCLFTDFDSQTNVSQSKDSDVYITDKTVLDMRSMDFKSNSAVAWSNKSDFACANAFNNSIIPEDTFFPSPESSCGTQSFGLLDPKLCYLLDGILFIYGVILTALFLRVKFSRSADAPAYQQGQNQLYNELNLGRREEYDVLDKRRGRDPEMGGKPQRRKNPQEGLYNELQKDKMAEAYSEIGMKGERRRGKGHDGLYQGLSTATKDTYDALHMQALPPR

SEQ ID NO: 13432 - protein, 1086 aa, Artificial Sequence
  Synthetic Polypeptide
MALPVTALLLPLALLLHAARPEVQLVESGGGLVQPGGSLRLSCAASGFSFSDFWMSWVRQAPGKGLEWVATISQAGSEKDYVDSVKGRFTISRDNAKKSLYLQMNSLRAEDTAVYYCASGVYSFDYRGQGTLVTVSSGTGGGGSGGGGSGGGGSEFEIVLTQSPGTLSLSPGETAIISCRTSQYGSLAWYQQRPGQAPRLVIYSGSTRAAGIPDRFSGSRWGPDYNLTISNLESGDFGVYYCQQYEFFGQGTKVQVDIKRLEDLKNVFPPEVAVFEPSEAEISHTQKATLVCLATGFYPDHVELSWWVNGKEVHSGVSTDPQPLKEQPALNDSRYCLSSRLRVSATFWQNPRNHFRCQVQFYGLSENDEWTQDRAKPVTQIVSAEAWGRADCGSQSFGLLDPKLCYLLDGILFIYGVILTALFLRVKFSRSADAPAYQQGQNQLYNELNLGRREEYDVLDKRRGRDPEMGGKPQRRKNPQEGLYNELQKDKMAEAYSEIGMKGERRRGKGHDGLYQGLSTATKDTYDALHMQALPPRRAKRSGSGATNFSLLKQAGDVEENPGPTSMDWIWRILFLVGAATGAHSGPQLQLQESGPGLVKPSETLSLTCTVSGDSISSGDYYWGWIRQPPGKGLEWIGHIYYSGVTYYNPSLKSRVTISVDTSRNQFSLKLSSVTAADTAVYYCTREDSSNWRSRGQGTLVTVSSGSGGGGSGGGGSGGGGSFEQVQLVQSGGQMKKPGESMRISCRASGYEFIDCTLNWIRLAPGKRPEWMGWLKPRGGAVNYARPLQGRVTMTRDVYSDTAFLELRSLTVDDTAVYFCTRGKNCDYNWDFEHWGRGTPVIVSSTRIQNPDPAVYQLRDSKSSDKSVCLFTDFDSQTNVSQSKDSDVYITDKTVLDMRSMDFKSNSAVAWSNKSDFACANAFNNSIIPEDTFFPSPESSCGTQSFGLLDPKLCYLLDGILFIYGVILTALFLRVKFSRSADAPAYQQGQNQLYNELNLGRREEYDVLDKRRGRDPEMGGKPQRRKNPQEGLYNELQKDKMAEAYSEIGMKGERRRGKGHDGLYQGLSTATKDTYDALHMQALPPR

SEQ ID NO: 13433 - protein, 1096 aa, Artificial Sequence
  Synthetic Polypeptide
MALPVTALLLPLALLLHAARPEVQLVESGGGLVQPGGSLRLSCAASGFSFSDFWMSWVRQAPGKGLEWVATISQAGSEKDYVDSVKGRFTISRDNAKKSLYLQMNSLRAEDTAVYYCASGVYSFDYRGQGTLVTVSSGTGGGGSGGGGSGGGGSEFELVLTQSPGTLSLSAGERATLSCRASQSVSSGSLAWYQQKPGQAPRLLIYGASTRATGIPDRFSGSGSGTDFTLTIGRLEPEDLAVYYCQQYGTSPYTFGQGTKLEILEDLKNVFPPEVAVFEPSEAEISHTQKATLVCLATGFYPDHVELSWWVNGKEVHSGVSTDPQPLKEQPALNDSRYCLSSRLRVSATFWQNPRNHFRCQVQFYGLSENDEWTQDRAKPVTQIVSAEAWGRADCGSQSFGLLDPKLCYLLDGILFIYGVILTALFLRVKFSRSADAPAYQQGQNQLYNELNLGRREEYDVLDKRRGRDPEMGGKPQRRKNPQEGLYNELQKDKMAEAYSEIGMKGERRRGKGHDGLYQGLSTATKDTYDALHMQALPPRRAKRSGSGATNFSLLKQAGDVEENPGPTSMDWIWRILFLVGAATGAHSGPQLQLQESGPGLVKPSETLSLTCTVSGDSISSGDYYWGWIRQPPGKGLEWIGHIYYSGVTYYNPSLKSRVTISVDTSRNQFSLKLSSVTAADTAVYYCTREDSSNWRSRGQGTLVTVSSGSGGGGSGGGGSGGGGSFELEQSGAEVKKPGSSVQVSCKASGGTFSMYGFNWVRQAPGHGLEWMGGIIPIFGTSNYAQKFRGRVTFTADQATSTAYMELTNLRSDDTAVYYCARDFGPDWEDGDSYDGSGRGFFDFWGQGTLVTVSSTRIQNPDPAVYQLRDSKSSDKSVCLFTDFDSQTNVSQSKDSDVYITDKTVLDMRSMDFKSNSAVAWSNKSDFACANAFNNSIIPEDTFFPSPESSCGTQSFGLLDPKLCYLLDGILFIYGVILTALFLRVKFSRSADAPAYQQGQNQLYNELNLGRREEYDVLDKRRGRDPEMGGKPQRRKNPQEGLYNELQKDKMAEAYSEIGMKGERRRGKGHDGLYQGLSTATKDTYDALHMQALPPR

SEQ ID NO: 13434 - protein, 1076 aa, Artificial Sequence
  Synthetic Polypeptide
MALPVTALLLPLALLLHAARPEVQLVESGGGLVQPGGSLRLSCAASGFSFSDFWMSWVRQAPGKGLEWVATISQAGSEKDYVDSVKGRFTISRDNAKKSLYLQMNSLRAEDTAVYYCASGVYSFDYRGQGTLVTVSSGTGGGGSGGGGSGGGGSEFDIQMTQSPSSLSASVGDRVTITCQASQDINNYLNWYQQKPGKAPKLLIYDASNLQTGVPSRFSGSGSGTDFTFTIEDIATYYCQQYTFGPGTKVDIKLEDLKNVFPPEVAVFEPSEAEISHTQKATLVCLATGFYPDHVELSWWVNGKEVHSGVSTDPQPLKEQPALNDSRYCLSSRLRVSATFWQNPRNHFRCQVQFYGLSENDEWTQDRAKPVTQIVSAEAWGRADCGSQSFGLLDPKLCYLLDGILFIYGVILTALFLRVKFSRSADAPAYQQGQNQLYNELNLGRREEYDVLDKRRGRDPEMGGKPQRRKNPQEGLYNELQKDKMAEAYSEIGMKGERRRGKGHDGLYQGLSTATKDTYDALHMQALPPRRAKRSGSGATNFSLLKQAGDVEENPGPTSMDWIWRILFLVGAATGAHSGPQLQLQESGPGLVKPSETLSLTCTVSGDSISSGDYYWGWIRQPPGKGLEWIGHIYYSGVTYYNPSLKSRVTISVDTSRNQFSLKLSSVTAADTAVYYCTREDSSNWRSRGQGTLVTVSSGSGGGGSGGGGSGGGGSFEEVQLLESGGGLVQPGGSLRLSCAASGFTFSWYSMTWVRQAPGKGLEWVSSIVPWGDFTQYADSVKGRFTISRDNSKNTLYLQMNSLRAEDTAVYYCAKGPGWGSFDLWGRGTLVTVSSTRIQNPDPAVYQLRDSKSSDKSVCLFTDFDSQTNVSQSKDSDVYITDKTVLDMRSMDFKSNSAVAWSNKSDFACANAFNNSIIPEDTFFPSPESSCGTQSFGLLDPKLCYLLDGILFIYGVILTALFLRVKFSRSADAPAYQQGQNQLYNELNLGRREEYDVLDKRRGRDPEMGGKPQRRKNPQEGLYNELQKDKMAEAYSEIGMKGERRRGKGHDGLYQGLSTATKDTYDALHMQALPPR

SEQ ID NO: 13435 - protein, 1086 aa, Artificial Sequence
  Synthetic Polypeptide
MALPVTALLLPLALLLHAARPEVQLVESGGGLVQPGGSLRLSCAASGFSFSDFWMSWVRQAPGKGLEWVATISQAGSEKDYVDSVKGRFTISRDNAKKSLYLQMNSLRAEDTAVYYCASGVYSFDYRGQGTLVTVSSGTGGGGSGGGGSGGGGSEFDIQMTQSPSSLSASVGDRVTITCTASLSVSSTYLHWYQQKPGSSPKLWIYSTSNLASGVPSRFSGSGSGTSYTLTISSLQPEDFATYYCHQYHRSPLTFGGGTKVEIKRLEDLKNVFPPEVAVFEPSEAEISHTQKATLVCLATGFYPDHVELSWWVNGKEVHSGVSTDPQPLKEQPALNDSRYCLSSRLRVSATFWQNPRNHFRCQVQFYGLSENDEWTQDRAKPVTQIVSAEAWGRADCGSQSFGLLDPKLCYLLDGILFIYGVILTALFLRVKFSRSADAPAYQQGQNQLYNELNLGRREEYDVLDKRRGRDPEMGGKPQRRKNPQEGLYNELQKDKMAEAYSEIGMKGERRRGKGHDGLYQGLSTATKDTYDALHMQALPPRRAKRSGSGATNFSLLKQAGDVEENPGPTSMDWIWRILFLVGAATGAHSGPQLQLQESGPGLVKPSETLSLTCTVSGDSISSGDYYWGWIRQPPGKGLEWIGHIYYSGVTYYNPSLKSRVTISVDTSRNQFSLKLSSVTAADTAVYYCTREDSSNWRSRGQGTLVTVSSGSGGGGSGGGGSGGGGSFEEVQLVESGGGLVQPGGSLRLSCAASGFSLTKYGVHWVRQAPGKGLEWVGVKWAGGSTDYNSALMSRFTISKDNAKNSLYLQMNSLRAEDTAVYYCARDHRDAMDYWGQGTLVTVSSTRIQNPDPAVYQLRDSKSSDKSVCLFTDFDSQTNVSQSKDSDVYITDKTVLDMRSMDFKSNSAVAWSNKSDFACANAFNNSIIPEDTFFPSPESSCGTQSFGLLDPKLCYLLDGILFIYGVILTALFLRVKFSRSADAPAYQQGQNQLYNELNLGRREEYDVLDKRRGRDPEMGGKPQRRKNPQEGLYNELQKDKMAEAYSEIGMKGERRRGKGHDGLYQGLSTATKDTYDALHMQALPPR

SEQ ID NO: 13436 - protein, 1090 aa, Artificial Sequence
  Synthetic Polypeptide
MALPVTALLLPLALLLHAARPEVQLVESGGGLVQPGGSLRLSCAASGFSFSDFWMSWVRQAPGKGLEWVATISQAGSEKDYVDSVKGRFTISRDNAKKSLYLQMNSLRAEDTAVYYCASGVYSFDYRGQGTLVTVSSGTGGGGSGGGGSGGGGSEFDIQMTQSPSSLSASVGDRVTITCKASQDVGTAVAWYQQKPGKAPKLLIYSASYRSTGVPSRFSGSGSGTDFTLTISSLQPEDFATYYCQHHYSAPWTFGGGTKVEIKLEDLKNVFPPEVAVFEPSEAEISHTQKATLVCLATGFYPDHVELSWWVNGKEVHSGVSTDPQPLKEQPALNDSRYCLSSRLRVSATFWQNPRNHFRCQVQFYGLSENDEWTQDRAKPVTQIVSAEAWGRADCGSQSFGLLDPKLCYLLDGILFIYGVILTALFLRVKFSRSADAPAYQQGQNQLYNELNLGRREEYDVLDKRRGRDPEMGGKPQRRKNPQEGLYNELQKDKMAEAYSEIGMKGERRRGKGHDGLYQGLSTATKDTYDALHMQALPPRRAKRSGSGATNFSLLKQAGDVEENPGPTSMDWIWRILFLVGAATGAHSGPQLQLQESGPGLVKPSETLSLTCTVSGDSISSGDYYWGWIRQPPGKGLEWIGHIYYSGVTYYNPSLKSRVTISVDTSRNQFSLKLSSVTAADTAVYYCTREDSSNWRSRGQGTLVTVSSGSGGGGSGGGGSGGGGSFEEVQLVESGGGLVQPGGSLRLSCAASGFTFSRNGMSWVRQAPGKGLEWVATVSSGGSYIYYADSVKGRFTISRDNAKNSLYLQMNSLRAEDTAVYYCARQGTTALATRFFDVWGQGTLVTVSSTRIQNPDPAVYQLRDSKSSDKSVCLFTDFDSQTNVSQSKDSDVYITDKTVLDMRSMDFKSNSAVAWSNKSDFACANAFNNSIIPEDTFFPSPESSCGTQSFGLLDPKLCYLLDGILFIYGVILTALFLRVKFSRSADAPAYQQGQNQLYNELNLGRREEYDVLDKRRGRDPEMGGKPQRRKNPQEGLYNELQKDKMAEAYSEIGMKGERRRGKGHDGLYQGLSTATKDTYDALHMQALPPR

SEQ ID NO: 13437 - protein, 1086 aa, Artificial Sequence
  Synthetic Polypeptide
MALPVTALLLPLALLLHAARPEVQLVESGGGLVQPGGSLRLSCAASGFSFSDFWMSWVRQAPGKGLEWVATISQAGSEKDYVDSVKGRFTISRDNAKKSLYLQMNSLRAEDTAVYYCASGVYSFDYRGQGTLVTVSSGTGGGGSGGGGSGGGGSEFDIQMTQSPPSLSASVGGKVTITCKASQDIDRYMAWYQDKPGKGPKLLIHDTSTLQPGIPSRFSGSGSGRDYSFSISNLEPEDIATYYCLQYDNLWTFGGGTKLEIKRLEDLKNVFPPEVAVFEPSEAEISHTQKATLVCLATGFYPDHVELSWWVNGKEVHSGVSTDPQPLKEQPALNDSRYCLSSRLRVSATFWQNPRNHFRCQVQFYGLSENDEWTQDRAKPVTQIVSAEAWGRADCGSQSFGLLDPKLCYLLDGILFIYGVILTALFLRVKFSRSADAPAYQQGQNQLYNELNLGRREEYDVLDKRRGRDPEMGGKPQRRKNPQEGLYNELQKDKMAEAYSEIGMKGERRRGKGHDGLYQGLSTATKDTYDALHMQALPPRRAKRSGSGATNFSLLKQAGDVEENPGPTSMDWIWRILFLVGAATGAHSGPQLQLQESGPGLVKPSETLSLTCTVSGDSISSGDYYWGWIRQPPGKGLEWIGHIYYSGVTYYNPSLKSRVTISVDTSRNQFSLKLSSVTAADTAVYYCTREDSSNWRSRGQGTLVTVSSGSGGGGSGGGGSGGGGSFEQVQLVQSGAELVKPGASVKMSCKASGYIFTNYNIHWVKKSPGQGLEWIGAIYPGNGDAPYSQKFQDRATLTADTSSSTTYMELSSLTSEDSAVYYCVRANWDVAFAYWGQGTLVSVSSTRIQNPDPAVYQLRDSKSSDKSVCLFTDFDSQTNVSQSKDSDVYITDKTVLDMRSMDFKSNSAVAWSNKSDFACANAFNNSIIPEDTFFPSPESSCGTQSFGLLDPKLCYLLDGILFIYGVILTALFLRVKFSRSADAPAYQQGQNQLYNELNLGRREEYDVLDKRRGRDPEMGGKPQRRKNPQEGLYNELQKDKMAEAYSEIGMKGERRRGKGHDGLYQGLSTATKDTYDALHMQALPPR

SEQ ID NO: 13438 - protein, 1087 aa, Artificial Sequence
  Synthetic Polypeptide
MALPVTALLLPLALLLHAARPEVQLVESGGGLVQPGGSLRLSCAASGFSFSDFWMSWVRQAPGKGLEWVATISQAGSEKDYVDSVKGRFTISRDNAKKSLYLQMNSLRAEDTAVYYCASGVYSFDYRGQGTLVTVSSGTGGGGSGGGGSGGGGSEFDIQMTQSPASLSASVGETVTITCRVSGNIHNYLAWYQQKQGKSPQLLVYNAKTLADGVPSRFSGSGSGTQYSLKINSLQPEDFGSYYCQHFWSNPYTFGGGTKLEIKLEDLKNVFPPEVAVFEPSEAEISHTQKATLVCLATGFYPDHVELSWWVNGKEVHSGVSTDPQPLKEQPALNDSRYCLSSRLRVSATFWQNPRNHFRCQVQFYGLSENDEWTQDRAKPVTQIVSAEAWGRADCGSQSFGLLDPKLCYLLDGILFIYGVILTALFLRVKFSRSADAPAYQQGQNQLYNELNLGRREEYDVLDKRRGRDPEMGGKPQRRKNPQEGLYNELQKDKMAEAYSEIGMKGERRRGKGHDGLYQGLSTATKDTYDALHMQALPPRRAKRSGSGATNFSLLKQAGDVEENPGPTSMDWIWRILFLVGAATGAHSGPQLQLQESGPGLVKPSETLSLTCTVSGDSISSGDYYWGWIRQPPGKGLEWIGHIYYSGVTYYNPSLKSRVTISVDTSRNQFSLKLSSVTAADTAVYYCTREDSSNWRSRGQGTLVTVSSGSGGGGSGGGGSGGGGSFEQVQLQQSGASVKVSCKASELVRPGTGYAFTNYLIEWVKQRPGQGLEWIGVINPGSGGTNYNEKFKGKATLTADKSSSTAYMQLSSLTSDDSAVYFCARYRSYDWYFDVWGAGTTVTVSSTRIQNPDPAVYQLRDSKSSDKSVCLFTDFDSQTNVSQSKDSDVYITDKTVLDMRSMDFKSNSAVAWSNKSDFACANAFNNSIIPEDTFFPSPESSCGTQSFGLLDPKLCYLLDGILFIYGVILTALFLRVKFSRSADAPAYQQGQNQLYNELNLGRREEYDVLDKRRGRDPEMGGKPQRRKNPQEGLYNELQKDKMAEAYSEIGMKGERRRGKGHDGLYQGLSTATKDTYDALHMQALPPR

SEQ ID NO: 13439 - protein, 1086 aa, Artificial Sequence
  Synthetic Polypeptide
MALPVTALLLPLALLLHAARPEVQLVESGGGLVQPGGSLRLSCAASGFSFSDFWMSWVRQAPGKGLEWVATISQAGSEKDYVDSVKGRFTISRDNAKKSLYLQMNSLRAEDTAVYYCASGVYSFDYRGQGTLVTVSSGTGGGGSGGGGSGGGGSEFDIQMTQSFSSLSASVGDRVTITCRASQDISNYLNWYQQKPGKAPKLLIYYTSRLHSGVPSRFSGSGSGTDYTLTISSLQPEDFATYFCQQGNTLPWTFGGGTKLEIKRLEDLKNVFPPEVAVFEPSEAEISHTQKATLVCLATGFYPDHVELSWWVNGKEVHSGVSTDPQPLKEQPALNDSRYCLSSRLRVSATFWQNPRNHFRCQVQFYGLSENDEWTQDRAKPVTQIVSAEAWGRADCGSQSFGLLDPKLCYLLDGILFIYGVILTALFLRVKFSRSADAPAYQQGQNQLYNELNLGRREEYDVLDKRRGRDPEMGGKPQRRKNPQEGLYNELQKDKMAEAYSEIGMKGERRRGKGHDGLYQGLSTATKDTYDALHMQALPPRRAKRSGSGATNFSLLKQAGDVEENPGPTSMDWIWRILFLVGAATGAHSGPQLQLQESGPGLVKPSETLSLTCTVSGDSISSGDYYWGWIRQPPGKGLEWIGHIYYSGVTYYNPSLKSRVTISVDTSRNQFSLKLSSVTAADTAVYYCTREDSSNWRSRGQGTLVTVSSGSGGGGSGGGGSGGGGSFEEVQLVQSGGGLVQSGGSLRLSCRASGYTFTRYWMLWVRQRPGKGLEWVAEINPRNDRTNYNEKFKTRFTISVDRSKNTLYLQMDSLRAEDTAVYFCALGGGYAMDYWGQGTLVTVSSTRIQNPDPAVYQLRDSKSSDKSVCLFTDFDSQTNVSQSKDSDVYITDKTVLDMRSMDFKSNSAVAWSNKSDFACANAFNNSIIPEDTFFPSPESSCGTQSFGLLDPKLCYLLDGILFIYGVILTALFLRVKFSRSADAPAYQQGQNQLYNELNLGRREEYDVLDKRRGRDPEMGGKPQRRKNPQEGLYNELQKDKMAEAYSEIGMKGERRRGKGHDGLYQGLSTATKDTYDALHMQALPPR

SEQ ID NO: 13440 - protein, 1087 aa, Artificial Sequence
  Synthetic Polypeptide
MALPVTALLLPLALLLHAARPEVQLVESGGGLVQPGGSLRLSCAASGFSFSDFWMSWVRQAPGKGLEWVATISQAGSEKDYVDSVKGRFTISRDNAKKSLYLQMNSLRAEDTAVYYCASGVYSFDYRGQGTLVTVSSGTGGGGSGGGGSGGGGSEFDIQMTQSPASLSASVGETVTIICRASVNIYSYLAWYQQKQGKSPQLLVYNAKILAEGVPSRFSGSGSGTQFSLKINSLQPEDFGSYYCQHHYGTFTFGSGTKLEIKRLEDLKNVFPPEVAVFEPSEAEISHTQKATLVCLATGFYPDHVELSWWVNGKEVHSGVSTDPQPLKEQPALNDSRYCLSSRLRVSATFWQNPRNHFRCQVQFYGLSENDEWTQDRAKPVTQIVSAEAWGRADCGSQSFGLLDPKLCYLLDGILFIYGVILTALFLRVKFSRSADAPAYQQGQNQLYNELNLGRREEYDVLDKRRGRDPEMGGKPQRRKNPQEGLYNELQKDKMAEAYSEIGMKGERRRGKGHDGLYQGLSTATKDTYDALHMQALPPRRAKRSGSGATNFSLLKQAGDVEENPGPTSMDWIWRILFLVGAATGAHSGPQLQLQESGPGLVKPSETLSLTCTVSGDSISSGDYYWGWIRQPPGKGLEWIGHIYYSGVTYYNPSLKSRVTISVDTSRNQFSLKLSSVTAADTAVYYCTREDSSNWRSRGQGTLVTVSSGSGGGGSGGGGSGGGGSFEQVQLKESGPGLVAPSQSLSITCTISGFSLTSYGVHWVRQPPGKGLEWLVVIWSDGSTTYNSALKSRLSISKDNSKSQVFLKMNSLQTDDTAIYYCASHYGSTLAFASWGHGTLVTVSAATRIQNPDPAVYQLRDSKSSDKSVCLFTDFDSQTNVSQSKDSDVYITDKTVLDMRSMDFKSNSAVAWSNKSDFACANAFNNSIIPEDTFFPSPESSCGTQSFGLLDPKLCYLLDGILFIYGVILTALFLRVKFSRSADAPAYQQGQNQLYNELNLGRREEYDVLDKRRGRDPEMGGKPQRRKNPQEGLYNELQKDKMAEAYSEIGMKGERRRGKGHDGLYQGLSTATKDTYDALHMQALPPR

SEQ ID NO: 13441 - protein, 1095 aa, Artificial Sequence
  Synthetic Polypeptide
MALPVTALLLPLALLLHAARPEVQLVESGGGLVQPGGSLRLSCAASGFSFSDFWMSWVRQAPGKGLEWVATISQAGSEKDYVDSVKGRFTISRDNAKKSLYLQMNSLRAEDTAVYYCASGVYSFDYRGQGTLVTVSSGTGGGGSGGGGSGGGGSEFDIVMTQSHKFMSTSVGDRVSVTCKASQNVGNNVAWYQQKPGQSPKVLIYSASYRYSGVPDRFTGSGSGTDFTLTISNVQSEDLAEYFCQQYNTYPFTFGSGTKLEIKLEDLKNVFPPEVAVFEPSEAEISHTQKATLVCLATGFYPDHVELSWWVNGKEVHSGVSTDPQPLKEQPALNDSRYCLSSRLRVSATFWQNPRNHFRCQVQFYGLSENDEWTQDRAKPVTQIVSAEAWGRADCGSQSFGLLDPKLCYLLDGILFIYGVILTALFLRVKFSRSADAPAYQQGQNQLYNELNLGRREEYDVLDKRRGRDPEMGGKPQRRKNPQEGLYNELQKDKMAEAYSEIGMKGERRRGKGHDGLYQGLSTATKDTYDALHMQALPPRRAKRSGSGATNFSLLKQAGDVEENPGPTSMDWIWRILFLVGAATGAHSGPQLQLQESGPGLVKPSETLSLTCTVSGDSISSGDYYWGWIRQPPGKGLEWIGHIYYSGVTYYNPSLKSRVTISVDTSRNQFSLKLSSVTAADTAVYYCTREDSSNWRSRGQGTLVTVSSGSGGGGSGGGGSGGGGSFEEVQLEESGGGLVQPGGSMKLSCVASGFTFSNYWMNWVRQSPEKGLEWVAEIRFKSHNYATHFAESVKGRFTISRDDSKSSVYLQMNNLRAEDTGIYYCTRRIGNSDYDWWYFDVWGAGTSVTVSSASTRIQNPDPAVYQLRDSKSSDKSVCLFTDFDSQTNVSQSKDSDVYITDKTVLDMRSMDFKSNSAVAWSNKSDFACANAFNNSIIPEDTFFPSPESSCGTQSFGLLDPKLCYLLDGILFIYGVILTALFLRVKFSRSADAPAYQQGQNQLYNELNLGRREEYDVLDKRRGRDPEMGGKPQRRKNPQEGLYNELQKDKMAEAYSEIGMKGERRRGKGHDGLYQGLSTATKDTYDALHMQALPPR

SEQ ID NO: 13442 - protein, 1088 aa, Artificial Sequence
  Synthetic Polypeptide
MALPVTALLLPLALLLHAARPEVQLVESGGGLVQPGGSLRLSCAASGFSFSDFWMSWVRQAPGKGLEWVATISQAGSEKDYVDSVKGRFTISRDNAKKSLYLQMNSLRAEDTAVYYCASGVYSFDYRGQGTLVTVSSGTGGGGSGGGGSGGGGSEFDQIVLTQSPAIMSASPGEKVTISCSASSSVSYMYWYQQKPGSSPKPWIYRTSNLASGVPARFSGSGSGTSYSLTISNMEAEDAAAYYCQQYHSYPTTFGGGTKLEVKLEDLKNVFPPEVAVFEPSEAEISHTQKATLVCLATGFYPDHVELSWWVNGKEVHSGVSTDPQPLKEQPALNDSRYCLSSRLRVSATFWQNPRNHFRCQVQFYGLSENDEWTQDRAKPVTQIVSAEAWGRADCGSQSFGLLDPKLCYLLDGILFIYGVILTALFLRVKFSRSADAPAYQQGQNQLYNELNLGRREEYDVLDKRRGRDPEMGGKPQRRKNPQEGLYNELQKDKMAEAYSEIGMKGERRRGKGHDGLYQGLSTATKDTYDALHMQALPPRRAKRSGSGATNFSLLKQAGDVEENPGPTSMDWIWRILFLVGAATGAHSGPQLQLQESGPGLVKPSETLSLTCTVSGDSISSGDYYWGWIRQPPGKGLEWIGHIYYSGVTYYNPSLKSRVTISVDTSRNQFSLKLSSVTAADTAVYYCTREDSSNWRSRGQGTLVTVSSGSGGGGSGGGGSGGGGSFEEVQLVESGGGLVQPKGSLKLSCAASGFSFNTYAMNWVRQAPGKGLEWIAHIRSKSNNFATYYADSVKDRFSISRDASENILFLQMNNLKTEDTAMYYCVRQGGDFPMDYWGQGTSVTVSSTRIQNPDPAVYQLRDSKSSDKSVCLFTDFDSQTNVSQSKDSDVYITDKTVLDMRSMDFKSNSAVAWSNKSDFACANAFNNSIIPEDTFFPSPESSCGTQSFGLLDPKLCYLLDGILFIYGVILTALFLRVKFSRSADAPAYQQGQNQLYNELNLGRREEYDVLDKRRGRDPEMGGKPQRRKNPQEGLYNELQKDKMAEAYSEIGMKGERRRGKGHDGLYQGLSTATKDTYDALHMQALPPR

SEQ ID NO: 13443 - protein, 1087 aa, Artificial Sequence
  Synthetic Polypeptide
MALPVTALLLPLALLLHAARPEVQLVESGGGLVQPGGSLRLSCAASGFSFSDFWMSWVRQAPGKGLEWVATISQAGSEKDYVDSVKGRFTISRDNAKKSLYLQMNSLRAEDTAVYYCASGVYSFDYRGQGTLVTVSSGTGGGGSGGGGSGGGGSEFDDIQMTQSSSSFSVSLGDRVTITCMASEDIYIRLAWYQQKPGNAPRLLISAATSLETGVPSRFSGSGSGKDYTLSITSLQTEDVGTYYCQQYWSSPWTFGGGTKLEINLEDLKNVFPPEVAVFEPSEAEISHTQKATLVCLATGFYPDHVELSWWVNGKEVHSGVSTDPQPLKEQPALNDSRYCLSSRLRVSATFWQNPRNHFRCQVQFYGLSENDEWTQDRAKPVTQIVSAEAWGRADCGSQSFGLLDPKLCYLLDGILFIYGVILTALFLRVKFSRSADAPAYQQGQNQLYNELNLGRREEYDVLDKRRGRDPEMGGKPQRRKNPQEGLYNELQKDKMAEAYSEIGMKGERRRGKGHDGLYQGLSTATKDTYDALHMQALPPRRAKRSGSGATNFSLLKQAGDVEENPGPTSMDWIWRILFLVGAATGAHSGPQLQLQESGPGLVKPSETLSLTCTVSGDSISSGDYYWGWIRQPPGKGLEWIGHIYYSGVTYYNPSLKSRVTISVDTSRNQFSLKLSSVTAADTAVYYCTREDSSNWRSRGQGTLVTVSSGSGGGGSGGGGSGGGGSFEDVQLQESGPGLVKPSQSLSLTCTVTGYSITSDYTWNWIRQFPGNKLEWMGYITYSGSTSYNPSLKSRNSITRDTSKNQFFLQLNSVTTEDTATYYCARLGRRYTMDYWGQGTSVTVSSTRIQNPDPAVYQLRDSKSSDKSVCLFTDFDSQTNVSQSKDSDVYITDKTVLDMRSMDFKSNSAVAWSNKSDFACANAFNNSIIPEDTFFPSPESSCGTQSFGLLDPKLCYLLDGILFIYGVILTALFLRVKFSRSADAPAYQQGQNQLYNELNLGRREEYDVLDKRRGRDPEMGGKPQRRKNPQEGLYNELQKDKMAEAYSEIGMKGERRRGKGHDGLYQGLSTATKDTYDALHMQALPPR

SEQ ID NO: 13444 - protein, 1090 aa, Artificial Sequence
  Synthetic Polypeptide
MALPVTALLLPLALLLHAARPEVQLVESGGGLVQPGGSLRLSCAASGFSFSDFWMSWVRQAPGKGLEWVATISQAGSEKDYVDSVKGRFTISRDNAKKSLYLQMNSLRAEDTAVYYCASGVYSFDYRGQGTLVTVSSGTGGGGSGGGGSGGGGSEFDDIQMTQSPSSLSASVGDRVTITCRASQSISSYLNWYQQKPGKAPKLLIYDASNLETGVPSRFSGSGSGTDFTFTISSLQPEDIATYYCQQYDNLPLTFGGGTKVDIKRLEDLKNVFPPEVAVFEPSEAEISHTQKATLVCLATGFYPDHVELSWWVNGKEVHSGVSTDPQPLKEQPALNDSRYCLSSRLRVSATFWQNPRNHFRCQVQFYGLSENDEWTQDRAKPVTQIVSAEAWGRADCGSQSFGLLDPKLCYLLDGILFIYGVILTALFLRVKFSRSADAPAYQQGQNQLYNELNLGRREEYDVLDKRRGRDPEMGGKPQRRKNPQEGLYNELQKDKMAEAYSEIGMKGERRRGKGHDGLYQGLSTATKDTYDALHMQALPPRRAKRSGSGATNFSLLKQAGDVEENPGPTSMDWIWRILFLVGAATGAHSGPQLQLQESGPGLVKPSETLSLTCTVSGDSISSGDYYWGWIRQPPGKGLEWIGHIYYSGVTYYNPSLKSRVTISVDTSRNQFSLKLSSVTAADTAVYYCTREDSSNWRSRGQGTLVTVSSGSGGGGSGGGGSGGGGSFEQVQLVESGGGVVQPGRSLRLSCAASGFTFSSYAMHWVRQAPGKGLEWVAVISYDGSNKYYADSVKGRFTISRDNSKNTLYLQMNSLRAEDTAVYYCARAHNSSSWSFDYWGQGTLVTVSSTRIQNPDPAVYQLRDSKSSDKSVCLFTDFDSQTNVSQSKDSDVYITDKTVLDMRSMDFKSNSAVAWSNKSDFACANAFNNSIIPEDTFFPSPESSCGTQSFGLLDPKLCYLLDGILFIYGVILTALFLRVKFSRSADAPAYQQGQNQLYNELNLGRREEYDVLDKRRGRDPEMGGKPQRRKNPQEGLYNELQKDKMAEAYSEIGMKGERRRGKGHDGLYQGLSTATKDTYDALHMQALPPR

SEQ ID NO: 13445 - protein, 1099 aa, Artificial Sequence
  Synthetic Polypeptide
MALPVTALLLPLALLLHAARPEVQLVESGGGLVQPGGSLRLSCAASGFSFSDFWMSWVRQAPGKGLEWVATISQAGSEKDYVDSVKGRFTISRDNAKKSLYLQMNSLRAEDTAVYYCASGVYSFDYRGQGTLVTVSSGTGGGGSGGGGSGGGGSEFDDVVMTQSPLSLPVSLGDQASISCRSSQRLVHSNGNTYLHWYLQKPGQSPKLLIYRVSNRFPGVPDRFSGSGSGTDFTLKISRVEAEDLGIYFCSQSTHVPYTFGGGTKLEIKRLEDLKNVFPPEVAVFEPSEAEISHTQKATLVCLATGFYPDHVELSWWVNGKEVHSGVSTDPQPLKEQPALNDSRYCLSSRLRVSATFWQNPRNHFRCQVQFYGLSENDEWTQDRAKPVTQIVSAEAWGRADCGSQSFGLLDPKLCYLLDGILFIYGVILTALFLRVKFSRSADAPAYQQGQNQLYNELNLGRREEYDVLDKRRGRDPEMGGKPQRRKNPQEGLYNELQKDKMAEAYSEIGMKGERRRGKGHDGLYQGLSTATKDTYDALHMQALPPRRAKRSGSGATNFSLLKQAGDVEENPGPTSMDWIWRILFLVGAATGAHSGPQLQLQESGPGLVKPSETLSLTCTVSGDSISSGDYYWGWIRQPPGKGLEWIGHIYYSGVTYYNPSLKSRVTISVDTSRNQFSLKLSSVTAADTAVYYCTREDSSNWRSRGQGTLVTVSSGSGGGGSGGGGSGGGGSFEEVRLQQSGPDLIKPGASVKMSCKASGYTFTGYVMHWVKQRPGQGLEWIGFINPYNDDIQSNERFRGKATLTSDKSSTTAYMELSSLTSEDSAVYYCARGAGYNFDGAYRFFDFWGQGTTLTVSSTRIQNPDPAVYQLRDSKSSDKSVCLFTDFDSQTNVSQSKDSDVYITDKTVLDMRSMDFKSNSAVAWSNKSDFACANAFNNSIIPEDTFFPSPESSCGTQSFGLLDPKLCYLLDGILFIYGVILTALFLRVKFSRSADAPAYQQGQNQLYNELNLGRREEYDVLDKRRGRDPEMGGKPQRRKNPQEGLYNELQKDKMAEAYSEIGMKGERRRGKGHDGLYQGLSTATKDTYDALHMQALPPR

SEQ ID NO: 13446 - protein, 1090 aa, Artificial Sequence
  Synthetic Polypeptide
MALPVTALLLPLALLLHAARPEVQLVESGGGLVQPGGSLRLSCAASGFSFSDFWMSWVRQAPGKGLEWVATISQAGSEKDYVDSVKGRFTISRDNAKKSLYLQMNSLRAEDTAVYYCASGVYSFDYRGQGTLVTVSSGTGGGGSGGGGSGGGGSEFDSYELTQPPSVSVSPGQTATISCSGDQLGGKYGHWYQKKPGQSPVLVLYQDRKRPAGIPERFSGSSSGNTITLTISGTQAVDEADYYCQAWDTNLGGVFGGGTKVTVLGQLEDLKNVFPPEVAVFEPSEAEISHTQKATLVCLATGFYPDHVELSWWVNGKEVHSGVSTDPQPLKEQPALNDSRYCLSSRLRVSATFWQNPRNHFRCQVQFYGLSENDEWTQDRAKPVTQIVSAEAWGRADCGSQSFGLLDPKLCYLLDGILFIYGVILTALFLRVKFSRSADAPAYQQGQNQLYNELNLGRREEYDVLDKRRGRDPEMGGKPQRRKNPQEGLYNELQKDKMAEAYSEIGMKGERRRGKGHDGLYQGLSTATKDTYDALHMQALPPRRAKRSGSGATNFSLLKQAGDVEENPGPTSMDWIWRILFLVGAATGAHSGPQLQLQESGPGLVKPSETLSLTCTVSGDSISSGDYYWGWIRQPPGKGLEWIGHIYYSGVTYYNPSLKSRVTISVDTSRNQFSLKLSSVTAADTAVYYCTREDSSNWRSRGQGTLVTVSSGSGGGGSGGGGSGGGGSFEQVQLVESGAEVKKPGASVKVSCKASGYTFTGYYMHWVRQAPGQGLEWMGRINPNSGGTNYAQKFQGRVTMTRDTSISTAYMELSRLRSDDTAVYYCASPRGRGSAFDIWGQGTLVTVSSTRIQNPDPAVYQLRDSKSSDKSVCLFTDFDSQTNVSQSKDSDVYITDKTVLDMRSMDFKSNSAVAWSNKSDFACANAFNNSIIPEDTFFPSPESSCGTQSFGLLDPKLCYLLDGILFIYGVILTALFLRVKFSRSADAPAYQQGQNQLYNELNLGRREEYDVLDKRRGRDPEMGGKPQRRKNPQEGLYNELQKDKMAEAYSEIGMKGERRRGKGHDGLYQGLSTATKDTYDALHMQALPPR

SEQ ID NO: 13447 - protein, 1093 aa, Artificial Sequence
  Synthetic Polypeptide
MALPVTALLLPLALLLHAARPEVQLVESGGGLVQPGGSLRLSCAASGFSFSDFWMSWVRQAPGKGLEWVATISQAGSEKDYVDSVKGRFTISRDNAKKSLYLQMNSLRAEDTAVYYCASGVYSFDYRGQGTLVTVSSGTGGGGSGGGGSGGGGSEFDNFMLTQPHSVSESPGKTVTISCTRSSGSIASKYVQWYQQRPGSSPTTVIYEDNQRPSGVPDRFSGSIDTSSNSASLTISGLRTEDEADYYCHSYDSNNHSVFGGGTKVTVLGQLEDLKNVFPPEVAVFEPSEAEISHTQKATLVCLATGFYPDHVELSWWVNGKEVHSGVSTDPQPLKEQPALNDSRYCLSSRLRVSATFWQNPRNHFRCQVQFYGLSENDEWTQDRAKPVTQIVSAEAWGRADCGSQSFGLLDPKLCYLLDGILFIYGVILTALFLRVKFSRSADAPAYQQGQNQLYNELNLGRREEYDVLDKRRGRDPEMGGKPQRRKNPQEGLYNELQKDKMAEAYSEIGMKGERRRGKGHDGLYQGLSTATKDTYDALHMQALPPRRAKRSGSGATNFSLLKQAGDVEENPGPTSMDWIWRILFLVGAATGAHSGPQLQLQESGPGLVKPSETLSLTCTVSGDSISSGDYYWGWIRQPPGKGLEWIGHIYYSGVTYYNPSLKSRVTISVDTSRNQFSLKLSSVTAADTAVYYCTREDSSNWRSRGQGTLVTVSSGSGGGGSGGGGSGGGGSFEEVQLVESGGGVVQPGGSLRLSCAASGFTFSSYAMSWVRQAPGKGLEWVSAISGSGGSTYYADSVKGRFSISRDNSKNTLYLQMNSLRAEDTAVYYCARTRSSGAFDIWGQGTLVTVSSTRIQNPDPAVYQLRDSKSSDKSVCLFTDFDSQTNVSQSKDSDVYITDKTVLDMRSMDFKSNSAVAWSNKSDFACANAFNNSIIPEDTFFPSPESSCGTQSFGLLDPKLCYLLDGILFIYGVILTALFLRVKFSRSADAPAYQQGQNQLYNELNLGRREEYDVLDKRRGRDPEMGGKPQRRKNPQEGLYNELQKDKMAEAYSEIGMKGERRRGKGHDGLYQGLSTATKDTYDALHMQALPPR

SEQ ID NO: 13448 - protein, 1088 aa, Artificial Sequence
  Synthetic Polypeptide
MALPVTALLLPLALLLHAARPEVQLVESGGGLVQPGGSLRLSCAASGFSFSDFWMSWVRQAPGKGLEWVATISQAGSEKDYVDSVKGRFTISRDNAKKSLYLQMNSLRAEDTAVYYCASGVYSFDYRGQGTLVTVSSGTGGGGSGGGGSGGGGSEFDIQMNQSPSSLSASLGDTITITCHASQNINVWLSWYQQKPGNIPKLLIYKASNLHTGVPSRFSGSGSGTGFTITISSLQPEDIATYYCQQGQSYPWTFGGGTKLEIKRLEDLKNVFPPEVAVFEPSEAEISHTQKATLVCLATGFYPDHVELSWWVNGKEVHSGVSTDPQPLKEQPALNDSRYCLSSRLRVSATFWQNPRNHFRCQVQFYGLSENDEWTQDRAKPVTQIVSAEAWGRADCGSQSFGLLDPKLCYLLDGILFIYGVILTALFLRVKFSRSADAPAYQQGQNQLYNELNLGRREEYDVLDKRRGRDPEMGGKPQRRKNPQEGLYNELQKDKMAEAYSEIGMKGERRRGKGHDGLYQGLSTATKDTYDALHMQALPPRRAKRSGSGATNFSLLKQAGDVEENPGPTSMDWIWRILFLVGAATGAHSGPQLQLQESGPGLVKPSETLSLTCTVSGDSISSGDYYWGWIRQPPGKGLEWIGHIYYSGVTYYNPSLKSRVTISVDTSRNQFSLKLSSVTAADTAVYYCTREDSSNWRSRGQGTLVTVSSGSGGGGSGGGGSGGGGSFEEVQLQQSGPELVKPGASVKISCKASGYSFTGYFMNWVKQSHGKSLEYIGRFNPYNGETLYNQKFKGKATLTVDKSSSTVHMELLSVTSEDSAVYYCGRSGNDDAMDYWGQGTSVTVSSATRIQNPDPAVYQLRDSKSSDKSVCLFTDFDSQTNVSQSKDSDVYITDKTVLDMRSMDFKSNSAVAWSNKSDFACANAFNNSIIPEDTFFPSPESSCGTQSFGLLDPKLCYLLDGILFIYGVILTALFLRVKFSRSADAPAYQQGQNQLYNELNLGRREEYDVLDKRRGRDPEMGGKPQRRKNPQEGLYNELQKDKMAEAYSEIGMKGERRRGKGHDGLYQGLSTATKDTYDALHMQALPPR

SEQ ID NO: 13449 - protein, 1089 aa, Artificial Sequence
  Synthetic Polypeptide
MALPVTALLLPLALLLHAARPEVQLVESGGGLVQPGGSLRLSCAASGFSFSDFWMSWVRQAPGKGLEWVATISQAGSEKDYVDSVKGRFTISRDNAKKSLYLQMNSLRAEDTAVYYCASGVYSFDYRGQGTLVTVSSGTGGGGSGGGGSGGGGSEFEIVLTQSPATLSLSPGERATLSCRASQSVRSYLAWYQQKPGQAPRLLIYDASNRATGIPARFSGSGSGTDFTLTISSLEPEDFAVYYCQQRSNWPPTFGQGTKVEIKLEDLKNVFPPEVAVFEPSEAEISHTQKATLVCLATGFYPDHVELSWWVNGKEVHSGVSTDPQPLKEQPALNDSRYCLSSRLRVSATFWQNPRNHFRCQVQFYGLSENDEWTQDRAKPVTQIVSAEAWGRADCGSQSFGLLDPKLCYLLDGILFIYGVILTALFLRVKFSRSADAPAYQQGQNQLYNELNLGRREEYDVLDKRRGRDPEMGGKPQRRKNPQEGLYNELQKDKMAEAYSEIGMKGERRRGKGHDGLYQGLSTATKDTYDALHMQALPPRRAKRSGSGATNFSLLKQAGDVEENPGPTSMDWIWRILFLVGAATGAHSGPQLQLQESGPGLVKPSETLSLTCTVSGDSISSGDYYWGWIRQPPGKGLEWIGHIYYSGVTYYNPSLKSRVTISVDTSRNQFSLKLSSVTAADTAVYYCTREDSSNWRSRGQGTLVTVSSGSGGGGSGGGGSGGGGSFEQLQVQESGPGLVKPSETLSLTCTVSGGSISNSYFSWGWIRQPPGKGLEWIGSFYYGEKTYYNPSLKSRATISIDTSKSQFSLKLSSVTAADTAVYYCPRGPTMIRGVIDSWGQGTLVTVSSTRIQNPDPAVYQLRDSKSSDKSVCLFTDFDSQTNVSQSKDSDVYITDKTVLDMRSMDFKSNSAVAWSNKSDFACANAFNNSIIPEDTFFPSPESSCGTQSFGLLDPKLCYLLDGILFIYGVILTALFLRVKFSRSADAPAYQQGQNQLYNELNLGRREEYDVLDKRRGRDPEMGGKPQRRKNPQEGLYNELQKDKMAEAYSEIGMKGERRRGKGHDGLYQGLSTATKDTYDALHMQALPPR

SEQ ID NO: 13450 - protein, 1098 aa, Artificial Sequence
  Synthetic Polypeptide
MALPVTALLLPLALLLHAARPEVQLVESGGGLVQPGGSLRLSCAASGFSFSDFWMSWVRQAPGKGLEWVATISQAGSEKDYVDSVKGRFTISRDNAKKSLYLQMNSLRAEDTAVYYCASGVYSFDYRGQGTLVTVSSGTGGGGSGGGGSGGGGSEFDIVMTQTPLSLPVTPGEPASISCRSSRSLLDSDDGNTYLDWYLQKPGQSPQLLIYTLSYRASGVPDRFSGSGSGTDFTLKISRVEAEDVGVYYCMQRVEFPITFGQGTRLEIKRLEDLKNVFPPEVAVFEPSEAEISHTQKATLVCLATGFYPDHVELSWWVNGKEVHSGVSTDPQPLKEQPALNDSRYCLSSRLRVSATFWQNPRNHFRCQVQFYGLSENDEWTQDRAKPVTQIVSAEAWGRADCGSQSFGLLDPKLCYLLDGILFIYGVILTALFLRVKFSRSADAPAYQQGQNQLYNELNLGRREEYDVLDKRRGRDPEMGGKPQRRKNPQEGLYNELQKDKMAEAYSEIGMKGERRRGKGHDGLYQGLSTATKDTYDALHMQALPPRRAKRSGSGATNFSLLKQAGDVEENPGPTSMDWIWRILFLVGAATGAHSGPQLQLQESGPGLVKPSETLSLTCTVSGDSISSGDYYWGWIRQPPGKGLEWIGHIYYSGVTYYNPSLKSRVTISVDTSRNQFSLKLSSVTAADTAVYYCTREDSSNWRSRGQGTLVTVSSGSGGGGSGGGGSGGGGSFEQVQLVESGGGVVQPGRSLRLSCAASGFIFSRYGMHWVRQAPGKGLKWVAVIWYDGSNKLYADSVKGRFTISRDNSKNTLYLQMNSLRAEDTAVYYCARDYYDNSRHHWGFDYWGQGTLVTVSSTRIQNPDPAVYQLRDSKSSDKSVCLFTDFDSQTNVSQSKDSDVYITDKTVLDMRSMDFKSNSAVAWSNKSDFACANAFNNSIIPEDTFFPSPESSCGTQSFGLLDPKLCYLLDGILFIYGVILTALFLRVKFSRSADAPAYQQGQNQLYNELNLGRREEYDVLDKRRGRDPEMGGKPQRRKNPQEGLYNELQKDKMAEAYSEIGMKGERRRGKGHDGLYQGLSTATKDTYDALHMQALPPR

SEQ ID NO: 13451 - protein, 1088 aa, Artificial Sequence
  Synthetic Polypeptide
MALPVTALLLPLALLLHAARPEVQLVESGGGLVQPGGSLRLSCAASGFSFSDFWMSWVRQAPGKGLEWVATISQAGSEKDYVDSVKGRFTISRDNAKKSLYLQMNSLRAEDTAVYYCASGVYSFDYRGQGTLVTVSSGTGGGGSGGGGSGGGGSEFEIQMTQSPSSMSASLGDTITITCQATQDIFKNLNWYQQKPGKPPSLLIYYATELAEGVPSRFSGSGSGSDYSLTISNLESEDFAAYYCLQFFEFPFTFGSGTKLEMKLEDLKNVFPPEVAVFEPSEAEISHTQKATLVCLATGFYPDHVELSWWVNGKEVHSGVSTDPQPLKEQPALNDSRYCLSSRLRVSATFWQNPRNHFRCQVQFYGLSENDEWTQDRAKPVTQIVSAEAWGRADCGSQSFGLLDPKLCYLLDGILFIYGVILTALFLRVKFSRSADAPAYQQGQNQLYNELNLGRREEYDVLDKRRGRDPEMGGKPQRRKNPQEGLYNELQKDKMAEAYSEIGMKGERRRGKGHDGLYQGLSTATKDTYDALHMQALPPRRAKRSGSGATNFSLLKQAGDVEENPGPTSMDWIWRILFLVGAATGAHSGPQLQLQESGPGLVKPSETLSLTCTVSGDSISSGDYYWGWIRQPPGKGLEWIGHIYYSGVTYYNPSLKSRVTISVDTSRNQFSLKLSSVTAADTAVYYCTREDSSNWRSRGQGTLVTVSSGSGGGGSGGGGSGGGGSFEQVQLQQSGAELVRPGTSVKVSCKASGYVFTNYWIEWIKQRPGQGLEWIGVMNPGSGETTYNEKFKGKATLTADKSSSTAYMQLSSLTSVDSAVYFCARDHDRDYYAMDYWGQGTSVTVSSTRIQNPDPAVYQLRDSKSSDKSVCLFTDFDSQTNVSQSKDSDVYITDKTVLDMRSMDFKSNSAVAWSNKSDFACANAFNNSIIPEDTFFPSPESSCGTQSFGLLDPKLCYLLDGILFIYGVILTALFLRVKFSRSADAPAYQQGQNQLYNELNLGRREEYDVLDKRRGRDPEMGGKPQRRKNPQEGLYNELQKDKMAEAYSEIGMKGERRRGKGHDGLYQGLSTATKDTYDALHMQALPPR

SEQ ID NO: 13452 - protein, 1085 aa, Artificial Sequence
  Synthetic Polypeptide
MALPVTALLLPLALLLHAARPEVQLVESGGGLVQPGGSLRLSCAASGFSFSDFWMSWVRQAPGKGLEWVATISQAGSEKDYVDSVKGRFTISRDNAKKSLYLQMNSLRAEDTAVYYCASGVYSFDYRGQGTLVTVSSGTGGGGSGGGGSGGGGSEFDILLTQSPAILSVSPGERVSFSCRASQNIGTSIHWYQQRTNGSPRLLIKYASESVSGIPSRFSGSGSGTDFTLSINSVESEDIADYYCQHTNSWPTTFGGGTKLEIKRLEDLKNVFPPEVAVFEPSEAEISHTQKATLVCLATGFYPDHVELSWWVNGKEVHSGVSTDPQPLKEQPALNDSRYCLSSRLRVSATFWQNPRNHFRCQVQFYGLSENDEWTQDRAKPVTQIVSAEAWGRADCGSQSFGLLDPKLCYLLDGILFIYGVILTALFLRVKFSRSADAPAYQQGQNQLYNELNLGRREEYDVLDKRRGRDPEMGGKPQRRKNPQEGLYNELQKDKMAEAYSEIGMKGERRRGKGHDGLYQGLSTATKDTYDALHMQALPPRRAKRSGSGATNFSLLKQAGDVEENPGPTSMDWIWRILFLVGAATGAHSGPQLQLQESGPGLVKPSETLSLTCTVSGDSISSGDYYWGWIRQPPGKGLEWIGHIYYSGVTYYNPSLKSRVTISVDTSRNQFSLKLSSVTAADTAVYYCTREDSSNWRSRGQGTLVTVSSGSGGGGSGGGGSGGGGSFEQVQLQQSDAELVKPGASVKISCKASGYTFTDHAIHWVKQKPEQGLEWIGYFSPGNGDIKYNEKFKGKATLTADKSSSTAYMQLNSLTSEDSAVYFCKRSYGNYDYWGQGTTLTVSSTRIQNPDPAVYQLRDSKSSDKSVCLFTDFDSQTNVSQSKDSDVYITDKTVLDMRSMDFKSNSAVAWSNKSDFACANAFNNSIIPEDTFFPSPESSCGTQSFGLLDPKLCYLLDGILFIYGVILTALFLRVKFSRSADAPAYQQGQNQLYNELNLGRREEYDVLDKRRGRDPEMGGKPQRRKNPQEGLYNELQKDKMAEAYSEIGMKGERRRGKGHDGLYQGLSTATKDTYDALHMQALPPR

SEQ ID NO: 13453 - protein, 1090 aa, Artificial Sequence
  Synthetic Polypeptide
MALPVTALLLPLALLLHAARPEVQLVESGGGLVQPGGSLRLSCAASGFSFSDFWMSWVRQAPGKGLEWVATISQAGSEKDYVDSVKGRFTISRDNAKKSLYLQMNSLRAEDTAVYYCASGVYSFDYRGQGTLVTVSSGTGGGGSGGGGSGGGGSEFDIVMTQSPDSLAVSLGERATINCKSSQSLLNSGDQKNYLTWYQQKPGQPPKLLIYWASTRESGVPDRFSGSGSGTDFTLTISSLQAEDVAVYYCQNDYSYPLTFGQGTKVEIKLEDLKNVFPPEVAVFEPSEAEISHTQKATLVCLATGFYPDHVELSWWVNGKEVHSGVSTDPQPLKEQPALNDSRYCLSSRLRVSATFWQNPRNHFRCQVQFYGLSENDEWTQDRAKPVTQIVSAEAWGRADCGSQSFGLLDPKLCYLLDGILFIYGVILTALFLRVKFSRSADAPAYQQGQNQLYNELNLGRREEYDVLDKRRGRDPEMGGKPQRRKNPQEGLYNELQKDKMAEAYSEIGMKGERRRGKGHDGLYQGLSTATKDTYDALHMQALPPRRAKRSGSGATNFSLLKQAGDVEENPGPTSMDWIWRILFLVGAATGAHSGPQLQLQESGPGLVKPSETLSLTCTVSGDSISSGDYYWGWIRQPPGKGLEWIGHIYYSGVTYYNPSLKSRVTISVDTSRNQFSLKLSSVTAADTAVYYCTREDSSNWRSRGQGTLVTVSSGSGGGGSGGGGSGGGGSFEQVQLVQSGAEVKKTGSSVKVSCKASGYTFTDHAIHVWRQAPGQALEWMGHFSPGNTDIKYNDKFKGRVTLTVDRSMSTAYMELSSLRSEDTAMYYCKTSTFFFDYWGQGTMVTVSSTRIQNPDPAVYQLRDSKSSDKSVCLFTDFDSQTNVSQSKDSDVYITDKTVLDMRSMDFKSNSAVAWSNKSDFACANAFNNSIIPEDTFFPSPESSCGTQSFGLLDPKLCYLLDGILFIYGVILTALFLRVKFSRSADAPAYQQGQNQLYNELNLGRREEYDVLDKRRGRDPEMGGKPQRRKNPQEGLYNELQKDKMAEAYSEIGMKGERRRGKGHDGLYQGLSTATKDTYDALHMQALPPR

SEQ ID NO: 13454 - protein, 1089 aa, Artificial Sequence
  Synthetic Polypeptide
MALPVTALLLPLALLLHAARPEVQLVESGGGLVQPGGSLRLSCAASGFSFSDFWMSWVRQAPGKGLEWVATISQAGSEKDYVDSVKGRFTISRDNAKKSLYLQMNSLRAEDTAVYYCASGVYSFDYRGQGTLVTVSSGTGGGGSGGGGSGGGGSEFDIQMTQSPSSLSASVGDRVTITCKASQDVSIAVAWYQQKPGKAPKVLIYSASYRYTGVPDRFSGSGSGTDFTFTISSLQPEDIAVYYCQQHYITPLTFGGGTKVEIKLEDLKNVFPPEVAVFEPSEAEISHTQKATLVCLATGFYPDHVELSWWVNGKEVHSGVSTDPQPLKEQPALNDSRYCLSSRLRVSATFWQNPRNHFRCQVQFYGLSENDEWTQDRAKPVTQIVSAEAWGRADCGSQSFGLLDPKLCYLLDGILFIYGVILTALFLRVKFSRSADAPAYQQGQNQLYNELNLGRREEYDVLDKRRGRDPEMGGKPQRRKNPQEGLYNELQKDKMAEAYSEIGMKGERRRGKGHDGLYQGLSTATKDTYDALHMQALPPRRAKRSGSGATNFSLLKQAGDVEENPGPTSMDWIWRILFLVGAATGAHSGPQLQLQESGPGLVKPSETLSLTCTVSGDSISSGDYYWGWIRQPPGKGLEWIGHIYYSGVTYYNPSLKSRVTISVDTSRNQFSLKLSSVTAADTAVYYCTREDSSNWRSRGQGTLVTVSSGSGGGGSGGGGSGGGGSFEQIQLVQSGHEVKKPGASVKVSCKASGYTFTNYGMNWVRQAPGQGLEWMGWINTKTGEPTYAEEFKGRFVFSLETSASTAYLQISSLKAEDTAMYFCGRGGYGSSYWYFDVWGQGTTVTVSSTRIQNPDPAVYQLRDSKSSDKSVCLFTDFDSQTNVSQSKDSDVYITDKTVLDMRSMDFKSNSAVAWSNKSDFACANAFNNSIIPEDTFFPSPESSCGTQSFGLLDPKLCYLLDGILFIYGVILTALFLRVKFSRSADAPAYQQGQNQLYNELNLGRREEYDVLDKRRGRDPEMGGKPQRRKNPQEGLYNELQKDKMAEAYSEIGMKGERRRGKGHDGLYQGLSTATKDTYDALHMQALPPR

SEQ ID NO: 13455 - protein, 1091 aa, Artificial Sequence
  Synthetic Polypeptide
MALPVTALLLPLALLLHAARPEVQLVESGGGLVQPGGSLRLSCAASGFSFSDFWMSWVRQAPGKGLEWVATISQAGSEKDYVDSVKGRFTISRDNAKKSLYLQMNSLRAEDTAVYYCASGVYSFDYRGQGTLVTVSSGTGGGGSGGGGSGGGGSEFDIVMTQSPDSLAVSLGERATINCRASKSVSTSGYSYMHWYQQKPGQPPKLLIYLASNLESGVPDRFSGSGSGTDFTLTISSLQAEDVAVYYCQHSRELPYTFGQGTKLEIKLEDLKNVFPPEVAVFEPSEAEISHTQKATLVCLATGFYPDHVELSWWVNGKEVHSGVSTDPQPLKEQPALNDSRYCLSSRLRVSATFWQNPRNHFRCQVQFYGLSENDEWTQDRAKPVTQIVSAEAWGRADCGSQSFGLLDPKLCYLLDGILFIYGVILTALFLRVKFSRSADAPAYQQGQNQLYNELNLGRREEYDVLDKRRGRDPEMGGKPQRRKNPQEGLYNELQKDKMAEAYSEIGMKGERRRGKGHDGLYQGLSTATKDTYDALHMQALPPRRAKRSGSGATNFSLLKQAGDVEENPGPTSMDWIWRILFLVGAATGAHSGPQLQLQESGPGLVKPSETLSLTCTVSGDSISSGDYYWGWIRQPPGKGLEWIGHIYYSGVTYYNPSLKSRVTISVDTSRNQFSLKLSSVTAADTAVYYCTREDSSNWRSRGQGTLVTVSSGSGGGGSGGGGSGGGGSFEQVQLQESGPGLVKPSETLSLTCTVSGGSISSYGVHWIRQPPGKGLEWIGVIWTSGVTDYNSALMGRVTISVDTSKNQFSLKLSSVTAADTAVYYCARDGDYDRYTMDYWGQGTLVTVSSTRIQNPDPAVYQLRDSKSSDKSVCLFTDFDSQTNVSQSKDSDVYITDKTVLDMRSMDFKSNSAVAWSNKSDFACANAFNNSIIPEDTFFPSPESSCGTQSFGLLDPKLCYLLDGILFIYGVILTALFLRVKFSRSADAPAYQQGQNQLYNELNLGRREEYDVLDKRRGRDPEMGGKPQRRKNPQEGLYNELQKDKMAEAYSEIGMKGERRRGKGHDGLYQGLSTATKDTYDALHMQALPPR

SEQ ID NO: 13456 - protein, 1091 aa, Artificial Sequence
  Synthetic Polypeptide
MALPVTALLLPLALLLHAARPEVQLVESGGGLVQPGGSLRLSCAASGFSFSDFWMSWVRQAPGKGLEWVATISQAGSEKDYVDSVKGRFTISRDNAKKSLYLQMNSLRAEDTAVYYCASGVYSFDYRGQGTLVTVSSGTGGGGSGGGGSGGGGSEFDIQMTQSPSSLSASVGDRVTITCRASQSIGTSLHWYQQKPGKAPKLLIKFASRLQSGVPSRFSGSGSGTDFTLTISSLQPEDFATYYCQQSPGFPPTFGQGTKLEIKRLEDLKNVFPPEVAVFEPSEAEISHTQKATLVCLATGFYPDHVELSWWVNGKEVHSGVSTDPQPLKEQPALNDSRYCLSSRLRVSATFWQNPRNHFRCQVQFYGLSENDEWTQDRAKPVTQIVSAEAWGRADCGSQSFGLLDPKLCYLLDGILFIYGVILTALFLRVKFSRSADAPAYQQGQNQLYNELNLGRREEYDVLDKRRGRDPEMGGKPQRRKNPQEGLYNELQKDKMAEAYSEIGMKGERRRGKGHDGLYQGLSTATKDTYDALHMQALPPRRAKRSGSGATNFSLLKQAGDVEENPGPTSMDWIWRILFLVGAATGAHSGPQLQLQESGPGLVKPSETLSLTCTVSGDSISSGDYYWGWIRQPPGKGLEWIGHIYYSGVTYYNPSLKSRVTISVDTSRNQFSLKLSSVTAADTAVYYCTREDSSNWRSRGQGTLVTVSSGSGGGGSGGGGSGGGGSFEQVQLVESGGGLVKPGGSLRLSCAASGFSITTSGYYWTWIRQFPGKGLEWMGYIGYNSKTYYNPALKSRITISRDNAKNSLYLQMNSLRAEDTAVYYCARSLYGGYKDAFDSWGQGTLVTVSSTRIQNPDPAVYQLRDSKSSDKSVCLFTDFDSQTNVSQSKDSDVYITDKTVLDMRSMDFKSNSAVAWSNKSDFACANAFNNSIIPEDTFFPSPESSCGTQSFGLLDPKLCYLLDGILFIYGVILTALFLRVKFSRSADAPAYQQGQNQLYNELNLGRREEYDVLDKRRGRDPEMGGKPQRRKNPQEGLYNELQKDKMAEAYSEIGMKGERRRGKGHDGLYQGLSTATKDTYDALHMQALPPR

SEQ ID NO: 13457 - protein, 1096 aa, Artificial Sequence
  Synthetic Polypeptide
MALPVTALLLPLALLLHAARPEVQLVESGGGLVQPGGSLRLSCAASGFSFSDFWMSWVRQAPGKGLEWVATISQAGSEKDYVDSVKGRFTISRDNAKKSLYLQMNSLRAEDTAVYYCASGVYSFDYRGQGTLVTVSSGTGGGGSGGGGSGGGGSEFDEIVLTQSPLSLPVTPGEPASISCRSSQSLLHSIGYNYLDWYLQKPGQSPQLLIYLGSNRASGVPDRFSGSGSGTDFTLKISRVEAEDVGVYYCMQALQTPLTFGGGTKVEIKRLEDLKNVFPPEVAVFEPSEAEISHTQKATLVCLATGFYPDHVELSWWVNGKEVHSGVSTDPQPLKEQPALNDSRYCLSSRLRVSATFWQNPRNHFRCQVQFYGLSENDEWTQDRAKPVTQIVSAEAWGRADCGSQSFGLLDPKLCYLLDGILFIYGVILTALFLRVKFSRSADAPAYQQGQNQLYNELNLGRREEYDVLDKRRGRDPEMGGKPQRRKNPQEGLYNELQKDKMAEAYSEIGMKGERRRGKGHDGLYQGLSTATKDTYDALHMQALPPRRAKRSGSGATNFSLLKQAGDVEENPGPTSMDWIWRILFLVGAATGAHSGPQLQLQESGPGLVKPSETLSLTCTVSGDSISSGDYYWGWIRQPPGKGLEWIGHIYYSGVTYYNPSLKSRVTISVDTSRNQFSLKLSSVTAADTAVYYCTREDSSNWRSRGQGTLVTVSSGSGGGGSGGGGSGGGGSFEEVQLVESGGGVVQPGRSLRLSCAASGFTFRSYGMHWVRQAPGKGLEWVAVISYDGSNKYYTDSVNGRFTISRDNSKNTLYLQMNSLRAEDTAVYYCARGGGYYETSGPDYWGQGTLVTVSSTRIQNPDPAVYQLRDSKSSDKSVCLFTDFDSQTNVSQSKDSDVYITDKTVLDMRSMDFKSNSAVAWSNKSDFACANAFNNSIIPEDTFFPSPESSCGTQSFGLLDPKLCYLLDGILFIYGVILTALFLRVKFSRSADAPAYQQGQNQLYNELNLGRREEYDVLDKRRGRDPEMGGKPQRRKNPQEGLYNELQKDKMAEAYSEIGMKGERRRGKGHDGLYQGLSTATKDTYDALHMQALPPR

SEQ ID NO: 13458 - protein, 1094 aa, Artificial Sequence
  Synthetic Polypeptide
MALPVTALLLPLALLLHAARPEVQLVESGGGLVQPGGSLRLSCAASGFSFSDFWMSWVRQAPGKGLEWVATISQAGSEKDYVDSVKGRFTISRDNAKKSLYLQMNSLRAEDTAVYYCASGVYSFDYRGQGTLVTVSSGTGGGGSGGGGSGGGGSEFDDVVMTQSPLSLPVTPGEPASISCRSSQSLLHSIGYNYLHWFLQKPGQSPQLLIYLGSNRASGVPDRFSGSGSGTDFTLKISRVEAEDVGVYYCMQALQTPPTFGQGTRLEIKRLEDLKNVFPPEVAVFEPSEAEISHTQKATLVCLATGFYPDHVELSWWVNGKEVHSGVSTDPQPLKEQPALNDSRYCLSSRLRVSATFWQNPRNHFRCQVQFYGLSENDEWTQDRAKPVTQIVSAEAWGRADCGSQSFGLLDPKLCYLLDGILFIYGVILTALFLRVKFSRSADAPAYQQGQNQLYNELNLGRREEYDVLDKRRGRDPEMGGKPQRRKNPQEGLYNELQKDKMAEAYSEIGMKGERRRGKGHDGLYQGLSTATKDTYDALHMQALPPRRAKRSGSGATNFSLLKQAGDVEENPGPTSMDWIWRILFLVGAATGAHSGPQLQLQESGPGLVKPSETLSLTCTVSGDSISSGDYYWGWIRQPPGKGLEWIGHIYYSGVTYYNPSLKSRVTISVDTSRNQFSLKLSSVTAADTAVYYCTREDSSNWRSRGQGTLVTVSSGSGGGGSGGGGSGGGGSFEQLQLQESGPGLVKPSGTLSLTCAVSGGSISSSNWWSWVRQPPGKGLEWIGEIYHSGSTNYNPSLKSRVTISVDKSKNQFSLKLSSVTAADTAVYYCVGSPYGDYVLDYWGQGTLVTVSSTRIQNPDPAVYQLRDSKSSDKSVCLFTDFDSQTNVSQSKDSDVYITDKTVLDMRSMDFKSNSAVAWSNKSDFACANAFNNSIIPEDTFFPSPESSCGTQSFGLLDPKLCYLLDGILFIYGVILTALFLRVKFSRSADAPAYQQGQNQLYNELNLGRREEYDVLDKRRGRDPEMGGKPQRRKNPQEGLYNELQKDKMAEAYSEIGMKGERRRGKGHDGLYQGLSTATKDTYDALHMQALPPR

SEQ ID NO: 13459 - protein, 1092 aa, Artificial Sequence
  Synthetic Polypeptide
MALPVTALLLPLALLLHAARPEVQLVESGGGLVQPGGSLRLSCAASGFSFSDFWMSWVRQAPGKGLEWVATISQAGSEKDYVDSVKGRFTISRDNAKKSLYLQMNSLRAEDTAVYYCASGVYSFDYRGQGTLVTVSSGTGGGGSGGGGSGGGGSEFDEIVLTQSPGTLSLSLGERATLSCRASQSISSSFLAWYQQKPGQAPKLLIYAASTRATGIPDRFSGSGSGTDFTLTISRLEPEDFAVYYCQQYGRSLSFGGGTKVEVKLEDLKNVFPPEVAVFEPSEAEISHTQKATLVCLATGFYPDHVELSWWVNGKEVHSGVSTDPQPLKEQPALNDSRYCLSSRLRVSATFWQNPRNHFRCQVQFYGLSENDEWTQDRAKPVTQIVSAEAWGRADCGSQSFGLLDPKLCYLLDGILFIYGVILTALFLRVKFSRSADAPAYQQGQNQLYNELNLGRREEYDVLDKRRGRDPEMGGKPQRRKNPQEGLYNELQKDKMAEAYSEIGMKGERRRGKGHDGLYQGLSTATKDTYDALHMQALPPRRAKRSGSGATNFSLLKQAGDVEENPGPTSMDWIWRILFLVGAATGAHSGPQLQLQESGPGLVKPSETLSLTCTVSGDSISSGDYYWGWIRQPPGKGLEWIGHIYYSGVTYYNPSLKSRVTISVDTSRNQFSLKLSSVTAADTAVYYCTREDSSNWRSRGQGTLVTVSSGSGGGGSGGGGSGGGGSFEQVQLQQSGPGLVKPSQTLSLTCAISGDSVSGNSATWNWIRQSPSRGLEWLGRTYYRSKWNHDYAESVKSRITINPDTSKNQFSLQLNSVTPEDTAVYYCARGDSSSWYAFDYWGQGTLVTVSSTRIQNPDPAVYQLRDSKSSDKSVCLFTDFDSQTNVSQSKDSDVYITDKTVLDMRSMDFKSNSAVAWSNKSDFACANAFNNSIIPEDTFFPSPESSCGTQSFGLLDPKLCYLLDGILFIYGVILTALFLRVKFSRSADAPAYQQGQNQLYNELNLGRREEYDVLDKRRGRDPEMGGKPQRRKNPQEGLYNELQKDKMAEAYSEIGMKGERRRGKGHDGLYQGLSTATKDTYDALHMQALPPR

SEQ ID NO: 13460 - protein, 1091 aa, Artificial Sequence
  Synthetic Polypeptide
MALPVTALLLPLALLLHAARPEVQLVESGGGLVQPGGSLRLSCAASGFSFSDFWMSWVRQAPGKGLEWVATISQAGSEKDYVDSVKGRFTISRDNAKKSLYLQMNSLRAEDTAVYYCASGVYSFDYRGQGTLVTVSSGTGGGGSGGGGSGGGGSEFDQSVVTQPPSVSVAPGKTARITCGRNNIGSKSVHWYQQKPGQAPVLVVYDDSDRPSGIPERFSGSNSGNTATLTISRVEAGDEADYYCQVWDSSSDHVVFGGGTKLTVLGLEDLKNVFPPEVAVFEPSEAEISHTQKATLVCLATGFYPDHVELSWWVNGKEVHSGVSTDPQPLKEQPALNDSRYCLSSRLRVSATFWQNPRNHFRCQVQFYGLSENDEWTQDRAKPVTQIVSAEAWGRADCGSQSFGLLDPKLCYLLDGILFIYGVILTALFLRVKFSRSADAPAYQQGQNQLYNELNLGRREEYDVLDKRRGRDPEMGGKPQRRKNPQEGLYNELQKDKMAEAYSEIGMKGERRRGKGHDGLYQGLSTATKDTYDALHMQALPPRRAKRSGSGATNFSLLKQAGDVEENPGPTSMDWIWRILFLVGAATGAHSGPQLQLQESGPGLVKPSETLSLTCTVSGDSISSGDYYWGWIRQPPGKGLEWIGHIYYSGVTYYNPSLKSRVTISVDTSRNQFSLKLSSVTAADTAVYYCTREDSSNWRSRGQGTLVTVSSGSGGGGSGGGGSGGGGSFEVQLVQSGGGVMRPGGSLRLSCAASGFTFDDYGMSWVRQAPGKGLEWVSGINWNGGSTGYADSVRGRFTISRDNAKNSLYLQMNSLRAEDTALYYCARERGYGYHDPHDYWGQGTLVTVSSTRIQNPDPAVYQLRDSKSSDKSVCLFTDFDSQTNVSQSKDSDVYITDKTVLDMRSMDFKSNSAVAWSNKSDFACANAFNNSIIPEDTFFPSPESSCGTQSFGLLDPKLCYLLDGILFIYGVILTALFLRVKFSRSADAPAYQQGQNQLYNELNLGRREEYDVLDKRRGRDPEMGGKPQRRKNPQEGLYNELQKDKMAEAYSEIGMKGERRRGKGHDGLYQGLSTATKDTYDALHMQALPPR

SEQ ID NO: 13461 - protein, 1104 aa, Artificial Sequence
  Synthetic Polypeptide
MALPVTALLLPLALLLHAARPEVQLVESGGGLVQPGGSLRLSCAASGFSFSDFWMSWVRQAPGKGLEWVATISQAGSEKDYVDSVKGRFTISRDNAKKSLYLQMNSLRAEDTAVYYCASGVYSFDYRGQGTLVTVSSGTGGGGSGGGGSGGGGSEFEQKLISEEDLEFQAVVTQPPSASGTPGQRVTISCSGSSSNIGSNTVNWYQQVPGTAPKLLIYSNNQRPSGVPDRFSGSKSGTSASLAISGLQSEDEADYYCAAWDDSLNGWVFGGGTKLTVLLEDLKNVFPPEVAVFEPSEAEISHTQKATLVCLATGFYPDHVELSWWVNGKEVHSGVSTDPQPLKEQPALNDSRYCLSSRLRVSATFWQNPRNHFRCQVQFYGLSENDEWTQDRAKPVTQIVSAEAWGRADCGSQSFGLLDPKLCYLLDGILFIYGVILTALFLRVKFSRSADAPAYQQGQNQLYNELNLGRREEYDVLDKRRGRDPEMGGKPQRRKNPQEGLYNELQKDKMAEAYSEIGMKGERRRGKGHDGLYQGLSTATKDTYDALHMQALPPRRAKRSGSGATNFSLLKQAGDVEENPGPTSMDWIWRILFLVGAATGAHSGPQLQLQESGPGLVKPSETLSLTCTVSGDSISSGDYYWGWIRQPPGKGLEWIGHIYYSGVTYYNPSLKSRVTISVDTSRNQFSLKLSSVTAADTAVYYCTREDSSNWRSRGQGTLVTVSSGSGGGGSGGGGSGGGGSFEQMQLVQSGAEVKEPGESLRISCKGSGYSFTNFWISWVRQMPGKGLEWMGRVDPGYSYSTYSPSFQGHVTISADKSTSTAYLQWNSLKASDTAMYYCARVQYSGYYDWFDPWGQGTLVTVSSTRIQNPDPAVYQLRDSKSSDKSVCLFTDFDSQTNVSQSKDSDVYITDKTVLDMRSMDFKSNSAVAWSNKSDFACANAFNNSIIPEDTFFPSPESSCGTQSFGLLDPKLCYLLDGILFIYGVILTALFLRVKFSRSADAPAYQQGQNQLYNELNLGRREEYDVLDKRRGRDPEMGGKPQRRKNPQEGLYNELQKDKMAEAYSEIGMKGERRRGKGHDGLYQGLSTATKDTYDALHMQALPPR

SEQ ID NO: 13462 - protein, 1098 aa, Artificial Sequence
  Synthetic Polypeptide
MALPVTALLLPLALLLHAARPEVQLVESGGGLVQPGGSLRLSCAASGFSFSDFWMSWVRQAPGKGLEWVATISQAGSEKDYVDSVKGRFTISRDNAKKSLYLQMNSLRAEDTAVYYCASGVYSFDYRGQGTLVTVSSGTGGGGSGGGGSGGGGSEFEQKLISEEDLEFDIQMTQSPSTLSASVGDRVTITCRASQNINKWLAWYQQRPGKAPQLLIYKASSLESGVPSRFSGSGSGTEYTLTISSLQPDDFATYYCQQYNSYATFGQGTKVEIKRLEDLKNVFPPEVAVFEPSEAEISHTQKATLVCLATGFYPDHVELSWWVNGKEVHSGVSTDPQPLKEQPALNDSRYCLSSRLRVSATFWQNPRNHFRCQVQFYGLSENDEWTQDRAKPVTQIVSAEAWGRADCGSQSFGLLDPKLCYLLDGILFIYGVILTALFLRVKFSRSADAPAYQQGQNQLYNELNLGRREEYDVLDKRRGRDPEMGGKPQRRKNPQEGLYNELQKDKMAEAYSEIGMKGERRRGKGHDGLYQGLSTATKDTYDALHMQALPPRRAKRSGSGATNFSLLKQAGDVEENPGPTSMDWIWRILFLVGAATGAHSGPQLQLQESGPGLVKPSETLSLTCTVSGDSISSGDYYWGWIRQPPGKGLEWIGHIYYSGVTYYNPSLKSRVTISVDTSRNQFSLKLSSVTAADTAVYYCTREDSSNWRSRGQGTLVTVSSGSGGGGSGGGGSGGGGSFEQVQLVQSGAEVKKPGESLKISCKGSGYNFSNKWIGWVRQLPGRGLEWIAIIYPGYSDITYSPSFQGRVTISADTSINTAYLHWHSLKASDTAMYYCVRHTALAGFDYWGLGTLVTVSSTRIQNPDPAVYQLRDSKSSDKSVCLFTDFDSQTNVSQSKDSDVYITDKTVLDMRSMDFKSNSAVAWSNKSDFACANAFNNSIIPEDTFFPSPESSCGTQSFGLLDPKLCYLLDGILFIYGVILTALFLRVKFSRSADAPAYQQGQNQLYNELNLGRREEYDVLDKRRGRDPEMGGKPQRRKNPQEGLYNELQKDKMAEAYSEIGMKGERRRGKGHDGLYQGLSTATKDTYDALHMQALPPR

SEQ ID NO: 13463 - protein, 1090 aa, Artificial Sequence
  Synthetic Polypeptide
MALPVTALLLPLALLLHAARPEVQLVESGGGLVQPGGSLRLSCAASGFSFSDFWMSWVRQAPGKGLEWVATISQAGSEKDYVDSVKGRFTISRDNAKKSLYLQMNSLRAEDTAVYYCASGVYSFDYRGQGTLVTVSSGTGGGGSGGGGSGGGGSEFDIVLTQSPASLAVSLGQRATISCRASESVDNYGNTFMHWYQQKPGQPPKLLIYRASNLESGIPARFSGSGSRTDFTLTINPVEADDVATYYCQQSNEDPPTFGAGTKLELKLEDLKNVFPPEVAVFEPSEAEISHTQKATLVCLATGFYPDHVELSWWVNGKEVHSGVSTDPQPLKEQPALNDSRYCLSSRLRVSATFWQNPRNHFRCQVQFYGLSENDEWTQDRAKPVTQIVSAEAWGRADCGSQSFGLLDPKLCYLLDGILFIYGVILTALFLRVKFSRSADAPAYQQGQNQLYNELNLGRREEYDVLDKRRGRDPEMGGKPQRRKNPQEGLYNELQKDKMAEAYSEIGMKGERRRGKGHDGLYQGLSTATKDTYDALHMQALPPRRAKRSGSGATNFSLLKQAGDVEENPGPTSMDWIWRILFLVGAATGAHSGPQLQLQESGPGLVKPSETLSLTCTVSGDSISSGDYYWGWIRQPPGKGLEWIGHIYYSGVTYYNPSLKSRVTISVDTSRNQFSLKLSSVTAADTAVYYCTREDSSNWRSRGQGTLVTVSSGSGGGGSGGGGSGGGGSFEQIQLVQSGPELKKPGETVKISCKASGYIFTNYGMNWVKQAPGKSFKWMGWINTYTGESTYSADFKGRFAFSLETSASTAYLHINDLKNEDTATYFCARSGGYDPMDYWGQGTSVTVSSTRIQNPDPAVYQLRDSKSSDKSVCLFTDFDSQTNVSQSKDSDVYITDKTVLDMRSMDFKSNSAVAWSNKSDFACANAFNNSIIPEDTFFPSPESSCGTQSFGLLDPKLCYLLDGILFIYGVILTALFLRVKFSRSADAPAYQQGQNQLYNELNLGRREEYDVLDKRRGRDPEMGGKPQRRKNPQEGLYNELQKDKMAEAYSEIGMKGERRRGKGHDGLYQGLSTATKDTYDALHMQALPPR

SEQ ID NO: 13464 - protein, 1089 aa, Artificial Sequence
  Synthetic Polypeptide
MALPVTALLLPLALLLHAARPEVQLVESGGGLVQPGGSLRLSCAASGFSFSDFWMSWVRQAPGKGLEWVATISQAGSEKDYVDSVKGRFTISRDNAKKSLYLQMNSLRAEDTAVYYCASGVYSFDYRGQGTLVTVSSGTGGGGSGGGGSGGGGSEFDEIVLTQSPGTLSLSPGERATLSCRASQSVSNTYLAWYHQRPGQAPRLLIYGASSRATGIPDRFSGSGSGTDFALTISSLEPEDFAVYYCQQYSNSWTFGQGTKVEIKRLEDLKNVFPPEVAVFEPSEAEISHTQKATLVCLATGFYPDHVELSWWVNGKEVHSGVSTDPQPLKEQPALNDSRYCLSSRLRVSATFWQNPRNHFRCQVQFYGLSENDEWTQDRAKPVTQIVSAEAWGRADCGSQSFGLLDPKLCYLLDGILFIYGVILTALFLRVKFSRSADAPAYQQGQNQLYNELNLGRREEYDVLDKRRGRDPEMGGKPQRRKNPQEGLYNELQKDKMAEAYSEIGMKGERRRGKGHDGLYQGLSTATKDTYDALHMQALPPRRAKRSGSGATNFSLLKQAGDVEENPGPTSMDWIWRILFLVGAATGAHSGPQLQLQESGPGLVKPSETLSLTCTVSGDSISSGDYYWGWIRQPPGKGLEWIGHIYYSGVTYYNPSLKSRVTISVDTSRNQFSLKLSSVTAADTAVYYCTREDSSNWRSRGQGTLVTVSSGSGGGGSGGGGSGGGGSFEQVQLVESGGGVVQPGRSLRLSCAASGFTFSSYDMHWVRQAPGKGLEWVAVISYDGTNEYYADSVKGRFTISRDTSKNTLYLQMNSLRAEDTAVYYCARERYFDWSFDYWGQGTLVSVSSTRIQNPDPAVYQLRDSKSSDKSVCLFTDFDSQTNVSQSKDSDVYITDKTVLDMRSMDFKSNSAVAWSNKSDFACANAFNNSIIPEDTFFPSPESSCGTQSFGLLDPKLCYLLDGILFIYGVILTALFLRVKFSRSADAPAYQQGQNQLYNELNLGRREEYDVLDKRRGRDPEMGGKPQRRKNPQEGLYNELQKDKMAEAYSEIGMKGERRRGKGHDGLYQGLSTATKDTYDALHMQALPPR

SEQ ID NO: 13465 - protein, 1088 aa, Artificial Sequence
  Synthetic Polypeptide
MALPVTALLLPLALLLHAARPEVQLVESGGGLVQPGGSLRLSCAASGFSFSDFWMSWVRQAPGKGLEWVATISQAGSEKDYVDSVKGRFTISRDNAKKSLYLQMNSLRAEDTAVYYCASGVYSFDYRGQGTLVTVSSGTGGGGSGGGGSGGGGSEFDELTQDPAVSVALGQTVRITCQGDSLRSNYANWYQQKPGQAPVLVIYGQNNRPSGIPDRFSGSSSGNTASLTITGAQAADEADYYCDSRVSTGNHVVFGGGTKLTVLGQLEDLKNVFPPEVAVFEPSEAEISHTQKATLVCLATGFYPDHVELSWWVNGKEVHSGVSTDPQPLKEQPALNDSRYCLSSRLRVSATFWQNPRNHFRCQVQFYGLSENDEWTQDRAKPVTQIVSAEAWGRADCGSQSFGLLDPKLCYLLDGILFIYGVILTALFLRVKFSRSADAPAYQQGQNQLYNELNLGRREEYDVLDKRRGRDPEMGGKPQRRKNPQEGLYNELQKDKMAEAYSEIGMKGERRRGKGHDGLYQGLSTATKDTYDALHMQALPPRRAKRSGSGATNFSLLKQAGDVEENPGPTSMDWIWRILFLVGAATGAHSGPQLQLQESGPGLVKPSETLSLTCTVSGDSISSGDYYWGWIRQPPGKGLEWIGHIYYSGVTYYNPSLKSRVTISVDTSRNQFSLKLSSVTAADTAVYYCTREDSSNWRSRGQGTLVTVSSGSGGGGSGGGGSGGGGSFEEVQLVQSGAEVKKPGASVKVSCKASGYTFTSYAMHWVRQAPGQRLEWMGWINAGNGNTKYSQKFQGRVTITRDTSASTAYMELSSLRSEDTAVYYCARDISYGSFDYWGQGTLVTVSSTRIQNPDPAVYQLRDSKSSDKSVCLFTDFDSQTNVSQSKDSDVYITDKTVLDMRSMDFKSNSAVAWSNKSDFACANAFNNSIIPEDTFFPSPESSCGTQSFGLLDPKLCYLLDGILFIYGVILTALFLRVKFSRSADAPAYQQGQNQLYNELNLGRREEYDVLDKRRGRDPEMGGKPQRRKNPQEGLYNELQKDKMAEAYSEIGMKGERRRGKGHDGLYQGLSTATKDTYDALHMQALPPR

SEQ ID NO: 13466 - protein, 1090 aa, Artificial Sequence
  Synthetic Polypeptide
MALPVTALLLPLALLLHAARPEVQLVESGGGLVQPGGSLRLSCAASGFSFSDFWMSWVRQAPGKGLEWVATISQAGSEKDYVDSVKGRFTISRDNAKKSLYLQMNSLRAEDTAVYYCASGVYSFDYRGQGTLVTVSSGTGGGGSGGGGSGGGGSEFDDIVLTQTPATLSVTPGDSVSLSCRASQSISNNLHWYQQKSHESPRLLIKNASQSISGIPSKFSGSGSGTDFTLRINSVETEDFGMYFCQQSNSWPYTFGSGTKLEIKLEDLKNVFPPEVAVFEPSEAEISHTQKATLVCLATGFYPDHVELSWWVNGKEVHSGVSTDPQPLKEQPALNDSRYCLSSRLRVSATFWQNPRNHFRCQVQFYGLSENDEWTQDRAKPVTQIVSAEAWGRADCGSQSFGLLDPKLCYLLDGILFIYGVILTALFLRVKFSRSADAPAYQQGQNQLYNELNLGRREEYDVLDKRRGRDPEMGGKPQRRKNPQEGLYNELQKDKMAEAYSEIGMKGERRRGKGHDGLYQGLSTATKDTYDALHMQALPPRRAKRSGSGATNFSLLKQAGDVEENPGPTSMDWIWRILFLVGAATGAHSGPQLQLQESGPGLVKPSETLSLTCTVSGDSISSGDYYWGWIRQPPGKGLEWIGHIYYSGVTYYNPSLKSRVTISVDTSRNQFSLKLSSVTAADTAVYYCTREDSSNWRSRGQGTLVTVSSGSGGGGSGGGGSGGGGSFEQVKLQQSGPELVKPGASVKISCKASGYSFTGYYMHWVKQSHGNILDWIGYIYPYNGVSSYNQKFKGKATLTVDKSSSTAYMELRSLTSEDSAVYYCARERGLYQLRAMDYWGQGTSVTVSSTRIQNPDPAVYQLRDSKSSDKSVCLFTDFDSQTNVSQSKDSDVYITDKTVLDMRSMDFKSNSAVAWSNKSDFACANAFNNSIIPEDTFFPSPESSCGTQSFGLLDPKLCYLLDGILFIYGVILTALFLRVKFSRSADAPAYQQGQNQLYNELNLGRREEYDVLDKRRGRDPEMGGKPQRRKNPQEGLYNELQKDKMAEAYSEIGMKGERRRGKGHDGLYQGLSTATKDTYDALHMQALPPR

SEQ ID NO: 13467 - protein, 1081 aa, Artificial Sequence
  Synthetic Polypeptide
MALPVTALLLPLALLLHAARPEVQLVESGGGLVQPGGSLRLSCAASGFSFSDFWMSWVRQAPGKGLEWVATISQAGSEKDYVDSVKGRFTISRDNAKKSLYLQMNSLRAEDTAVYYCASGVYSFDYRGQGTLVTVSSGTGGGGSGGGGSGGGGSEFDDIVMTQTPAIMSASPGQKVTITCSASSSVNYMHWYQQKLGSSPKLWIYDTSKLAPGVPARFSGSGSGTSYSLTISSMEAEDAASYFCHQWSSYPYTFGSGTKLEIKLEDLKNVFPPEVAVFEPSEAEISHTQKATLVCLATGFYPDHVELSWWVNGKEVHSGVSTDPQPLKEQPALNDSRYCLSSRLRVSATFWQNPRNHFRCQVQFYGLSENDEWTQDRAKPVTQIVSAEAWGRADCGSQSFGLLDPKLCYLLDGILFIYGVILTALFLRVKFSRSADAPAYQQGQNQLYNELNLGRREEYDVLDKRRGRDPEMGGKPQRRKNPQEGLYNELQKDKMAEAYSEIGMKGERRRGKGHDGLYQGLSTATKDTYDALHMQALPPRRAKRSGSGATNFSLLKQAGDVEENPGPTSMDWIWRILFLVGAATGAHSGPQLQLQESGPGLVKPSETLSLTCTVSGDSISSGDYYWGWIRQPPGKGLEWIGHIYYSGVTYYNPSLKSRVTISVDTSRNQFSLKLSSVTAADTAVYYCTREDSSNWRSRGQGTLVTVSSGSGGGGSGGGGSGGGGSFEEVQLQESGPDLVKPSQSLSLTCTVTGYSITSGYGWHWIRQFPGNKLEWMGYIHYSGSTTYNPSLKSRISISRDTSKNQFFLQLNSVTTEDTATYYCARSLRYWGQGTTLTVSSTRIQNPDPAVYQLRDSKSSDKSVCLFTDFDSQTNVSQSKDSDVYITDKTVLDMRSMDFKSNSAVAWSNKSDFACANAFNNSIIPEDTFFPSPESSCGTQSFGLLDPKLCYLLDGILFIYGVILTALFLRVKFSRSADAPAYQQGQNQLYNELNLGRREEYDVLDKRRGRDPEMGGKPQRRKNPQEGLYNELQKDKMAEAYSEIGMKGERRRGKGHDGLYQGLSTATKDTYDALHMQALPPR

SEQ ID NO: 13468 - protein, 1084 aa, Artificial Sequence
  Synthetic Polypeptide
MALPVTALLLPLALLLHAARPEVQLVESGGGLVQPGGSLRLSCAASGFSFSDFWMSWVRQAPGKGLEWVATISQAGSEKDYVDSVKGRFTISRDNAKKSLYLQMNSLRAEDTAVYYCASGVYSFDYRGQGTLVTVSSGTGGGGSGGGGSGGGGSEFDDIQMTQSPSSLSASVGDRVTITCSATSSISYMHWYQQKPGKAPKGWIYDTSKLAHGVPSRFSGSGSGTDFTLTISSLQPEDFATYYCHQRRSYPFTFGQGTKVEIKLEDLKNVFPPEVAVFEPSEAEISHTQKATLVCLATGFYPDHVELSWWVNGKEVHSGVSTDPQPLKEQPALNDSRYCLSSRLRVSATFWQNPRNHFRCQVQFYGLSENDEWTQDRAKPVTQIVSAEAWGRADCGSQSFGLLDPKLCYLLDGILFIYGVILTALFLRVKFSRSADAPAYQQGQNQLYNELNLGRREEYDVLDKRRGRDPEMGGKPQRRKNPQEGLYNELQKDKMAEAYSEIGMKGERRRGKGHDGLYQGLSTATKDTYDALHMQALPPRRAKRSGSGATNFSLLKQAGDVEENPGPTSMDWIWRILFLVGAATGAHSGPQLQLQESGPGLVKPSETLSLTCTVSGDSISSGDYYWGWIRQPPGKGLEWIGHIYYSGVTYYNPSLKSRVTISVDTSRNQFSLKLSSVTAADTAVYYCTREDSSNWRSRGQGTLVTVSSGSGGGGSGGGGSGGGGSFEEVQLVQSGAEVKKPGASVKVSCKASGYTFTNFWIHWVRQAPGQGLEWIGEIDPSDSYTNYNQKFKGRVTITRDTSTSTAYLELSSLRSEDTAVYYCAREITTVDYWGQGTLVTVSSTRIQNPDPAVYQLRDSKSSDKSVCLFTDFDSQTNVSQSKDSDVYITDKTVLDMRSMDFKSNSAVAWSNKSDFACANAFNNSIIPEDTFFPSPESSCGTQSFGLLDPKLCYLLDGILFIYGVILTALFLRVKFSRSADAPAYQQGQNQLYNELNLGRREEYDVLDKRRGRDPEMGGKPQRRKNPQEGLYNELQKDKMAEAYSEIGMKGERRRGKGHDGLYQGLSTATKDTYDALHMQALPPR

SEQ ID NO: 13469 - protein, 1091 aa, Artificial Sequence
  Synthetic Polypeptide
MALPVTALLLPLALLLHAARPEVQLVESGGGLVQPGGSLRLSCAASGFSFSDFWMSWVRQAPGKGLEWVATISQAGSEKDYVDSVKGRFTISRDNAKKSLYLQMNSLRAEDTAVYYCASGVYSFDYRGQGTLVTVSSGTGGGGSGGGGSGGGGSEFDDIQMTQSPSSLSASVGDRVTITCKASQGFNKYVAWYQQKPGKAPKLLIYYTSTLQPGVPSRFSGSGSGRDYTLTISSLQPEDFATYYCLQYGNLLYAFGQGTKVEIKRLEDLKNVFPPEVAVFEPSEAEISHTQKATLVCLATGFYPDHVELSWWVNGKEVHSGVSTDPQPLKEQPALNDSRYCLSSRLRVSATFWQNPRNHFRCQVQFYGLSENDEWTQDRAKPVTQIVSAEAWGRADCGSQSFGLLDPKLCYLLDGILFIYGVILTALFLRVKFSRSADAPAYQQGQNQLYNELNLGRREEYDVLDKRRGRDPEMGGKPQRRKNPQEGLYNELQKDKMAEAYSEIGMKGERRRGKGHDGLYQGLSTATKDTYDALHMQALPPRRAKRSGSGATNFSLLKQAGDVEENPGPTSMDWIWRILFLVGAATGAHSGPQLQLQESGPGLVKPSETLSLTCTVSGDSISSGDYYWGWIRQPPGKGLEWIGHIYYSGVTYYNPSLKSRVTISVDTSRNQFSLKLSSVTAADTAVYYCTREDSSNWRSRGQGTLVTVSSGSGGGGSGGGGSGGGGSFEEVQLVQSGAEVKKPGASVKVSCKASGYTFTSYWIGWVRQAPGQGLEWIGDIYPGGGYTNYNEKFKGRVTITRDTSTSTAYLELSSLRSEDTAVYYCARLDGSSYRGAMDSWGQGTLVTVSSTRIQNPDPAVYQLRDSKSSDKSVCLFTDFDSQTNVSQSKDSDVYITDKTVLDMRSMDFKSNSAVAWSNKSDFACANAFNNSIIPEDTFFPSPESSCGTQSFGLLDPKLCYLLDGILFIYGVILTALFLRVKFSRSADAPAYQQGQNQLYNELNLGRREEYDVLDKRRGRDPEMGGKPQRRKNPQEGLYNELQKDKMAEAYSEIGMKGERRRGKGHDGLYQGLSTATKDTYDALHMQALPPR

SEQ ID NO: 13470 - protein, 1087 aa, Artificial Sequence
  Synthetic Polypeptide
MALPVTALLLPLALLLHAARPEVQLVESGGGLVQPGGSLRLSCAASGFSFSDFWMSWVRQAPGKGLEWVATISQAGSEKDYVDSVKGRFTISRDNAKKSLYLQMNSLRAEDTAVYYCASGVYSFDYRGQGTLVTVSSGTGGGGSGGGGSGGGGSEFDDIQMTQSPSSLSASVGDRVTITCRASQDIRYYLNWYQQKPGKAPKLLIYVASSLQSGVPSRFSGSGSGTEFTLTVSSLQPEDFATYYCLQVYSTPRTFGQGTKVEIKLEDLKNVFPPEVAVFEPSEAEISHTQKATLVCLATGFYPDHVELSWWVNGKEVHSGVSTDPQPLKEQPALNDSRYCLSSRLRVSATFWQNPRNHFRCQVQFYGLSENDEWTQDRAKPVTQIVSAEAWGRADCGSQSFGLLDPKLCYLLDGILFIYGVILTALFLRVKFSRSADAPAYQQGQNQLYNELNLGRREEYDVLDKRRGRDPEMGGKPQRRKNPQEGLYNELQKDKMAEAYSEIGMKGERRRGKGHDGLYQGLSTATKDTYDALHMQALPPRRAKRSGSGATNFSLLKQAGDVEENPGPTSMDWIWRILFLVGAATGAHSGPQLQLQESGPGLVKPSETLSLTCTVSGDSISSGDYYWGWIRQPPGKGLEWIGHIYYSGVTYYNPSLKSRVTISVDTSRNQFSLKLSSVTAADTAVYYCTREDSSNWRSRGQGTLVTVSSGSGGGGSGGGGSGGGGSFEEVQLVESGGGLAKPGGSLRLSCAASGFRFTFNNYYMDWVRQAPGQGLEWVSRISSSGDPTWYADSVKGRFTISRENAKNTLFLQMNSLRAEDTAVYYCASLTTGSDSWGQGVLVTVSSTRIQNPDPAVYQLRDSKSSDKSVCLFTDFDSQTNVSQSKDSDVYITDKTVLDMRSMDFKSNSAVAWSNKSDFACANAFNNSIIPEDTFFPSPESSCGTQSFGLLDPKLCYLLDGILFIYGVILTALFLRVKFSRSADAPAYQQGQNQLYNELNLGRREEYDVLDKRRGRDPEMGGKPQRRKNPQEGLYNELQKDKMAEAYSEIGMKGERRRGKGHDGLYQGLSTATKDTYDALHMQALPPR

SEQ ID NO: 13471 - protein, 1087 aa, Artificial Sequence
  Synthetic Polypeptide
MALPVTALLLPLALLLHAARPEVQLVESGGGLVQPGGSLRLSCAASGFSFSDFWMSWVRQAPGKGLEWVATISQAGSEKDYVDSVKGRFTISRDNAKKSLYLQMNSLRAEDTAVYYCASGVYSFDYRGQGTLVTVSSGTGGGGSGGGGSGGGGSEFEIVMTQSPATLSVSPGERATLSCRASQSVSRNLAWYQQKPGQAPRLLIYGASTRATGIPARFSGSGSGTEFTLTIGSLQSEDFAVYYCQQYKTWPRTFGQGTNVEIKLEDLKNVFPPEVAVFEPSEAEISHTQKATLVCLATGFYPDHVELSWWVNGKEVHSGVSTDPQPLKEQPALNDSRYCLSSRLRVSATFWQNPRNHFRCQVQFYGLSENDEWTQDRAKPVTQIVSAEAWGRADCGSQSFGLLDPKLCYLLDGILFIYGVILTALFLRVKFSRSADAPAYQQGQNQLYNELNLGRREEYDVLDKRRGRDPEMGGKPQRRKNPQEGLYNELQKDKMAEAYSEIGMKGERRRGKGHDGLYQGLSTATKDTYDALHMQALPPRRAKRSGSGATNFSLLKQAGDVEENPGPTSMDWIWRILFLVGAATGAHSGPQLQLQESGPGLVKPSETLSLTCTVSGDSISSGDYYWGWIRQPPGKGLEWIGHIYYSGVTYYNPSLKSRVTISVDTSRNQFSLKLSSVTAADTAVYYCTREDSSNWRSRGQGTLVTVSSGSGGGGSGGGGSGGGGSFEQVQLQQWGAGLLKPSETLSLTCAVFGGSFSGYYWSWIRQPPGKGLEWIGEINHRGNTNDNPSLKSRVTISVDTSKNQFALKLSSVTAADTAVYYCARERGYTYGNFDHWGQGTLVTVSSTRIQNPDPAVYQLRDSKSSDKSVCLFTDFDSQTNVSQSKDSDVYITDKTVLDMRSMDFKSNSAVAWSNKSDFACANAFNNSIIPEDTFFPSPESSCGTQSFGLLDPKLCYLLDGILFIYGVILTALFLRVKFSRSADAPAYQQGQNQLYNELNLGRREEYDVLDKRRGRDPEMGGKPQRRKNPQEGLYNELQKDKMAEAYSEIGMKGERRRGKGHDGLYQGLSTATKDTYDALHMQALPPR

SEQ ID NO: 13472 - protein, 1088 aa, Artificial Sequence
  Synthetic Polypeptide
MALPVTALLLPLALLLHAARPEVQLVESGGGLVQPGGSLRLSCAASGFSFSDFWMSWVRQAPGKGLEWVATISQAGSEKDYVDSVKGRFTISRDNAKKSLYLQMNSLRAEDTAVYYCASGVYSFDYRGQGTLVTVSSGTGGGGSGGGGSGGGGSEFEIVMTPSSATLSVSPGERATLSCRASQSVSRNLAWYQQKPGQAPRLLIYGASTRATGIPARFSGSGSGTEFTLTISSLQSEDFAVYYCHQYSNWMCSFGQGTKLEIKLEDLKNVFPPEVAVFEPSEAEISHTQKATLVCLATGFYPDHVELSWWVNGKEVHSGVSTDPQPLKEQPALNDSRYCLSSRLRVSATFWQNPRNHFRCQVQFYGLSENDEWTQDRAKPVTQIVSAEAWGRADCGSQSFGLLDPKLCYLLDGILFIYGVILTALFLRVKFSRSADAPAYQQGQNQLYNELNLGRREEYDVLDKRRGRDPEMGGKPQRRKNPQEGLYNELQKDKMAEAYSEIGMKGERRRGKGHDGLYQGLSTATKDTYDALHMQALPPRRAKRSGSGATNFSLLKQAGDVEENPGPTSMDWIWRILFLVGAATGAHSGPQLQLQESGPGLVKPSETLSLTCTVSGDSISSGDYYWGWIRQPPGKGLEWIGHIYYSGVTYYNPSLKSRVTISVDTSRNQFSLKLSSVTAADTAVYYCTREDSSNWRSRGQGTLVTVSSGSGGGGSGGGGSGGGGSFEEVQLLESGGGLVQPGGSLRLSCAASGFTFSRYAMNWVRQAPGKGLEWVSGISGSGGRTYYADSVKGRFTISRDNSKNTLYLQMNSLRAEDTAVYYCAKDRDFWSGPFDYWGQGTLVTVSSTRIQNPDPAVYQLRDSKSSDKSVCLFTDFDSQTNVSQSKDSDVYITDKTVLDMRSMDFKSNSAVAWSNKSDFACANAFNNSIIPEDTFFPSPESSCGTQSFGLLDPKLCYLLDGILFIYGVILTALFLRVKFSRSADAPAYQQGQNQLYNELNLGRREEYDVLDKRRGRDPEMGGKPQRRKNPQEGLYNELQKDKMAEAYSEIGMKGERRRGKGHDGLYQGLSTATKDTYDALHMQALPPR

SEQ ID NO: 13473 - protein, 1093 aa, Artificial Sequence
  Synthetic Polypeptide
MALPVTALLLPLALLLHAARPEVQLVESGGGLVQPGGSLRLSCAASGFSFSDFWMSWVRQAPGKGLEWVATISQAGSEKDYVDSVKGRFTISRDNAKKSLYLQMNSLRAEDTAVYYCASGVYSFDYRGQGTLVTVSSGTGGGGSGGGGSGGGGSEFDIQMTQSPSSLSASVGDRVTITCKASKNIRSYLAWYQQKPGKAPKLLIYSGSTLHSGVPSRFSGSGSGTDFTLTISSLQPEDFATYYCQQHHEYPLTFGQGTKVEIKRLEDLKNVFPPEVAVFEPSEAEISHTQKATLVCLATGFYPDHVELSWWVNGKEVHSGVSTDPQPLKEQPALNDSRYCLSSRLRVSATFWQNPRNHFRCQVQFYGLSENDEWTQDRAKPVTQIVSAEAWGRADCGSQSFGLLDPKLCYLLDGILFIYGVILTALFLRVKFSRSADAPAYQQGQNQLYNELNLGRREEYDVLDKRRGRDPEMGGKPQRRKNPQEGLYNELQKDKMAEAYSEIGMKGERRRGKGHDGLYQGLSTATKDTYDALHMQALPPRRAKRSGSGATNFSLLKQAGDVEENPGPTSMDWIWRILFLVGAATGAHSGPQLQLQESGPGLVKPSETLSLTCTVSGDSISSGDYYWGWIRQPPGKGLEWIGHIYYSGVTYYNPSLKSRVTISVDTSRNQFSLKLSSVTAADTAVYYCTREDSSNWRSRGQGTLVTVSSGSGGGGSGGGGSGGGGSFEQVQLQESGPGLVKPSETLSLTCTVSGYTITSGYDWSWIRQPPGKGLEWIGYINYGGSTNYKPSLGSRVTISVDTSKNQFSLKLSSVTAADTAVYYCARYNEYKSYIYDWYFDFWGQGTLVTVSSTRIQNPDPAVYQLRDSKSSDKSVCLFTDFDSQTNVSQSKDSDVYITDKTVLDMRSMDFKSNSAVAWSNKSDFACANAFNNSIIPEDTFFPSPESSCGTQSFGLLDPKLCYLLDGILFIYGVILTALFLRVKFSRSADAPAYQQGQNQLYNELNLGRREEYDVLDKRRGRDPEMGGKPQRRKNPQEGLYNELQKDKMAEAYSEIGMKGERRRGKGHDGLYQGLSTATKDTYDALHMQALPPR

SEQ ID NO: 13474 - protein, 1095 aa, Artificial Sequence
  Synthetic Polypeptide
MALPVTALLLPLALLLHAARPEVQLVESGGGLVQPGGSLRLSCAASGFSFSDFWMSWVRQAPGKGLEWVATISQAGSEKDYVDSVKGRFTISRDNAKKSLYLQMNSLRAEDTAVYYCASGVYSFDYRGQGTLVTVSSGTGGGGSGGGGSGGGGSEFQSVVTQPPSVSAAPGQKVTISCSGSSSNIGNNYVSWYQQLPGTAPKLLIYDNNKRPSGIPDRFSGSKSGTSATLGITGLQTGDEADYYCGTWDGSLYTMLFGGGTKLTVLLEDLKNVFPPEVAVFEPSEAEISHTQKATLVCLATGFYPDHVELSWWVNGKEVHSGVSTDPQPLKEQPALNDSRYCLSSRLRVSATFWQNPRNHFRCQVQFYGLSENDEWTQDRAKPVTQIVSAEAWGRADCGSQSFGLLDPKLCYLLDGILFIYGVILTALFLRVKFSRSADAPAYQQGQNQLYNELNLGRREEYDVLDKRRGRDPEMGGKPQRRKNPQEGLYNELQKDKMAEAYSEIGMKGERRRGKGHDGLYQGLSTATKDTYDALHMQALPPRRAKRSGSGATNFSLLKQAGDVEENPGPTSMDWIWRILFLVGAATGAHSGPQLQLQESGPGLVKPSETLSLTCTVSGDSISSGDYYWGWIRQPPGKGLEWIGHIYYSGVTYYNPSLKSRVTISVDTSRNQFSLKLSSVTAADTAVYYCTREDSSNWRSRGQGTLVTVSSGSGGGGSGGGGSGGGGSFEEVQLVESGGGLVKPGGSLRLSCAASGFTFSNAWMSWVRQAPGKGLEWVGFIRSKAYGGTTEYAASVKGRFTISRDDSKSIAYLQMNNLKTEDTAVYYCARDGLYSSSWYDSDYWGQGTLVTVSSTRIQNPDPAVYQLRDSKSSDKSVCLFTDFDSQTNVSQSKDSDVYITDKTVLDMRSMDFKSNSAVAWSNKSDFACANAFNNSIIPEDTFFPSPESSCGTQSFGLLDPKLCYLLDGILFIYGVILTALFLRVKFSRSADAPAYQQGQNQLYNELNLGRREEYDVLDKRRGRDPEMGGKPQRRKNPQEGLYNELQKDKMAEAYSEIGMKGERRRGKGHDGLYQGLSTATKDTYDALHMQALPPR

SEQ ID NO: 13475 - protein, 1100 aa, Artificial Sequence
  Synthetic Polypeptide
MALPVTALLLPLALLLHAARPEVQLVESGGGLVQPGGSLRLSCAASGFSFSDFWMSWVRQAPGKGLEWVATISQAGSEKDYVDSVKGRFTISRDNAKKSLYLQMNSLRAEDTAVYYCASGVYSFDYRGQGTLVTVSSGTGGGGSGGGGSGGGGSEFQSVLTQPPSVSGAPGQRVTISCTGSSSNIGAGYDVHWYQQLPGTAPKLLIFGNSNRPSGVPDRFSGFKSGTSASLAITGLQAEDEADYFCQSYDSSLSGSGVFGTGTKVTVLGLEDLKNVFPPEVAVFEPSEAEISHTQKATLVCLATGFYPDHVELSWWVNGKEVHSGVSTDPQPLKEQPALNDSRYCLSSRLRVSATFWQNPRNHFRCQVQFYGLSENDEWTQDRAKPVTQIVSAEAWGRADCGSQSFGLLDPKLCYLLDGILFIYGVILTALFLRVKFSRSADAPAYQQGQNQLYNELNLGRREEYDVLDKRRGRDPEMGGKPQRRKNPQEGLYNELQKDKMAEAYSEIGMKGERRRGKGHDGLYQGLSTATKDTYDALHMQALPPRRAKRSGSGATNFSLLKQAGDVEENPGPTSMDWIWRILFLVGAATGAHSGPQLQLQESGPGLVKPSETLSLTCTVSGDSISSGDYYWGWIRQPPGKGLEWIGHIYYSGVTYYNPSLKSRVTISVDTSRNQFSLKLSSVTAADTAVYYCTREDSSNWRSRGQGTLVTVSSGSGGGGSGGGGSGGGGSFEQMQLVQSGGGLVQPGRSLRLSCAASGFTFDDYAMHWVRQAPGKGLEWVSGISWNSGSIGYADSVKGRFTISRDNAKNSLYLQMNSLRAEDTALYYCAKDIHSGSYYGLLYYAMDVWGQGTTVTVSSTRIQNPDPAVYQLRDSKSSDKSVCLFTDFDSQTNVSQSKDSDVYITDKTVLDMRSMDFKSNSAVAWSNKSDFACANAFNNSIIPEDTFFPSPESSCGTQSFGLLDPKLCYLLDGILFIYGVILTALFLRVKFSRSADAPAYQQGQNQLYNELNLGRREEYDVLDKRRGRDPEMGGKPQRRKNPQEGLYNELQKDKMAEAYSEIGMKGERRRGKGHDGLYQGLSTATKDTYDALHMQALPPR

SEQ ID NO: 13476 - protein, 1100 aa, Artificial Sequence
  Synthetic Polypeptide
MALPVTALLLPLALLLHAARPEVQLVESGGGLVQPGGSLRLSCAASGFSFSDFWMSWVRQAPGKGLEWVATISQAGSEKDYVDSVKGRFTISRDNAKKSLYLQMNSLRAEDTAVYYCASGVYSFDYRGQGTLVTVSSGTGGGGSGGGGSGGGGSEFLPVLTQPPSASGTPGQRVTISCSGRSSNIGSNSVNWYRQLPGAAPKLLIYSNNQRPPGVPVRFSGSKSGTSASLAISGLQSEDEATYYCATWDDNLNVHYVFGTGTKVTVLGSRLEDLKNVFPPEVAVFEPSEAEISHTQKATLVCLATGFYPDHVELSWWVNGKEVHSGVSTDPQPLKEQPALNDSRYCLSSRLRVSATFWQNPRNHFRCQVQFYGLSENDEWTQDRAKPVTQIVSAEAWGRADCGSQSFGLLDPKLCYLLDGILFIYGVILTALFLRVKFSRSADAPAYQQGQNQLYNELNLGRREEYDVLDKRRGRDPEMGGKPQRRKNPQEGLYNELQKDKMAEAYSEIGMKGERRRGKGHDGLYQGLSTATKDTYDALHMQALPPRRAKRSGSGATNFSLLKQAGDVEENPGPTSMDWIWRILFLVGAATGAHSGPQLQLQESGPGLVKPSETLSLTCTVSGDSISSGDYYWGWIRQPPGKGLEWIGHIYYSGVTYYNPSLKSRVTISVDTSRNQFSLKLSSVTAADTAVYYCTREDSSNWRSRGQGTLVTVSSGSGGGGSGGGGSGGGGSFELEMAQVQLVQSGAEVKKPGSSVKVSCKASGGTFSSYAISWVRQAPGQGLEWMGRIIPILGIANYAQKFQGRVTITADKSTSTAYMELSSLRSEDTAVYYCARGGYYSHDMWSEDWGQGTLVTVSSTRIQNPDPAVYQLRDSKSSDKSVCLFTDFDSQTNVSQSKDSDVYITDKTVLDMRSMDFKSNSAVAWSNKSDFACANAFNNSIIPEDTFFPSPESSCGTQSFGLLDPKLCYLLDGILFIYGVILTALFLRVKFSRSADAPAYQQGQNQLYNELNLGRREEYDVLDKRRGRDPEMGGKPQRRKNPQEGLYNELQKDKMAEAYSEIGMKGERRRGKGHDGLYQGLSTATKDTYDALHMQALPPR

SEQ ID NO: 13477 - protein, 1094 aa, Artificial Sequence
  Synthetic Polypeptide
MALPVTALLLPLALLLHAARPEVQLVESGGGLVQPGGSLRLSCAASGFSFSDFWMSWVRQAPGKGLEWVATISQAGSEKDYVDSVKGRFTISRDNAKKSLYLQMNSLRAEDTAVYYCASGVYSFDYRGQGTLVTVSSGTGGGGSGGGGSGGGGSEFDFVMTQSPDSLAVSLGERVTMSCKSSQSLLNSGNQKNYLTWYQQKPGQPPKLLIYWASTRESGVPDRFSGSGSGTDFTLTISSLQAEDVAVYYCQNDYSYPYTFGQGTKLEIKLEDLKNVFPPEVAVFEPSEAEISHTQKATLVCLATGFYPDHVELSWWVNGKEVHSGVSTDPQPLKEQPALNDSRYCLSSRLRVSATFWQNPRNHFRCQVQFYGLSENDEWTQDRAKPVTQIVSAEAWGRADCGSQSFGLLDPKLCYLLDGILFIYGVILTALFLRVKFSRSADAPAYQQGQNQLYNELNLGRREEYDVLDKRRGRDPEMGGKPQRRKNPQEGLYNELQKDKMAEAYSEIGMKGERRRGKGHDGLYQGLSTATKDTYDALHMQALPPRRAKRSGSGATNFSLLKQAGDVEENPGPTSMDWIWRILFLVGAATGAHSGPQLQLQESGPGLVKPSETLSLTCTVSGDSISSGDYYWGWIRQPPGKGLEWIGHIYYSGVTYYNPSLKSRVTISVDTSRNQFSLKLSSVTAADTAVYYCTREDSSNWRSRGQGTLVTVSSGSGGGGSGGGGSGGGGSFEEVQLVQSGAELKKPGASVKVSCKASGYTFTDYYMKWVRQAPGQGLEWIGDIIPSNGATFYNQKFKGRVTITVDKSTSTAYMELSSLRSEDTAVYYCARSHLLRASWFAYWGQGTLVTVSSTRIQNPDPAVYQLRDSKSSDKSVCLFTDFDSQTNVSQSKDSDVYITDKTVLDMRSMDFKSNSAVAWSNKSDFACANAFNNSIIPEDTFFPSPESSCGTQSFGLLDPKLCYLLDGILFIYGVILTALFLRVKFSRSADAPAYQQGQNQLYNELNLGRREEYDVLDKRRGRDPEMGGKPQRRKNPQEGLYNELQKDKMAEAYSEIGMKGERRRGKGHDGLYQGLSTATKDTYDALHMQALPPR

SEQ ID NO: 13478 - protein, 1094 aa, Artificial Sequence
  Synthetic Polypeptide
MALPVTALLLPLALLLHAARPEVQLVESGGGLVQPGGSLRLSCAASGFSFSDFWMSWVRQAPGKGLEWVATISQAGSEKDYVDSVKGRFTISRDNAKKSLYLQMNSLRAEDTAVYYCASGVYSFDYRGQGTLVTVSSGTGGGGSGGGGSGGGGSEFDFVMTQSPDSLAVSLGERVTMSCKSSQSLLNSGNQKNYLTWYQQKPGQPPKLLIYWASTRESGVPDRFSGSGSGTDFTLTISSLQAEDVAVYYCQNDYSYPYTFGQGTKLEIKLEDLKNVFPPEVAVFEPSEAEISHTQKATLVCLATGFYPDHVELSWWVNGKEVHSGVSTDPQPLKEQPALNDSRYCLSSRLRVSATFWQNPRNHFRCQVQFYGLSENDEWTQDRAKPVTQIVSAEAWGRADCGSQSFGLLDPKLCYLLDGILFIYGVILTALFLRVKFSRSADAPAYQQGQNQLYNELNLGRREEYDVLDKRRGRDPEMGGKPQRRKNPQEGLYNELQKDKMAEAYSEIGMKGERRRGKGHDGLYQGLSTATKDTYDALHMQALPPRRAKRSGSGATNFSLLKQAGDVEENPGPTSMDWIWRILFLVGAATGAHSGPQLQLQESGPGLVKPSETLSLTCTVSGDSISSGDYYWGWIRQPPGKGLEWIGHIYYSGVTYYNPSLKSRVTISVDTSRNQFSLKLSSVTAADTAVYYCTREDSSNWRSRGQGTLVTVSSGSGGGGSGGGGSGGGGSFEQVQLVQSGAELKKPGASVKVSCKASGYTFTDYYMKWVRQAPGQGLEWIGDIIPSNGATFYNQKFKGRVTITVDKSTSTAYMELSSLRSEDTAVYYCARSHLLRASWFAYWGQGTLVTVSSTRIQNPDPAVYQLRDSKSSDKSVCLFTDFDSQTNVSQSKDSDVYITDKTVLDMRSMDFKSNSAVAWSNKSDFACANAFNNSIIPEDTFFPSPESSCGTQSFGLLDPKLCYLLDGILFIYGVILTALFLRVKFSRSADAPAYQQGQNQLYNELNLGRREEYDVLDKRRGRDPEMGGKPQRRKNPQEGLYNELQKDKMAEAYSEIGMKGERRRGKGHDGLYQGLSTATKDTYDALHMQALPPR

SEQ ID NO: 13479 - protein, 1084 aa, Artificial Sequence
  Synthetic Polypeptide
MALPVTALLLPLALLLHAARPEVQLVESGGGLVQPGGSLRLSCAASGFSFSDFWMSWVRQAPGKGLEWVATISQAGSEKDYVDSVKGRFTISRDNAKKSLYLQMNSLRAEDTAVYYCASGVYSFDYRGQGTLVTVSSGTGGGGSGGGGSGGGGSEFDVQITQSPSYLAASPGETITINCRASKSISKDLAWYQEKPGKTNKLLIYSGSTLQSGIPSRFSGSGSGTDFTLTISSLEPEDFAMYYCQQHNKYPYTFGGGTKLEIKRLEDLKNVFPPEVAVFEPSEAEISHTQKATLVCLATGFYPDHVELSWWVNGKEVHSGVSTDPQPLKEQPALNDSRYCLSSRLRVSATFWQNPRNHFRCQVQFYGLSENDEWTQDRAKPVTQIVSAEAWGRADCGSQSFGLLDPKLCYLLDGILFIYGVILTALFLRVKFSRSADAPAYQQGQNQLYNELNLGRREEYDVLDKRRGRDPEMGGKPQRRKNPQEGLYNELQKDKMAEAYSEIGMKGERRRGKGHDGLYQGLSTATKDTYDALHMQALPPRRAKRSGSGATNFSLLKQAGDVEENPGPTSMDWIWRILFLVGAATGAHSGPQLQLQESGPGLVKPSETLSLTCTVSGDSISSGDYYWGWIRQPPGKGLEWIGHIYYSGVTYYNPSLKSRVTISVDTSRNQFSLKLSSVTAADTAVYYCTREDSSNWRSRGQGTLVTVSSGSGGGGSGGGGSGGGGSFEQVQLQQPGAELVRPGASVKLSCKASGYTFTSYWMNWVKQRPDQGLEWIGRIDPYDSETHYNQKFKDKAILTVDKSSSTAYMQLSSLTSEDSAVYYCARGNWDDYWGQGTTLTVSSTRIQNPDPAVYQLRDSKSSDKSVCLFTDFDSQTNVSQSKDSDVYITDKTVLDMRSMDFKSNSAVAWSNKSDFACANAFNNSIIPEDTFFPSPESSCGTQSFGLLDPKLCYLLDGILFIYGVILTALFLRVKFSRSADAPAYQQGQNQLYNELNLGRREEYDVLDKRRGRDPEMGGKPQRRKNPQEGLYNELQKDKMAEAYSEIGMKGERRRGKGHDGLYQGLSTATKDTYDALHMQALPPR

SEQ ID NO: 13480 - protein, 1086 aa, Artificial Sequence
  Synthetic Polypeptide
MALPVTALLLPLALLLHAARPEVQLVESGGGLVQPGGSLRLSCAASGFSFSDFWMSWVRQAPGKGLEWVATISQAGSEKDYVDSVKGRFTISRDNAKKSLYLQMNSLRAEDTAVYYCASGVYSFDYRGQGTLVTVSSGTGGGGSGGGGSGGGGSEFEIVLTQSPTSMTASPGEQVTITCRASSSINYMHWYQQKPGASPRPWIYETSKLASGVPDRFSGSASGTSYSLTINNMEAEDAATYYCQQWNYPSWTFGGGTKLELKLEDLKNVFPPEVAVFEPSEAEISHTQKATLVCLATGFYPDHVELSWWVNGKEVHSGVSTDPQPLKEQPALNDSRYCLSSRLRVSATFWQNPRNHFRCQVQFYGLSENDEWTQDRAKPVTQIVSAEAWGRADCGSQSFGLLDPKLCYLLDGILFIYGVILTALFLRVKFSRSADAPAYQQGQNQLYNELNLGRREEYDVLDKRRGRDPEMGGKPQRRKNPQEGLYNELQKDKMAEAYSEIGMKGERRRGKGHDGLYQGLSTATKDTYDALHMQALPPRRAKRSGSGATNFSLLKQAGDVEENPGPTSMDWIWRILFLVGAATGAHSGPQLQLQESGPGLVKPSETLSLTCTVSGDSISSGDYYWGWIRQPPGKGLEWIGHIYYSGVTYYNPSLKSRVTISVDTSRNQFSLKLSSVTAADTAVYYCTREDSSNWRSRGQGTLVTVSSGSGGGGSGGGGSGGGGSFEEVQLVESGGGLVQPGRSLKLSCAASGFTFSDYNMAWVRQAPKKGLEWVATILYDGGRTYYRGSVKGRFTISRDNAKSTLYLRMDSLRSEDTATYYCATHSRGTDYFDYWGQGVMVTVSSTRIQNPDPAVYQLRDSKSSDKSVCLFTDFDSQTNVSQSKDSDVYITDKTVLDMRSMDFKSNSAVAWSNKSDFACANAFNNSIIPEDTFFPSPESSCGTQSFGLLDPKLCYLLDGILFIYGVILTALFLRVKFSRSADAPAYQQGQNQLYNELNLGRREEYDVLDKRRGRDPEMGGKPQRRKNPQEGLYNELQKDKMAEAYSEIGMKGERRRGKGHDGLYQGLSTATKDTYDALHMQALPPR

SEQ ID NO: 13481 - protein, 1095 aa, Artificial Sequence
  Synthetic Polypeptide
MALPVTALLLPLALLLHAARPEVQLVESGGGLVQPGGSLRLSCAASGFSFSDFWMSWVRQAPGKGLEWVATISQAGSEKDYVDSVKGRFTISRDNAKKSLYLQMNSLRAEDTAVYYCASGVYSFDYRGQGTLVTVSSGTGGGGSGGGGSGGGGSEFDIVMTQSPSSLAVSEGETVTINCKSSQSFLSSGDGKNYVAWYQYKPGQSPKLLIYWASTRQSGVPDRFIGSGSGTDFTLTISTVQAEDLAIYYCQQYYDTPLTFGSGTKLEIKLEDLKNVFPPEVAVFEPSEAEISHTQKATLVCLATGFYPDHVELSWWVNGKEVHSGVSTDPQPLKEQPALNDSRYCLSSRLRVSATFWQNPRNHFRCQVQFYGLSENDEWTQDRAKPVTQIVSAEAWGRADCGSQSFGLLDPKLCYLLDGILFIYGVILTALFLRVKFSRSADAPAYQQGQNQLYNELNLGRREEYDVLDKRRGRDPEMGGKPQRRKNPQEGLYNELQKDKMAEAYSEIGMKGERRRGKGHDGLYQGLSTATKDTYDALHMQALPPRRAKRSGSGATNFSLLKQAGDVEENPGPTSMDWIWRILFLVGAATGAHSGPQLQLQESGPGLVKPSETLSLTCTVSGDSISSGDYYWGWIRQPPGKGLEWIGHIYYSGVTYYNPSLKSRVTISVDTSRNQFSLKLSSVTAADTAVYYCTREDSSNWRSRGQGTLVTVSSGSGGGGSGGGGSGGGGSFEEVKLQESGPSLVQSSQTLSLTCTVSGFSLTSYHIHWVRQTPGKGLEWMGVMWSDGDTSYNSALKSRLSISRDTSQSQVFLKMNSLQTEDTATYYCARGYYSSYLYLWFAYWGQGTLVTVSSTRIQNPDPAVYQLRDSKSSDKSVCLFTDFDSQTNVSQSKDSDVYITDKTVLDMRSMDFKSNSAVAWSNKSDFACANAFNNSIIPEDTFFPSPESSCGTQSFGLLDPKLCYLLDGILFIYGVILTALFLRVKFSRSADAPAYQQGQNQLYNELNLGRREEYDVLDKRRGRDPEMGGKPQRRKNPQEGLYNELQKDKMAEAYSEIGMKGERRRGKGHDGLYQGLSTATKDTYDALHMQALPPR

SEQ ID NO: 13482 - protein, 1099 aa, Artificial Sequence
  Synthetic Polypeptide
MALPVTALLLPLALLLHAARPEVQLVESGGGLVQPGGSLRLSCAASGFSFSDFWMSWVRQAPGKGLEWVATISQAGSEKDYVDSVKGRFTISRDNAKKSLYLQMNSLRAEDTAVYYCASGVYSFDYRGQGTLVTVSSGTGGGGSGGGGSGGGGSEFDVLMTQTPVSLPVSLGGQVSISCRSSQSLVHSDGDTYLHWYLQKPGQSPQLLIYRVSNRFSGVPDRFSGSGSGTDFTLKISRVEPEDLGLYYCLQTTHFPPWTFGGGTKLEMKLEDLKNVFPPEVAVFEPSEAEISHTQKATLVCLATGFYPDHVELSWWVNGKEVHSGVSTDPQPLKEQPALNDSRYCLSSRLRVSATFWQNPRNHFRCQVQFYGLSENDEWTQDRAKPVTQIVSAEAWGRADCGSQSFGLLDPKLCYLLDGILFIYGVILTALFLRVKFSRSADAPAYQQGQNQLYNELNLGRREEYDVLDKRRGRDPEMGGKPQRRKNPQEGLYNELQKDKMAEAYSEIGMKGERRRGKGHDGLYQGLSTATKDTYDALHMQALPPRRAKRSGSGATNFSLLKQAGDVEENPGPTSMDWIWRILFLVGAATGAHSGPQLQLQESGPGLVKPSETLSLTCTVSGDSISSGDYYWGWIRQPPGKGLEWIGHIYYSGVTYYNPSLKSRVTISVDTSRNQFSLKLSSVTAADTAVYYCTREDSSNWRSRGQGTLVTVSSGSGGGGSGGGGSGGGGSFEQVQLQQSGPELRRPGSSVRLSCKASGYRIKDFLIHWIKNRPEHGLEWIGWIDPEDGETKYAQKFQTKATLTADTSSNTAYMQLSSLTSEDTATYFCARWGDVYYGLMRGHVMDAWGQGTSVTVSSTRIQNPDPAVYQLRDSKSSDKSVCLFTDFDSQTNVSQSKDSDVYITDKTVLDMRSMDFKSNSAVAWSNKSDFACANAFNNSIIPEDTFFPSPESSCGTQSFGLLDPKLCYLLDGILFIYGVILTALFLRVKFSRSADAPAYQQGQNQLYNELNLGRREEYDVLDKRRGRDPEMGGKPQRRKNPQEGLYNELQKDKMAEAYSEIGMKGERRRGKGHDGLYQGLSTATKDTYDALHMQALPPR

SEQ ID NO: 13483 - protein, 1094 aa, Artificial Sequence
  Synthetic Polypeptide
MALPVTALLLPLALLLHAARPEVQLVESGGGLVQPGGSLRLSCAASGFSFSDFWMSWVRQAPGKGLEWVATISQAGSEKDYVDSVKGRFTISRDNAKKSLYLQMNSLRAEDTAVYYCASGVYSFDYRGQGTLVTVSSGTGGGGSGGGGSGGGGSEFDIVMTQSPATLSLSPGERATLSCRSSKSLQNVNGNTYLYWFQQKPGQSPQLLIYRMSNLNSGVPDRFSGSGSGTEFTLTISSLEPEDFAVYYCMQHLEYPITFGAGTKLEIKLEDLKNVFPPEVAVFEPSEAEISHTQKATLVCLATGFYPDHVELSWWVNGKEVHSGVSTDPQPLKEQPALNDSRYCLSSRLRVSATFWQNPRNHFRCQVQFYGLSENDEWTQDRAKPVTQIVSAEAWGRADCGSQSFGLLDPKLCYLLDGILFIYGVILTALFLRVKFSRSADAPAYQQGQNQLYNELNLGRREEYDVLDKRRGRDPEMGGKPQRRKNPQEGLYNELQKDKMAEAYSEIGMKGERRRGKGHDGLYQGLSTATKDTYDALHMQALPPRRAKRSGSGATNFSLLKQAGDVEENPGPTSMDWIWRILFLVGAATGAHSGPQLQLQESGPGLVKPSETLSLTCTVSGDSISSGDYYWGWIRQPPGKGLEWIGHIYYSGVTYYNPSLKSRVTISVDTSRNQFSLKLSSVTAADTAVYYCTREDSSNWRSRGQGTLVTVSSGSGGGGSGGGGSGGGGSFEEVQLVESGGGLVKPGGSLKLSCAASGYTFTSYVMHWVRQAPGKGLEWIGYINPYNDGTKYNEKFQGRVTISSDKSISTAYMELSSLRSEDTAMYYCARGTYYYGTRVFDYWGQGTLVTVSSTRIQNPDPAVYQLRDSKSSDKSVCLFTDFDSQTNVSQSKDSDVYITDKTVLDMRSMDFKSNSAVAWSNKSDFACANAFNNSIIPEDTFFPSPESSCGTQSFGLLDPKLCYLLDGILFIYGVILTALFLRVKFSRSADAPAYQQGQNQLYNELNLGRREEYDVLDKRRGRDPEMGGKPQRRKNPQEGLYNELQKDKMAEAYSEIGMKGERRRGKGHDGLYQGLSTATKDTYDALHMQALPPR

SEQ ID NO: 13484 - protein, 1090 aa, Artificial Sequence
  Synthetic Polypeptide
MALPVTALLLPLALLLHAARPEVQLVESGGGLVQPGGSLRLSCAASGFSFSDFWMSWVRQAPGKGLEWVATISQAGSEKDYVDSVKGRFTISRDNAKKSLYLQMNSLRAEDTAVYYCASGVYSFDYRGQGTLVTVSSGTGGGGSGGGGSGGGGSEFDIQMTQSPSSLSASVGDRVTITCKASDHINNWLAWYQQKPGQAPKLLIYGATTLETGVPSRFSGSGSGTDYTLTISSLQPEDFATYYCQQSWNTPWTFGQGTKLEIKRLEDLKNVFPPEVAVFEPSEAEISHTQKATLVCLATGFYPDHVELSWWVNGKEVHSGVSTDPQPLKEQPALNDSRYCLSSRLRVSATFWQNPRNHFRCQVQFYGLSENDEWTQDRAKPVTQIVSAEAWGRADCGSQSFGLLDPKLCYLLDGILFIYGVILTALFLRVKFSRSADAPAYQQGQNQLYNELNLGRREEYDVLDKRRGRDPEMGGKPQRRKNPQEGLYNELQKDKMAEAYSEIGMKGERRRGKGHDGLYQGLSTATKDTYDALHMQALPPRRAKRSGSGATNFSLLKQAGDVEENPGPTSMDWIWRILFLVGAATGAHSGPQLQLQESGPGLVKPSETLSLTCTVSGDSISSGDYYWGWIRQPPGKGLEWIGHIYYSGVTYYNPSLKSRVTISVDTSRNQFSLKLSSVTAADTAVYYCTREDSSNWRSRGQGTLVTVSSGSGGGGSGGGGSGGGGSFEQVQLQQPGAELVKPGASVKMSCKASGYAFSSYWINWMKQKPGQGLEWIGQIYPGDGDTNYNGKFKGRATLTADTSSSTAYMQLSSLTSEDSAVYFCARSITTVVGCAMDYWGQGTSVTVSSTRIQNPDPAVYQLRDSKSSDKSVCLFTDFDSQTNVSQSKDSDVYITDKTVLDMRSMDFKSNSAVAWSNKSDFACANAFNNSIIPEDTFFPSPESSCGTQSFGLLDPKLCYLLDGILFIYGVILTALFLRVKFSRSADAPAYQQGQNQLYNELNLGRREEYDVLDKRRGRDPEMGGKPQRRKNPQEGLYNELQKDKMAEAYSEIGMKGERRRGKGHDGLYQGLSTATKDTYDALHMQALPPR

SEQ ID NO: 13485 - protein, 1092 aa, Artificial Sequence
  Synthetic Polypeptide
MALPVTALLLPLALLLHAARPEVQLVESGGGLVQPGGSLRLSCAASGFSFSDFWMSWVRQAPGKGLEWVATISQAGSEKDYVDSVKGRFTISRDNAKKSLYLQMNSLRAEDTAVYYCASGVYSFDYRGQGTLVTVSSGTGGGGSGGGGSGGGGSEFQIVLSQSPAILSASPGEKVTMTCRASSSVSYMHWYQQKPGSSPKPWIYATSNLASGVPARFSGSGSGTSYSFTISRVEAEDAATYYCQQWTFNPPTFGGGTRLEIKRTVAALEDLKNVFPPEVAVFEPSEAEISHTQKATLVCLATGFYPDHVELSWWVNGKEVHSGVSTDPQPLKEQPALNDSRYCLSSRLRVSATFWQNPRNHFRCQVQFYGLSENDEWTQDRAKPVTQIVSAEAWGRADCGSQSFGLLDPKLCYLLDGILFIYGVILTALFLRVKFSRSADAPAYQQGQNQLYNELNLGRREEYDVLDKRRGRDPEMGGKPQRRKNPQEGLYNELQKDKMAEAYSEIGMKGERRRGKGHDGLYQGLSTATKDTYDALHMQALPPRRAKRSGSGATNFSLLKQAGDVEENPGPTSMDWIWRILFLVGAATGAHSGPQLQLQESGPGLVKPSETLSLTCTVSGDSISSGDYYWGWIRQPPGKGLEWIGHIYYSGVTYYNPSLKSRVTISVDTSRNQFSLKLSSVTAADTAVYYCTREDSSNWRSRGQGTLVTVSSGSGGGGSGGGGSGGGGSFEQAYLQQSGAELVRPGASVKMSCKASGYTFTSYNMHWVKQTPRQGLEWIGGIYPGNGDTSYNQKFKGKATLTVGKSSSTAYMQLSSLTSEDSAVYFCARYDYNYAMDYWGQGTSVTVSSASTRIQNPDPAVYQLRDSKSSDKSVCLFTDFDSQTNVSQSKDSDVYITDKTVLDMRSMDFKSNSAVAWSNKSDFACANAFNNSIIPEDTFFPSPESSCGTQSFGLLDPKLCYLLDGILFIYGVILTALFLRVKFSRSADAPAYQQGQNQLYNELNLGRREEYDVLDKRRGRDPEMGGKPQRRKNPQEGLYNELQKDKMAEAYSEIGMKGERRRGKGHDGLYQGLSTATKDTYDALHMQALPPR

SEQ ID NO: 13486 - protein, 1090 aa, Artificial Sequence
  Synthetic Polypeptide
MALPVTALLLPLALLLHAARPEVQLVESGGGLVQPGGSLRLSCAASGFSFSDFWMSWVRQAPGKGLEWVATISQAGSEKDYVDSVKGRFTISRDNAKKSLYLQMNSLRAEDTAVYYCASGVYSFDYRGQGTLVTVSSGTGGGGSGGGGSGGGGSEFEIVLTQSPATLSLSPGERATLSCRASQSVSSYLAWYQQKPGQAPRLLIYDASNRATGIPARFSGSGSGTDFTLTISSLEPEDFAVYYCQQRSNWPITFGQGTRLEIKLEDLKNVFPPEVAVFEPSEAEISHTQKATLVCLATGFYPDHVELSWWVNGKEVHSGVSTDPQPLKEQPALNDSRYCLSSRLRVSATFWQNPRNHFRCQVQFYGLSENDEWTQDRAKPVTQIVSAEAWGRADCGSQSFGLLDPKLCYLLDGILFIYGVILTALFLRVKFSRSADAPAYQQGQNQLYNELNLGRREEYDVLDKRRGRDPEMGGKPQRRKNPQEGLYNELQKDKMAEAYSEIGMKGERRRGKGHDGLYQGLSTATKDTYDALHMQALPPRRAKRSGSGATNFSLLKQAGDVEENPGPTSMDWIWRILFLVGAATGAHSGPQLQLQESGPGLVKPSETLSLTCTVSGDSISSGDYYWGWIRQPPGKGLEWIGHIYYSGVTYYNPSLKSRVTISVDTSRNQFSLKLSSVTAADTAVYYCTREDSSNWRSRGQGTLVTVSSGSGGGGSGGGGSGGGGSFEEVQLVESGGGLVQPDRSLRLSCAASGFTFHDYAMHWVRQAPGKGLEWVSTISWNSGTIGYADSVKGRFTISRDNAKNSLYLQMNSLRAEDTALYYCAKDIQYGNYYYGMDVWGQGTTVTVSSTRIQNPDPAVYQLRDSKSSDKSVCLFTDFDSQTNVSQSKDSDVYITDKTVLDMRSMDFKSNSAVAWSNKSDFACANAFNNSIIPEDTFFPSPESSCGTQSFGLLDPKLCYLLDGILFIYGVILTALFLRVKFSRSADAPAYQQGQNQLYNELNLGRREEYDVLDKRRGRDPEMGGKPQRRKNPQEGLYNELQKDKMAEAYSEIGMKGERRRGKGHDGLYQGLSTATKDTYDALHMQALPPR

SEQ ID NO: 13487 - protein, 1085 aa, Artificial Sequence
  Synthetic Polypeptide
MALPVTALLLPLALLLHAARPEVQLVESGGGLVQPGGSLRLSCAASGFSFSDFWMSWVRQAPGKGLEWVATISQAGSEKDYVDSVKGRFTISRDNAKKSLYLQMNSLRAEDTAVYYCASGVYSFDYRGQGTLVTVSSGTGGGGSGGGGSGGGGSEFDIQMTQSPSSLSASVGDRVTINCKASQDINSYLSWFQQKPGKAPKTLIYRANRLVDGVPSRFSGSGSGQDYTLTISSLQPEDFATYYCLQYDEFPLTFGGGTKVEIKLEDLKNVFPPEVAVFEPSEAEISHTQKATLVCLATGFYPDHVELSWWVNGKEVHSGVSTDPQPLKEQPALNDSRYCLSSRLRVSATFWQNPRNHFRCQVQFYGLSENDEWTQDRAKPVTQIVSAEAWGRADCGSQSFGLLDPKLCYLLDGILFIYGVILTALFLRVKFSRSADAPAYQQGQNQLYNELNLGRREEYDVLDKRRGRDPEMGGKPQRRKNPQEGLYNELQKDKMAEAYSEIGMKGERRRGKGHDGLYQGLSTATKDTYDALHMQALPPRRAKRSGSGATNFSLLKQAGDVEENPGPTSMDWIWRILFLVGAATGAHSGPQLQLQESGPGLVKPSETLSLTCTVSGDSISSGDYYWGWIRQPPGKGLEWIGHIYYSGVTYYNPSLKSRVTISVDTSRNQFSLKLSSVTAADTAVYYCTREDSSNWRSRGQGTLVTVSSGSGGGGSGGGGSGGGGSFEQVQLVQSGAEVKKPGASVKVSCKASGYTFTNYDINWVRQAPGQGLEWIGWIYPGDGSTKYNEKFKAKATLTADTSTSTAYMELRSLRSDDTAVYYCASGYEDAMDYWGQGTTVTVSSTRIQNPDPAVYQLRDSKSSDKSVCLFTDFDSQTNVSQSKDSDVYITDKTVLDMRSMDFKSNSAVAWSNKSDFACANAFNNSIIPEDTFFPSPESSCGTQSFGLLDPKLCYLLDGILFIYGVILTALFLRVKFSRSADAPAYQQGQNQLYNELNLGRREEYDVLDKRRGRDPEMGGKPQRRKNPQEGLYNELQKDKMAEAYSEIGMKGERRRGKGHDGLYQGLSTATKDTYDALHMQALPPR

SEQ ID NO: 13488 - protein, 1087 aa, Artificial Sequence
  Synthetic Polypeptide
MALPVTALLLPLALLLHAARPEVQLVESGGGLVQPGGSLRLSCAASGFSFSDFWMSWVRQAPGKGLEWVATISQAGSEKDYVDSVKGRFTISRDNAKKSLYLQMNSLRAEDTAVYYCASGVYSFDYRGQGTLVTVSSGTGGGGSGGGGSGGGGSEFDIVMTQTPLSLSVTPGQPASISCKSSQSLLDGDGKTYLNWLLQKPGQSPQRLIYLVSKLDSGVPDRFSGSGSGTDFTLKISRVEAEDVGVYYCWQGTHFPRTFGQGTKLEIKLEDLKNVFPPEVAVFEPSEAEISHTQKATLVCLATGFYPDHVELSWWVNGKEVHSGVSTDPQPLKEQPALNDSRYCLSSRLRVSATFWQNPRNHFRCQVQFYGLSENDEWTQDRAKPVTQIVSAEAWGRADCGSQSFGLLDPKLCYLLDGILFIYGVILTALFLRVKFSRSADAPAYQQGQNQLYNELNLGRREEYDVLDKRRGRDPEMGGKPQRRKNPQEGLYNELQKDKMAEAYSEIGMKGERRRGKGHDGLYQGLSTATKDTYDALHMQALPPRRAKRSGSGATNFSLLKQAGDVEENPGPTSMDWIWRILFLVGAATGAHSGPQLQLQESGPGLVKPSETLSLTCTVSGDSISSGDYYWGWIRQPPGKGLEWIGHIYYSGVTYYNPSLKSRVTISVDTSRNQFSLKLSSVTAADTAVYYCTREDSSNWRSRGQGTLVTVSSGSGGGGSGGGGSGGGGSFEQVQLVQSGAEVKKPGASVKVSCKASGYTFKDTYIHWVRQAPGQGLEWMGRIDPANGNTKYDPKFQGRVTMTRDTSISTAYMELSRLRSDDTAVYYCARRGGVDWGQGTLVTVSSTRIQNPDPAVYQLRDSKSSDKSVCLFTDFDSQTNVSQSKDSDVYITDKTVLDMRSMDFKSNSAVAWSNKSDFACANAFNNSIIPEDTFFPSPESSCGTQSFGLLDPKLCYLLDGILFIYGVILTALFLRVKFSRSADAPAYQQGQNQLYNELNLGRREEYDVLDKRRGRDPEMGGKPQRRKNPQEGLYNELQKDKMAEAYSEIGMKGERRRGKGHDGLYQGLSTATKDTYDALHMQALPPR

SEQ ID NO: 13489 - protein, 1088 aa, Artificial Sequence
  Synthetic Polypeptide
MALPVTALLLPLALLLHAARPEVQLVESGGGLVQPGGSLRLSCAASGFSFSDFWMSWVRQAPGKGLEWVATISQAGSEKDYVDSVKGRFTISRDNAKKSLYLQMNSLRAEDTAVYYCASGVYSFDYRGQGTLVTVSSGTGGGGSGGGGSGGGGSEFDIQMTQSPSSLSASVGDRVTITCKASQDVSTAVAWFQQKPGKAPKLLIYSPSYRYTGVPSRFSGSGSGTDFTLTISSLQPEDFTYYCQQLYSTPYTFGQGTKVEIKLEDLKNVFPPEVAVFEPSEAEISHTQKATLVCLATGFYPDHVELSWWVNGKEVHSGVSTDPQPLKEQPALNDSRYCLSSRLRVSATFWQNPRNHFRCQVQFYGLSENDEWTQDRAKPVTQIVSAEAWGRADCGSQSFGLLDPKLCYLLDGILFIYGVILTALFLRVKFSRSADAPAYQQGQNQLYNELNLGRREEYDVLDKRRGRDPEMGGKPQRRKNPQEGLYNELQKDKMAEAYSEIGMKGERRRGKGHDGLYQGLSTATKDTYDALHMQALPPRRAKRSGSGATNFSLLKQAGDVEENPGPTSMDWIWRILFLVGAATGAHSGPQLQLQESGPGLVKPSETLSLTCTVSGDSISSGDYYWGWIRQPPGKGLEWIGHIYYSGVTYYNPSLKSRVTISVDTSRNQFSLKLSSVTAADTAVYYCTREDSSNWRSRGQGTLVTVSSGSGGGGSGGGGSGGGGSFEEVQLVQSGAEVKKPGASVKVSCKASGYTFTDYYLDVVVRQAPGQGLEWIGRVNPYNGGTIYNQKFKGRVTLTRDTSTSTAYLELSSLRSEDTAVYYCARDHYRYDPLLDYWGQGTLVTVSSTRIQNPDPAVYQLRDSKSSDKSVCLFTDFDSQTNVSQSKDSDVYITDKTVLDMRSMDFKSNSAVAWSNKSDFACANAFNNSIIPEDTFFPSPESSCGTQSFGLLDPKLCYLLDGILFIYGVILTALFLRVKFSRSADAPAYQQGQNQLYNELNLGRREEYDVLDKRRGRDPEMGGKPQRRKNPQEGLYNELQKDKMAEAYSEIGMKGERRRGKGHDGLYQGLSTATKDTYDALHMQALPPR

SEQ ID NO: 13490 - protein, 1094 aa, Artificial Sequence
  Synthetic Polypeptide
MALPVTALLLPLALLLHAARPEVQLVESGGGLVQPGGSLRLSCAASGFSFSDFWMSWVRQAPGKGLEWVATISQAGSEKDYVDSVKGRFTISRDNAKKSLYLQMNSLRAEDTAVYYCASGVYSFDYRGQGTLVTVSSGTGGGGSGGGGSGGGGSEFDIQMTQSPSSLSASVGDRVTITCRASQSVSTSSYNYMHWYQQKPGKPPKLLIKYASNLESGVPSRFSGSGSGTDFTLTISSLQPEDFATYYCQHSWEIPLTFGQGTKVEIKLEDLKNVFPPEVAVFEPSEAEISHTQKATLVCLATGFYPDHVELSWWVNGKEVHSGVSTDPQPLKEQPALNDSRYCLSSRLRVSATFWQNPRNHFRCQVQFYGLSENDEWTQDRAKPVTQIVSAEAWGRADCGSQSFGLLDPKLCYLLDGILFIYGVILTALFLRVKFSRSADAPAYQQGQNQLYNELNLGRREEYDVLDKRRGRDPEMGGKPQRRKNPQEGLYNELQKDKMAEAYSEIGMKGERRRGKGHDGLYQGLSTATKDTYDALHMQALPPRRAKRSGSGATNFSLLKQAGDVEENPGPTSMDWIWRILFLVGAATGAHSGPQLQLQESGPGLVKPSETLSLTCTVSGDSISSGDYYWGWIRQPPGKGLEWIGHIYYSGVTYYNPSLKSRVTISVDTSRNQFSLKLSSVTAADTAVYYCTREDSSNWRSRGQGTLVTVSSGSGGGGSGGGGSGGGGSFEEVQLVQSGAEVKKPGASVKVSCKASGYSFTDYYMHWVRQAPGQGLEWIGRINPYNGAAFYSQNFKDRVTLTVDTSTSTAYLELSSLRSEDTAVYYCAIERGADLEGYAMDYWGQGTLVTVSSTRIQNPDPAVYQLRDSKSSDKSVCLFTDFDSQTNVSQSKDSDVYITDKTVLDMRSMDFKSNSAVAWSNKSDFACANAFNNSIIPEDTFFPSPESSCGTQSFGLLDPKLCYLLDGILFIYGVILTALFLRVKFSRSADAPAYQQGQNQLYNELNLGRREEYDVLDKRRGRDPEMGGKPQRRKNPQEGLYNELQKDKMAEAYSEIGMKGERRRGKGHDGLYQGLSTATKDTYDALHMQALPPR

SEQ ID NO: 13491 - protein, 1092 aa, Artificial Sequence
  Synthetic Polypeptide
MALPVTALLLPLALLLHAARPEVQLVESGGGLVQPGGSLRLSCAASGFSFSDFWMSWVRQAPGKGLEWVATISQAGSEKDYVDSVKGRFTISRDNAKKSLYLQMNSLRAEDTAVYYCASGVYSFDYRGQGTLVTVSSGTGGGGSGGGGSGGGGSEFEIVLTQSPATLSASPGERVTLTCRASSNVISSYVHWYQQKPGSSPRLFLYSTSNLASGVPSRFSGSGSGTDFTFTISSLEAEDAATYYCQQYSGYPLTFGQGTRLEIKLEDLKNVFPPEVAVFEPSEAEISHTQKATLVCLATGFYPDHVELSWWVNGKEVHSGVSTDPQPLKEQPALNDSRYCLSSRLRVSATFWQNPRNHFRCQVQFYGLSENDEWTQDRAKPVTQIVSAEAWGRADCGSQSFGLLDPKLCYLLDGILFIYGVILTALFLRVKFSRSADAPAYQQGQNQLYNELNLGRREEYDVLDKRRGRDPEMGGKPQRRKNPQEGLYNELQKDKMAEAYSEIGMKGERRRGKGHDGLYQGLSTATKDTYDALHMQALPPRRAKRSGSGATNFSLLKQAGDVEENPGPTSMDWIWRILFLVGAATGAHSGPQLQLQESGPGLVKPSETLSLTCTVSGDSISSGDYYWGWIRQPPGKGLEWIGHIYYSGVTYYNPSLKSRVTISVDTSRNQFSLKLSSVTAADTAVYYCTREDSSNWRSRGQGTLVTVSSGSGGGGSGGGGSGGGGSFEQVQLQESGPGLVKPSETLSLTCAVSGYSITSAYYWNWIRQPPGKGLEWIGYISYDGRNNYNPSLKNRITINPDTSKNQFSLQLNSVTPEDTAVYYCAREGDYDVGNYYAMDYWGQGTLVTVSSTRIQNPDPAVYQLRDSKSSDKSVCLFTDFDSQTNVSQSKDSDVYITDKTVLDMRSMDFKSNSAVAWSNKSDFACANAFNNSIIPEDTFFPSPESSCGTQSFGLLDPKLCYLLDGILFIYGVILTALFLRVKFSRSADAPAYQQGQNQLYNELNLGRREEYDVLDKRRGRDPEMGGKPQRRKNPQEGLYNELQKDKMAEAYSEIGMKGERRRGKGHDGLYQGLSTATKDTYDALHMQALPPR

SEQ ID NO: 13492 - protein, 1092 aa, Artificial Sequence
  Synthetic Polypeptide
MALPVTALLLPLALLLHAARPEVQLVESGGGLVQPGGSLRLSCAASGFSFSDFWMSWVRQAPGKGLEWVATISQAGSEKDYVDSVKGRFTISRDNAKKSLYLQMNSLRAEDTAVYYCASGVYSFDYRGQGTLVTVSSGTGGGGSGGGGSGGGGSEFEIVLTQSPATLSLSPGERATLSCRASSNVISSYVHWYQQKPGQAPRLLIYSTSNLASGIPARFSGSGSGTDFTLTISSLEPEDFAVYYCQQYSGYPLTFGQGTRLEIKLEDLKNVFPPEVAVFEPSEAEISHTQKATLVCLATGFYPDHVELSWWVNGKEVHSGVSTDPQPLKEQPALNDSRYCLSSRLRVSATFWQNPRNHFRCQVQFYGLSENDEWTQDRAKPVTQIVSAEAWGRADCGSQSFGLLDPKLCYLLDGILFIYGVILTALFLRVKFSRSADAPAYQQGQNQLYNELNLGRREEYDVLDKRRGRDPEMGGKPQRRKNPQEGLYNELQKDKMAEAYSEIGMKGERRRGKGHDGLYQGLSTATKDTYDALHMQALPPRRAKRSGSGATNFSLLKQAGDVEENPGPTSMDWIWRILFLVGAATGAHSGPQLQLQESGPGLVKPSETLSLTCTVSGDSISSGDYYWGWIRQPPGKGLEWIGHIYYSGVTYYNPSLKSRVTISVDTSRNQFSLKLSSVTAADTAVYYCTREDSSNWRSRGQGTLVTVSSGSGGGGSGGGGSGGGGSFEEVQLVESGGGLVQPGRSLRLSCAASGYSITSAYYWNWVRQAPGKGLEWVSYISYDGRNNYNPSLKNRFTISRDNAKKSLYLQMNSLRAEDTALYYCAKEGDYDVGNYYAMDYWGQGTTVTVSSTRIQNPDPAVYQLRDSKSSDKSVCLFTDFDSQTNVSQSKDSDVYITDKTVLDMRSMDFKSNSAVAWSNKSDFACANAFNNSIIPEDTFFPSPESSCGTQSFGLLDPKLCYLLDGILFIYGVILTALFLRVKFSRSADAPAYQQGQNQLYNELNLGRREEYDVLDKRRGRDPEMGGKPQRRKNPQEGLYNELQKDKMAEAYSEIGMKGERRRGKGHDGLYQGLSTATKDTYDALHMQALPPR

SEQ ID NO: 13493 - protein, 1091 aa, Artificial Sequence
  Synthetic Polypeptide
MALPVTALLLPLALLLHAARPEVQLVESGGGLVQPGGSLRLSCAASGFSFSDFWMSWVRQAPGKGLEWVATISQAGSEKDYVDSVKGRFTISRDNAKKSLYLQMNSLRAEDTAVYYCASGVYSFDYRGQGTLVTVSSGTGGGGSGGGGSGGGGSEFDVVMTQTPLSLPVSLGDQASISCRSSQSLVHSNGNTYLRWYLQKPGQSPKVLIYKVSNRVSGVPDRFSGSGSGTDFTLKINRVEAEDLGVYFCSQSTHVPWTFGGGTKLEIKLEDLKNVFPPEVAVFEPSEAEISHTQKATLVCLATGFYPDHVELSWWVNGKEVHSGVSTDPQPLKEQPALNDSRYCLSSRLRVSATFWQNPRNHFRCQVQFYGLSENDEWTQDRAKPVTQIVSAEAWGRADCGSQSFGLLDPKLCYLLDGILFIYGVILTALFLRVKFSRSADAPAYQQGQNQLYNELNLGRREEYDVLDKRRGRDPEMGGKPQRRKNPQEGLYNELQKDKMAEAYSEIGMKGERRRGKGHDGLYQGLSTATKDTYDALHMQALPPRRAKRSGSGATNFSLLKQAGDVEENPGPTSMDWIWRILFLVGAATGAHSGPQLQLQESGPGLVKPSETLSLTCTVSGDSISSGDYYWGWIRQPPGKGLEWIGHIYYSGVTYYNPSLKSRVTISVDTSRNQFSLKLSSVTAADTAVYYCTREDSSNWRSRGQGTLVTVSSGSGGGGSGGGGSGGGGSFEGVKLDETGGGLVQPGGAMKLSCVTSGFTFGHYWMNWVRQSPEKGLEWVAQFRNKPYNYETYYSDSVKGRFTISRDDSKSSVYLQMNNLRVEDTGIYYCTGASYGMEYLGQGTSVTVSTTRIQNPDPAVYQLRDSKSSDKSVCLFTDFDSQTNVSQSKDSDVYITDKTVLDMRSMDFKSNSAVAWSNKSDFACANAFNNSIIPEDTFFPSPESSCGTQSFGLLDPKLCYLLDGILFIYGVILTALFLRVKFSRSADAPAYQQGQNQLYNELNLGRREEYDVLDKRRGRDPEMGGKPQRRKNPQEGLYNELQKDKMAEAYSEIGMKGERRRGKGHDGLYQGLSTATKDTYDALHMQALPPR

SEQ ID NO: 13494 - protein, 1097 aa, Artificial Sequence
  Synthetic Polypeptide
MALPVTALLLPLALLLHAARPEVQLVESGGGLVQPGGSLRLSCAASGFSFSDFWMSWVRQAPGKGLEWVATISQAGSEKDYVDSVKGRFTISRDNAKKSLYLQMNSLRAEDTAVYYCASGVYSFDYRGQGTLVTVSSGTGGGGSGGGGSGGGGSEFQVQLVESGGNLVQPGGSLRLSCAASGFTFGSFSMSWVRQAPGGGLEWVAGLSARSSLTHYADSVKGRFTISRDNAKNSVYLQMNSLRVEDTAVYYCARRSYDSSGYWGHFYSYMDVWGQGTLVTVSLEDLKNVFPPEVAVFEPSEAEISHTQKATLVCLATGFYPDHVELSWWVNGKEVHSGVSTDPQPLKEQPALNDSRYCLSSRLRVSATFWQNPRNHFRCQVQFYGLSENDEWTQDRAKPVTQIVSAEAWGRADCGSQSFGLLDPKLCYLLDGILFIYGVILTALFLRVKFSRSADAPAYQQGQNQLYNELNLGRREEYDVLDKRRGRDPEMGGKPQRRKNPQEGLYNELQKDKMAEAYSEIGMKGERRRGKGHDGLYQGLSTATKDTYDALHMQALPPRRAKRSGSGATNFSLLKQAGDVEENPGPTSMDWIWRILFLVGAATGAHSGPQLQLQESGPGLVKPSETLSLTCTVSGDSISSGDYYWGWIRQPPGKGLEWIGHIYYSGVTYYNPSLKSRVTISVDTSRNQFSLKLSSVTAADTAVYYCTREDSSNWRSRGQGTLVTVSSGSGGGGSGGGGSGGGGSFESVLTQPSSVSAAPGQKVTISCSGSTSNIGNNYVSWYQQHPGKAPKLMIYDVSKRPSGVPDRFSGSKSGNSASLDISGLQSEDEADYYCAAWDDSLSEFLFGTGTKLTVLGTRIQNPDPAVYQLRDSKSSDKSVCLFTDFDSQTNVSQSKDSDVYITDKTVLDMRSMDFKSNSAVAWSNKSDFACANAFNNSIIPEDTFFPSPESSCGTQSFGLLDPKLCYLLDGILFIYGVILTALFLRVKFSRSADAPAYQQGQNQLYNELNLGRREEYDVLDKRRGRDPEMGGKPQRRKNPQEGLYNELQKDKMAEAYSEIGMKGERRRGKGHDGLYQGLSTATKDTYDALHMQALPPR

SEQ ID NO: 13495 - protein, 1092 aa, Artificial Sequence
  Synthetic Polypeptide
MALPVTALLLPLALLLHAARPEVQLVESGGGLVQPGGSLRLSCAASGFSFSDFWMSWVRQAPGKGLEWVATISQAGSEKDYVDSVKGRFTISRDNAKKSLYLQMNSLRAEDTAVYYCASGVYSFDYRGQGTLVTVSSGTGGGGSGGGGSGGGGSEFDVVMTQSPSSLSASVGDRVTITCQSSLDISHYLNWYQQKPGKAPKLLIYDASNLETGVPSRFSGSGSGTHFTFTISSLQPEDFATYYCQQYDNLPLTFGGGTKLEIKRLEDLKNVFPPEVAVFEPSEAEISHTQKATLVCLATGFYPDHVELSWWVNGKEVHSGVSTDPQPLKEQPALNDSRYCLSSRLRVSATFWQNPRNHFRCQVQFYGLSENDEWTQDRAKPVTQIVSAEAWGRADCGSQSFGLLDPKLCYLLDGILFIYGVILTALFLRVKFSRSADAPAYQQGQNQLYNELNLGRREEYDVLDKRRGRDPEMGGKPQRRKNPQEGLYNELQKDKMAEAYSEIGMKGERRRGKGHDGLYQGLSTATKDTYDALHMQALPPRRAKRSGSGATNFSLLKQAGDVEENPGPTSMDWIWRILFLVGAATGAHSGPQLQLQESGPGLVKPSETLSLTCTVSGDSISSGDYYWGWIRQPPGKGLEWIGHIYYSGVTYYNPSLKSRVTISVDTSRNQFSLKLSSVTAADTAVYYCTREDSSNWRSRGQGTLVTVSSGSGGGGSGGGGSGGGGSFEQVQLVQSGGGVVQPGGSLRVSCAASGVTLSDYGMHWVRQAPGKGLEWVAFIRNDGSDKYYADSVKGRFTISRDNSEKTVSLQMSSLRAEDTAVYYCAKNGESGPLDYWYLDLWGRGTLVTVSSTRIQNPDPAVYQLRDSKSSDKSVCLFTDFDSQTNVSQSKDSDVYITDKTVLDMRSMDFKSNSAVAWSNKSDFACANAFNNSIIPEDTFFPSPESSCGTQSFGLLDPKLCYLLDGILFIYGVILTALFLRVKFSRSADAPAYQQGQNQLYNELNLGRREEYDVLDKRRGRDPEMGGKPQRRKNPQEGLYNELQKDKMAEAYSEIGMKGERRRGKGHDGLYQGLSTATKDTYDALHMQALPPR

SEQ ID NO: 13496 - protein, 1096 aa, Artificial Sequence
  Synthetic Polypeptide
MALPVTALLLPLALLLHAARPEVQLVESGGGLVQPGGSLRLSCAASGFSFSDFWMSWVRQAPGKGLEWVATISQAGSEKDYVDSVKGRFTISRDNAKKSLYLQMNSLRAEDTAVYYCASGVYSFDYRGQGTLVTVSSGTGGGGSGGGGSGGGGSEFSYELTQPPSVSGTPGQRVAISCSGSSSNIGTRMVTWYQHVPGTAPKLLIFNNNQRPSGVPDRFSASKSGTSASLAIIGLQSDDEADYYCATWDDNVKSYVFGTGTKVTVLGSRLEDLKNVFPPEVAVFEPSEAEISHTQKATLVCLATGFYPDHVELSWWVNGKEVHSGVSTDPQPLKEQPALNDSRYCLSSRLRVSATFWQNPRNHFRCQVQFYGLSENDEWTQDRAKPVTQIVSAEAWGRADCGSQSFGLLDPKLCYLLDGILFIYGVILTALFLRVKFSRSADAPAYQQGQNQLYNELNLGRREEYDVLDKRRGRDPEMGGKPQRRKNPQEGLYNELQKDKMAEAYSEIGMKGERRRGKGHDGLYQGLSTATKDTYDALHMQALPPRRAKRSGSGATNFSLLKQAGDVEENPGPTSMDWIWRILFLVGAATGAHSGPQLQLQESGPGLVKPSETLSLTCTVSGDSISSGDYYWGWIRQPPGKGLEWIGHIYYSGVTYYNPSLKSRVTISVDTSRNQFSLKLSSVTAADTAVYYCTREDSSNWRSRGQGTLVTVSSGSGGGGSGGGGSGGGGSFELEMAQVQLQQWGAGLLKPSETLSLTCAVYGGSFSGYYWSWIRQPPGKGLEWIGEINHSGSTNYNPSLKSRVTISVDTSKNQFSLKLSSVTAADTAVYYCARAPQSWYVGDVWGQGTLVTVSSTRIQNPDPAVYQLRDSKSSDKSVCLFTDFDSQTNVSQSKDSDVYITDKTVLDMRSMDFKSNSAVAWSNKSDFACANAFNNSIIPEDTFFPSPESSCGTQSFGLLDPKLCYLLDGILFIYGVILTALFLRVKFSRSADAPAYQQGQNQLYNELNLGRREEYDVLDKRRGRDPEMGGKPQRRKNPQEGLYNELQKDKMAEAYSEIGMKGERRRGKGHDGLYQGLSTATKDTYDALHMQALPPR

SEQ ID NO: 13497 - protein, 1093 aa, Artificial Sequence
  Synthetic Polypeptide
MALPVTALLLPLALLLHAARPEVQLVESGGGLVQPGGSLRLSCAASGFSFSDFWMSWVRQAPGKGLEWVATISQAGSEKDYVDSVKGRFTISRDNAKKSLYLQMNSLRAEDTAVYYCASGVYSFDYRGQGTLVTVSSGTGGGGSGGGGSGGGGSEFQSVLTQPPSLSVAPGKTASITCGGNNIGMKSVHWYQQRPGQAPVLVIYYDSDRPSGIPGRFSGSNSGNTATLTISRVEAGDEADYYCQVWDTTGDHPGYVFGTGTKVTVLLEDLKNVFPPEVAVFEPSEAEISHTQKATLVCLATGFYPDHVELSWWVNGKEVHSGVSTDPQPLKEQPALNDSRYCLSSRLRVSATFWQNPRNHFRCQVQFYGLSENDEWTQDRAKPVTQIVSAEAWGRADCGSQSFGLLDPKLCYLLDGILFIYGVILTALFLRVKFSRSADAPAYQQGQNQLYNELNLGRREEYDVLDKRRGRDPEMGGKPQRRKNPQEGLYNELQKDKMAEAYSEIGMKGERRRGKGHDGLYQGLSTATKDTYDALHMQALPPRRAKRSGSGATNFSLLKQAGDVEENPGPTSMDWIWRILFLVGAATGAHSGPQLQLQESGPGLVKPSETLSLTCTVSGDSISSGDYYWGWIRQPPGKGLEWIGHIYYSGVTYYNPSLKSRVTISVDTSRNQFSLKLSSVTAADTAVYYCTREDSSNWRSRGQGTLVTVSSGSGGGGSGGGGSGGGGSFEQVQLVQSGAEVKKPGSSVKVSCKASGGTFSSYAISWVRQAPGQGLEWMGGIIPIFGTANYAQKFQGRVTITADESTSTAYMELSSLRSEDTAVYYCARGVYGYSGSAPYDEWGQGTLVTVSSTRIQNPDPAVYQLRDSKSSDKSVCLFTDFDSQTNVSQSKDSDVYITDKTVLDMRSMDFKSNSAVAWSNKSDFACANAFNNSIIPEDTFFPSPESSCGTQSFGLLDPKLCYLLDGILFIYGVILTALFLRVKFSRSADAPAYQQGQNQLYNELNLGRREEYDVLDKRRGRDPEMGGKPQRRKNPQEGLYNELQKDKMAEAYSEIGMKGERRRGKGHDGLYQGLSTATKDTYDALHMQALPPR

SEQ ID NO: 13498 - protein, 1091 aa, Artificial Sequence
  Synthetic Polypeptide
MALPVTALLLPLALLLHAARPEVQLVESGGGLVQPGGSLRLSCAASGFSFSDFWMSWVRQAPGKGLEWVATISQAGSEKDYVDSVKGRFTISRDNAKKSLYLQMNSLRAEDTAVYYCASGVYSFDYRGQGTLVTVSSGTGGGGSGGGGSGGGGSEFEVQLVESGGGLVQPGRSLRLSCAASGFTFDDYAMHWVRQAPGKGLEWVSGISWNSGSIGYADSVKGRFTISRDNAKNSLYLQMNSLRAEDTALYYCAKDKGGGYYDFWSGSDYWGQGTLVTVSSLEDLKNVFPPEVAVFEPSEAEISHTQKATLVCLATGFYPDHVELSWWVNGKEVHSGVSTDPQPLKEQPALNDSRYCLSSRLRVSATFWQNPRNHFRCQVQFYGLSENDEWTQDRAKPVTQIVSAEAWGRADCGSQSFGLLDPKLCYLLDGILFIYGVILTALFLRVKFSRSADAPAYQQGQNQLYNELNLGRREEYDVLDKRRGRDPEMGGKPQRRKNPQEGLYNELQKDKMAEAYSEIGMKGERRRGKGHDGLYQGLSTATKDTYDALHMQALPPRRAKRSGSGATNFSLLKQAGDVEENPGPTSMDWIWRILFLVGAATGAHSGPQLQLQESGPGLVKPSETLSLTCTVSGDSISSGDYYWGWIRQPPGKGLEWIGHIYYSGVTYYNPSLKSRVTISVDTSRNQFSLKLSSVTAADTAVYYCTREDSSNWRSRGQGTLVTVSSGSGGGGSGGGGSGGGGSFESSELTQDPAVSVALGQTVRITCQGDSLRSYYASWYQQKPGQAPVLVIYGKNNRPSGIPDRFSGSSSGNTASLTITGAQAEDEADYYCNSRDSSGWVFGGGTKLTVLTRIQNPDPAVYQLRDSKSSDKSVCLFTDFDSQTNVSQSKDSDVYITDKTVLDMRSMDFKSNSAVAWSNKSDFACANAFNNSIIPEDTFFPSPESSCGTQSFGLLDPKLCYLLDGILFIYGVILTALFLRVKFSRSADAPAYQQGQNQLYNELNLGRREEYDVLDKRRGRDPEMGGKPQRRKNPQEGLYNELQKDKMAEAYSEIGMKGERRRGKGHDGLYQGLSTATKDTYDALHMQALPPR

SEQ ID NO: 13499 - protein, 1100 aa, Artificial Sequence
  Synthetic Polypeptide
MALPVTALLLPLALLLHAARPEVQLVESGGGLVQPGGSLRLSCAASGFSFSDFWMSWVRQAPGKGLEWVATISQAGSEKDYVDSVKGRFTISRDNAKKSLYLQMNSLRAEDTAVYYCASGVYSFDYRGQGTLVTVSSGTGGGGSGGGGSGGGGSEFEVQLQQSGPGLVKPSQTLSLTCAISGDSVLSNSDTWNWIRQSPSRGLEWLGRTYHRSTWYDDYASSVRGRVSINVDTSKNQYSLQLNAVTPEDTGVYYCARDRLQDGNSWSDAFDVWGQGTMVTVSSLEDLKNVFPPEVAVFEPSEAEISHTQKATLVCLATGFYPDHVELSWWVNGKEVHSGVSTDPQPLKEQPALNDSRYCLSSRLRVSATFWQNPRNHFRCQVQFYGLSENDEWTQDRAKPVTQIVSAEAWGRADCGSQSFGLLDPKLCYLLDGILFIYGVILTALFLRVKFSRSADAPAYQQGQNQLYNELNLGRREEYDVLDKRRGRDPEMGGKPQRRKNPQEGLYNELQKDKMAEAYSEIGMKGERRRGKGHDGLYQGLSTATKDTYDALHMQALPPRRAKRSGSGATNFSLLKQAGDVEENPGPTSMDWIWRILFLVGAATGAHSGPQLQLQESGPGLVKPSETLSLTCTVSGDSISSGDYYWGWIRQPPGKGLEWIGHIYYSGVTYYNPSLKSRVTISVDTSRNQFSLKLSSVTAADTAVYYCTREDSSNWRSRGQGTLVTVSSGSGGGGSGGGGSGGGGSFEQSALTQPASVSGSPGQSITISCTGTSSDVGGYNYVSWYQQHPGKAPKLMIYDVSNRPSGVSNRFSGSKSGNTASLTISGLQAEDEADYYCSSYTSSSTLVYVFGTGTKVTVLTRIQNPDPAVYQLRDSKSSDKSVCLFTDFDSQTNVSQSKDSDVYITDKTVLDMRSMDFKSNSAVAWSNKSDFACANAFNNSIIPEDTFFPSPESSCGTQSFGLLDPKLCYLLDGILFIYGVILTALFLRVKFSRSADAPAYQQGQNQLYNELNLGRREEYDVLDKRRGRDPEMGGKPQRRKNPQEGLYNELQKDKMAEAYSEIGMKGERRRGKGHDGLYQGLSTATKDTYDALHMQALPPR

SEQ ID NO: 13500 - protein, 1078 aa, Artificial Sequence
  Synthetic Polypeptide
MALPVTALLLPLALLLHAARPEVQLVESGGGLVQPGGSLRLSCAASGFSFSDFWMSWVRQAPGKGLEWVATISQAGSEKDYVDSVKGRFTISRDNAKKSLYLQMNSLRAEDTAVYYCASGVYSFDYRGQGTLVTVSSGTGGGGSGGGGSGGGGSEFQVQLVQSGAEVKKPGASVKVSCKASGYTFTSYDINWVRQATGQGLEWMGWMNPNSGNTGYAQKFQGRVTMTRNTSISTAYMELSSLRSEDTAVYYCARGDSTKVEIKLEDLKNVFPPEVAVFEPSEAEISHTQKATLVCLATGFYPDHVELSWWVNGKEVHSGVSTDPQPLKEQPALNDSRYCLSSRLRVSATFWQNPRNHFRCQVQFYGLSENDEWTQDRAKPVTQIVSAEAWGRADCGSQSFGLLDPKLCYLLDGILFIYGVILTALFLRVKFSRSADAPAYQQGQNQLYNELNLGRREEYDVLDKRRGRDPEMGGKPQRRKNPQEGLYNELQKDKMAEAYSEIGMKGERRRGKGHDGLYQGLSTATKDTYDALHMQALPPRRAKRSGSGATNFSLLKQAGDVEENPGPTSMDWIWRILFLVGAATGAHSGPQLQLQESGPGLVKPSETLSLTCTVSGDSISSGDYYWGWIRQPPGKGLEWIGHIYYSGVTYYNPSLKSRVTISVDTSRNQFSLKLSSVTAADTAVYYCTREDSSNWRSRGQGTLVTVSSGSGGGGSGGGGSGGGGSFEQSVLTQPRSVSGSPGQSVTISCTGTSSDVGGYNYVSWYQQHPGEAPKLIIYDADKRPSGISNRFSSGKSGNTASLTISGLQVEDEADYYCCSYAGGSTWVFGGGTKVTVLTRIQNPDPAVYQLRDSKSSDKSVCLFTDFDSQTNVSQSKDSDVYITDKTVLDMRSMDFKSNSAVAWSNKSDFACANAFNNSIIPEDTFFPSPESSCGTQSFGLLDPKLCYLLDGILFIYGVILTALFLRVKFSRSADAPAYQQGQNQLYNELNLGRREEYDVLDKRRGRDPEMGGKPQRRKNPQEGLYNELQKDKMAEAYSEIGMKGERRRGKGHDGLYQGLSTATKDTYDALHMQALPPR

SEQ ID NO: 13501 - protein, 1100 aa, Artificial Sequence
  Synthetic Polypeptide
MALPVTALLLPLALLLHAARPEVQLVESGGGLVQPGGSLRLSCAASGFSFSDFWMSWVRQAPGKGLEWVATISQAGSEKDYVDSVKGRFTISRDNAKKSLYLQMNSLRAEDTAVYYCASGVYSFDYRGQGTLVTVSSGTGGGGSGGGGSGGGGSEFEVQLQQSGPGLVKPSQTLSLTCAISGDSVSSNSAAWNWIRQSPSRGLEWLGRTYYRSKWYSDYAVSVKSRITINPDTSKNQFSLQLNSVTPEDTAVYYCARDPYDFWSGYPDAFDIWGQGTMVTVSSLEDLKNVFPPEVAVFEPSEAEISHTQKATLVCLATGFYPDHVELSWWVNGKEVHSGVSTDPQPLKEQPALNDSRYCLSSRLRVSATFWQNPRNHFRCQVQFYGLSENDEWTQDRAKPVTQIVSAEAWGRADCGSQSFGLLDPKLCYLLDGILFIYGVILTALFLRVKFSRSADAPAYQQGQNQLYNELNLGRREEYDVLDKRRGRDPEMGGKPQRRKNPQEGLYNELQKDKMAEAYSEIGMKGERRRGKGHDGLYQGLSTATKDTYDALHMQALPPRRAKRSGSGATNFSLLKQAGDVEENPGPTSMDWIWRILFLVGAATGAHSGPQLQLQESGPGLVKPSETLSLTCTVSGDSISSGDYYWGWIRQPPGKGLEWIGHIYYSGVTYYNPSLKSRVTISVDTSRNQFSLKLSSVTAADTAVYYCTREDSSNWRSRGQGTLVTVSSGSGGGGSGGGGSGGGGSFEQSALTQPASVSGSPGQSITISCTGTSSDVGGYNYVSWYQQHPGKAPKVIISEVNNRPSGVSHRFSGSKSGNTASLTISGLQAEDEADYFCSSYTSGRTLYVFGTGSKVTVLGTRIQNPDPAVYQLRDSKSSDKSVCLFTDFDSQTNVSQSKDSDVYITDKTVLDMRSMDFKSNSAVAWSNKSDFACANAFNNSIIPEDTFFPSPESSCGTQSFGLLDPKLCYLLDGILFIYGVILTALFLRVKFSRSADAPAYQQGQNQLYNELNLGRREEYDVLDKRRGRDPEMGGKPQRRKNPQEGLYNELQKDKMAEAYSEIGMKGERRRGKGHDGLYQGLSTATKDTYDALHMQALPPR

SEQ ID NO: 13502 - protein, 1099 aa, Artificial Sequence
  Synthetic Polypeptide
MALPVTALLLPLALLLHAARPEVQLVESGGGLVQPGGSLRLSCAASGFSFSDFWMSWVRQAPGKGLEWVATISQAGSEKDYVDSVKGRFTISRDNAKKSLYLQMNSLRAEDTAVYYCASGVYSFDYRGQGTLVTVSSGTGGGGSGGGGSGGGGSEFQSALTQPASASGSPGQSVTISCTGTSSDVGGYNYVSWYQQHPGKAPKLMIYDVSNRPSGVSNRFSGSKSGNTASLTISGLQAEDEADYYCSSYTSSSTLYVFGTGTQLTVLLEDLKNVFPPEVAVFEPSEAEISHTQKATLVCLATGFYPDHVELSWWVNGKEVHSGVSTDPQPLKEQPALNDSRYCLSSRLRVSATFWQNPRNHFRCQVQFYGLSENDEWTQDRAKPVTQIVSAEAWGRADCGSQSFGLLDPKLCYLLDGILFIYGVILTALFLRVKFSRSADAPAYQQGQNQLYNELNLGRREEYDVLDKRRGRDPEMGGKPQRRKNPQEGLYNELQKDKMAEAYSEIGMKGERRRGKGHDGLYQGLSTATKDTYDALHMQALPPRRAKRSGSGATNFSLLKQAGDVEENPGPTSMDWIWRILFLVGAATGAHSGPQLQLQESGPGLVKPSETLSLTCTVSGDSISSGDYYWGWIRQPPGKGLEWIGHIYYSGVTYYNPSLKSRVTISVDTSRNQFSLKLSSVTAADTAVYYCTREDSSNWRSRGQGTLVTVSSGSGGGGSGGGGSGGGGSFEEVQLQQSGPGLVKPSQTLSLTCAISGDSMLSNSDTWNWIRQSPSRGLEWLGRTYHRSTWYDDYASSVRGRVSINVDTSKNQYSLQLNAVTPEDTGVYYCARVRLQDGNSWSDAFDVWGQGTMVTVSSTRIQNPDPAVYQLRDSKSSDKSVCLFTDFDSQTNVSQSKDSDVYITDKTVLDMRSMDFKSNSAVAWSNKSDFACANAFNNSIIPEDTFFPSPESSCGTQSFGLLDPKLCYLLDGILFIYGVILTALFLRVKFSRSADAPAYQQGQNQLYNELNLGRREEYDVLDKRRGRDPEMGGKPQRRKNPQEGLYNELQKDKMAEAYSEIGMKGERRRGKGHDGLYQGLSTATKDTYDALHMQALPPR

SEQ ID NO: 13503 - protein, 1099 aa, Artificial Sequence
  Synthetic Polypeptide
MALPVTALLLPLALLLHAARPEVQLVESGGGLVQPGGSLRLSCAASGFSFSDFWMSWVRQAPGKGLEWVATISQAGSEKDYVDSVKGRFTISRDNAKKSLYLQMNSLRAEDTAVYYCASGVYSFDYRGQGTLVTVSSGTGGGGSGGGGSGGGGSEFDVMLTQTPLSLPVSLGDQASISCRSSQSILHSTGDTYLEWYLQKPGQSPKLLINKVSNRLSGVPDRFSGSGSGTDFTLKISRVEAEDLGVYYCFQGSHVPWTFGGGTKLEIKRADAAPTVSIFPLEDLKNVFPPEVAVFEPSEAEISHTQKATLVCLATGFYPDHVELSWWVNGKEVHSGVSTDPQPLKEQPALNDSRYCLSSRLRVSATFWQNPRNHFRCQVQFYGLSENDEWTQDRAKPVTQIVSAEAWGRADCGSQSFGLLDPKLCYLLDGILFIYGVILTALFLRVKFSRSADAPAYQQGQNQLYNELNLGRREEYDVLDKRRGRDPEMGGKPQRRKNPQEGLYNELQKDKMAEAYSEIGMKGERRRGKGHDGLYQGLSTATKDTYDALHMQALPPRRAKRSGSGATNFSLLKQAGDVEENPGPTSMDWIWRILFLVGAATGAHSGPQLQLQESGPGLVKPSETLSLTCTVSGDSISSGDYYWGWIRQPPGKGLEWIGHIYYSGVTYYNPSLKSRVTISVDTSRNQFSLKLSSVTAADTAVYYCTREDSSNWRSRGQGTLVTVSSGSGGGGSGGGGSGGGGSFEQVKLQQSGPSLVKPGASVKMSCKASGYTFTDFYMKWVKQSHGKSLEWIGDINPNIGDTFYNQKFKGKATLTVDKSSSTAYMQLNSLTSEDSAVYFCSVGYFDVWGAGTTVTVSSTRIQNPDPAVYQLRDSKSSDKSVCLFTDFDSQTNVSQSKDSDVYITDKTVLDMRSMDFKSNSAVAWSNKSDFACANAFNNSIIPEDTFFPSPESSCGTQSFGLLDPKLCYLLDGILFIYGVILTALFLRVKFSRSADAPAYQQGQNQLYNELNLGRREEYDVLDKRRGRDPEMGGKPQRRKNPQEGLYNELQKDKMAEAYSEIGMKGERRRGKGHDGLYQGLSTATKDTYDALHMQALPPR

SEQ ID NO: 13504 - protein, 1095 aa, Artificial Sequence
  Synthetic Polypeptide
MALPVTALLLPLALLLHAARPEVQLVESGGGLVQPGGSLRLSCAASGFSFSDFWMSWVRQAPGKGLEWVATISQAGSEKDYVDSVKGRFTISRDNAKKSLYLQMNSLRAEDTAVYYCASGVYSFDYRGQGTLVTVSSGTGGGGSGGGGSGGGGSEFEIVLTQSPATLSLSPGERATLSCRASQSVSIYLAWYQQKPGQAPRLLIYDASNRATGIPARFSGSGSGTDFTLTISSLEPEDFAVYYCQQRSNWPPFTFGPGTKVDIKLEDLKNVFPPEVAVFEPSEAEISHTQKATLVCLATGFYPDHVELSWWVNGKEVHSGVSTDPQPLKEQPALNDSRYCLSSRLRVSATFWQNPRNHFRCQVQFYGLSENDEWTQDRAKPVTQIVSAEAWGRADCGSQSFGLLDPKLCYLLDGILFIYGVILTALFLRVKFSRSADAPAYQQGQNQLYNELNLGRREEYDVLDKRRGRDPEMGGKPQRRKNPQEGLYNELQKDKMAEAYSEIGMKGERRRGKGHDGLYQGLSTATKDTYDALHMQALPPRRAKRSGSGATNFSLLKQAGDVEENPGPTSMDWIWRILFLVGAATGAHSGPQLQLQESGPGLVKPSETLSLTCTVSGDSISSGDYYWGWIRQPPGKGLEWIGHIYYSGVTYYNPSLKSRVTISVDTSRNQFSLKLSSVTAADTAVYYCTREDSSNWRSRGQGTLVTVSSGSGGGGSGGGGSGGGGSFEQVQLVESGGGVVQPGRSLRLSCAASGFTFSSYGMHWVRQAPGKGLEWVAVIWDDGSNKYYVDSVKGRFTISRDNSKNTLYLQMNSLRAEDTAVYYCARDDYYGSGSFNSYYGTDVWGQGTTVTVSSTRIQNPDPAVYQLRDSKSSDKSVCLFTDFDSQTNVSQSKDSDVYITDKTVLDMRSMDFKSNSAVAWSNKSDFACANAFNNSIIPEDTFFPSPESSCGTQSFGLLDPKLCYLLDGILFIYGVILTALFLRVKFSRSADAPAYQQGQNQLYNELNLGRREEYDVLDKRRGRDPEMGGKPQRRKNPQEGLYNELQKDKMAEAYSEIGMKGERRRGKGHDGLYQGLSTATKDTYDALHMQALPPR

SEQ ID NO: 13505 - protein, 1080 aa, Artificial Sequence
  Synthetic Polypeptide
MALPVTALLLPLALLLHAARPEVQLVESGGGLVQPGGSLRLSCAASGFSFSDFWMSWVRQAPGKGLEWVATISQAGSEKDYVDSVKGRFTISRDNAKKSLYLQMNSLRAEDTAVYYCASGVYSFDYRGQGTLVTVSSGTGGGGSGGGGSGGGGSEFDIQMTQSPSSLSASVGDRVTITCRASQGISSWLAWYQQKPEKAPKSLIYAASSLQSGVPSRFSGSGSGTDFTLTISSLQPEDFATYYCQQYNSYPYTFGQGTKLEIKLEDLKNVFPPEVAVFEPSEAEISHTQKATLVCLATGFYPDHVELSWWVNGKEVHSGVSTDPQPLKEQPALNDSRYCLSSRLRVSATFWQNPRNHFRCQVQFYGLSENDEWTQDRAKPVTQIVSAEAWGRADCGSQSFGLLDPKLCYLLDGILFIYGVILTALFLRVKFSRSADAPAYQQGQNQLYNELNLGRREEYDVLDKRRGRDPEMGGKPQRRKNPQEGLYNELQKDKMAEAYSEIGMKGERRRGKGHDGLYQGLSTATKDTYDALHMQALPPRRAKRSGSGATNFSLLKQAGDVEENPGPTSMDWIWRILFLVGAATGAHSGPQLQLQESGPGLVKPSETLSLTCTVSGDSISSGDYYWGWIRQPPGKGLEWIGHIYYSGVTYYNPSLKSRVTISVDTSRNQFSLKLSSVTAADTAVYYCTREDSSNWRSRGQGTLVTVSSGSGGGGSGGGGSGGGGSFEEVQLVQSGGGLVHPGGSLRLSCAGSGFTFSTYLMYWVRQAPGKTLEWVSAIGSGGDTYYADSVKGRFTISRDNAKNSLYLQMNSLRAEDMAVYYCARGLGYWGQGTLVTVSSTRIQNPDPAVYQLRDSKSSDKSVCLFTDFDSQTNVSQSKDSDVYITDKTVLDMRSMDFKSNSAVAWSNKSDFACANAFNNSIIPEDTFFPSPESSCGTQSFGLLDPKLCYLLDGILFIYGVILTALFLRVKFSRSADAPAYQQGQNQLYNELNLGRREEYDVLDKRRGRDPEMGGKPQRRKNPQEGLYNELQKDKMAEAYSEIGMKGERRRGKGHDGLYQGLSTATKDTYDALHMQALPPR

SEQ ID NO: 13506 - protein, 1099 aa, Artificial Sequence
  Synthetic Polypeptide
MALPVTALLLPLALLLHAARPEVQLVESGGGLVQPGGSLRLSCAASGFSFSDFWMSWVRQAPGKGLEWVATISQAGSEKDYVDSVKGRFTISRDNAKKSLYLQMNSLRAEDTAVYYCASGVYSFDYRGQGTLVTVSSGTGGGGSGGGGSGGGGSEFLPVLTQPPSVSVAPGKTARITCGGNNIGSKSVHWYQQKPGQAPVLVVYDDSDRPSGIPERFSGSNSGNTATLTISRVEAGDEADYYCQVWDSSSDYVVFGGGTKLTVLLEDLKNVFPPEVAVFEPSEAEISHTQKATLVCLATGFYPDHVELSWWVNGKEVHSGVSTDPQPLKEQPALNDSRYCLSSRLRVSATFWQNPRNHFRCQVQFYGLSENDEWTQDRAKPVTQIVSAEAWGRADCGSQSFGLLDPKLCYLLDGILFIYGVILTALFLRVKFSRSADAPAYQQGQNQLYNELNLGRREEYDVLDKRRGRDPEMGGKPQRRKNPQEGLYNELQKDKMAEAYSEIGMKGERRRGKGHDGLYQGLSTATKDTYDALHMQALPPRRAKRSGSGATNFSLLKQAGDVEENPGPTSMDWIWRILFLVGAATGAHSGPQLQLQESGPGLVKPSETLSLTCTVSGDSISSGDYYWGWIRQPPGKGLEWIGHIYYSGVTYYNPSLKSRVTISVDTSRNQFSLKLSSVTAADTAVYYCTREDSSNWRSRGQGTLVTVSSGSGGGGSGGGGSGGGGSFEEVQLVQSGAEVKKPGESLKISCKGSGYSFTSYWIGWVRQMPGKGLEWMGIIYPGDSDTRYSPSFQGQVTISADKSISTAYLQWSSLKASDTAMYYCARQVWGWQGGMYPRSNWWYNLDSWGQGTLVTVSSTRIQNPDPAVYQLRDSKSSDKSVCLFTDFDSQTNVSQSKDSDVYITDKTVLDMRSMDFKSNSAVAWSNKSDFACANAFNNSIIPEDTFFPSPESSCGTQSFGLLDPKLCYLLDGILFIYGVILTALFLRVKFSRSADAPAYQQGQNQLYNELNLGRREEYDVLDKRRGRDPEMGGKPQRRKNPQEGLYNELQKDKMAEAYSEIGMKGERRRGKGHDGLYQGLSTATKDTYDALHMQALPPR

SEQ ID NO: 13507 - protein, 1092 aa, Artificial Sequence
  Synthetic Polypeptide
MALPVTALLLPLALLLHAARPEVQLVESGGGLVQPGGSLRLSCAASGFSFSDFWMSWVRQAPGKGLEWVATISQAGSEKDYVDSVKGRFTISRDNAKKSLYLQMNSLRAEDTAVYYCASGVYSFDYRGQGTLVTVSSGTGGGGSGGGGSGGGGSEFELVMTQSPASLAVSLGQRATISCRASESVDSYGKSFMHWYQLKPGQPPKLLIYRASNLESGVPARFSGSGSRTDFTLTIDPVEADDAATYYCQQNNEDPWTFGGGTKLEIKLEDLKNVFPPEVAVFEPSEAEISHTQKATLVCLATGFYPDHVELSWWVNGKEVHSGVSTDPQPLKEQPALNDSRYCLSSRLRVSATFWQNPRNHFRCQVQFYGLSENDEWTQDRAKPVTQIVSAEAWGRADCGSQSFGLLDPKLCYLLDGILFIYGVILTALFLRVKFSRSADAPAYQQGQNQLYNELNLGRREEYDVLDKRRGRDPEMGGKPQRRKNPQEGLYNELQKDKMAEAYSEIGMKGERRRGKGHDGLYQGLSTATKDTYDALHMQALPPRRAKRSGSGATNFSLLKQAGDVEENPGPTSMDWIWRILFLVGAATGAHSGPQLQLQESGPGLVKPSETLSLTCTVSGDSISSGDYYWGWIRQPPGKGLEWIGHIYYSGVTYYNPSLKSRVTISVDTSRNQFSLKLSSVTAADTAVYYCTREDSSNWRSRGQGTLVTVSSGSGGGGSGGGGSGGGGSFEEVQLEQSGPELVKPGASVKMSCKASGYTFTNYYMKWVKQSHGKSLEWIGDLNPNNGDTFYNQKFKGKATLTVDKSSNTAYMQLNSLTSEDSAVYYCARTGRYEENAMDYWGQGTSVTVSSTRIQNPDPAVYQLRDSKSSDKSVCLFTDFDSQTNVSQSKDSDVYITDKTVLDMRSMDFKSNSAVAWSNKSDFACANAFNNSIIPEDTFFPSPESSCGTQSFGLLDPKLCYLLDGILFIYGVILTALFLRVKFSRSADAPAYQQGQNQLYNELNLGRREEYDVLDKRRGRDPEMGGKPQRRKNPQEGLYNELQKDKMAEAYSEIGMKGERRRGKGHDGLYQGLSTATKDTYDALHMQALPPR

SEQ ID NO: 13508 - protein, 1086 aa, Artificial Sequence
  Synthetic Polypeptide
MALPVTALLLPLALLLHAARPEVQLVESGGGLVQPGGSLRLSCAASGFSFSDFWMSWVRQAPGKGLEWVATISQAGSEKDYVDSVKGRFTISRDNAKKSLYLQMNSLRAEDTAVYYCASGVYSFDYRGQGTLVTVSSGTGGGGSGGGGSGGGGSEFDVVMTQSPSSLSASVGDRVTITCMASEDIYIRLAWYQQKPGNAPKLLIYAATSLETGVPSRFSGSGSGTDFTLTISSLQPEDFATYYCQQYWSSPWTFGGGTKVEIKLEDLKNVFPPEVAVFEPSEAEISHTQKATLVCLATGFYPDHVELSWWVNGKEVHSGVSTDPQPLKEQPALNDSRYCLSSRLRVSATFWQNPRNHFRCQVQFYGLSENDEWTQDRAKPVTQIVSAEAWGRADCGSQSFGLLDPKLCYLLDGILFIYGVILTALFLRVKFSRSADAPAYQQGQNQLYNELNLGRREEYDVLDKRRGRDPEMGGKPQRRKNPQEGLYNELQKDKMAEAYSEIGMKGERRRGKGHDGLYQGLSTATKDTYDALHMQALPPRRAKRSGSGATNFSLLKQAGDVEENPGPTSMDWIWRILFLVGAATGAHSGPQLQLQESGPGLVKPSETLSLTCTVSGDSISSGDYYWGWIRQPPGKGLEWIGHIYYSGVTYYNPSLKSRVTISVDTSRNQFSLKLSSVTAADTAVYYCTREDSSNWRSRGQGTLVTVSSGSGGGGSGGGGSGGGGSFEQVQLQESGPGLVKPSQTLSLTCTVSGYSITSDYTWNWIRQPPGNGLEWIGYITYSGSTSYNPSLKSRVLISVDTSKNQVSLKLSSVTAADTAVYYCARLGRRYTMDYWGQGTTVTVSSTRIQNPDPAVYQLRDSKSSDKSVCLFTDFDSQTNVSQSKDSDVYITDKTVLDMRSMDFKSNSAVAWSNKSDFACANAFNNSIIPEDTFFPSPESSCGTQSFGLLDPKLCYLLDGILFIYGVILTALFLRVKFSRSADAPAYQQGQNQLYNELNLGRREEYDVLDKRRGRDPEMGGKPQRRKNPQEGLYNELQKDKMAEAYSEIGMKGERRRGKGHDGLYQGLSTATKDTYDALHMQALPPR

SEQ ID NO: 13509 - protein, 1090 aa, Artificial Sequence; identical to SEQ ID NO: 13372
  Synthetic Polypeptide

SEQ ID NO: 13510 - protein, 1090 aa, Artificial Sequence
  Synthetic Polypeptide
MALPVTALLLPLALLLHAARPEVQLVESGGGLVQPGGSLRLSCAASGFSFSDFWMSWVRQAPGKGLEWVATISQAGSEKDYVDSVKGRFTISRDNAKKSLYLQMNSLRAEDTAVYYCASGVYSFDYRGQGTLVTVSSGTGGGGSGGGGSGGGGSEFDIVLTQSPATLSLSPGDRATLSCRASESVTILGSHLIYWYQQKPGQAPRLLIQLASNVQTGIPARFSGSGSRTDFTLTISSLEPEDFAVYYCLQSRTIPRTFGQGTKLEIKRLEDLKNVFPPEVAVFEPSEAEISHTQKATLVCLATGFYPDHVELSWWVNGKEVHSGVSTDPQPLKEQPALNDSRYCLSSRLRVSATFWQNPRNHFRCQVQFYGLSENDEWTQDRAKPVTQIVSAEAWGRADCGSQSFGLLDPKLCYLLDGILFIYGVILTALFLRVKFSRSADAPAYQQGQNQLYNELNLGRREEYDVLDKRRGRDPEMGGKPQRRKNPQEGLYNELQKDKMAEAYSEIGMKGERRRGKGHDGLYQGLSTATKDTYDALHMQALPPRRAKRSGSGATNFSLLKQAGDVEENPGPTSMDWIWRILFLVGAATGAHSGPQLQLQESGPGLVKPSETLSLTCTVSGDSISSGDYYWGWIRQPPGKGLEWIGHIYYSGVTYYNPSLKSRVTISVDTSRNQFSLKLSSVTAADTAVYYCTREDSSNWRSRGQGTLVTVSSGSGGGGSGGGGSGGGGSFEQVQLVQSGSELKKPGESVKISCKASGYTFTHYSMNWVRQAPGQGLEWMGRINTETGEPLYADDFKGRFVFSLDTSASTAYLQISSLKAEDTAVYYCSNDYLYSLDYWGQGTLVTVSSTRIQNPDPAVYQLRDSKSSDKSVCLFTDFDSQTNVSQSKDSDVYITDKTVLDMRSMDFKSNSAVAWSNKSDFACANAFNNSIIPEDTFFPSPESSCGTQSFGLLDPKLCYLLDGILFIYGVILTALFLRVKFSRSADAPAYQQGQNQLYNELNLGRREEYDVLDKRRGRDPEMGGKPQRRKNPQEGLYNELQKDKMAEAYSEIGMKGERRRGKGHDGLYQGLSTATKDTYDALHMQALPPR

SEQ ID NO: 13511 - protein, 1091 aa, Artificial Sequence
  Synthetic Polypeptide
MALPVTALLLPLALLLHAARPEVQLVESGGGLVQPGGSLRLSCAASGFSFSDFWMSWVRQAPGKGLEWVATISQAGSEKDYVDSVKGRFTISRDNAKKSLYLQMNSLRAEDTAVYYCASGVYSFDYRGQGTLVTVSSGTGGGGSGGGGSGGGGSEFDIQLTQSPSFLSASVGDRVTITCRASQGISTDLNWYQQKPGKAPKLLIYAASNLESGVPSRFSGSGSGTEFTLTISSLQPEDFATYYCQQSYNWPYTFGGGTKVEIKRLEDLKNVFPPEVAVFEPSEAEISHTQKATLVCLATGFYPDHVELSWWVNGKEVHSGVSTDPQPLKEQPALNDSRYCLSSRLRVSATFWQNPRNHFRCQVQFYGLSENDEWTQDRAKPVTQIVSAEAWGRADCGSQSFGLLDPKLCYLLDGILFIYGVILTALFLRVKFSRSADAPAYQQGQNQLYNELNLGRREEYDVLDKRRGRDPEMGGKPQRRKNPQEGLYNELQKDKMAEAYSEIGMKGERRRGKGHDGLYQGLSTATKDTYDALHMQALPPRRAKRSGSGATNFSLLKQAGDVEENPGPTSMDWIWRILFLVGAATGAHSGPQLQLQESGPGLVKPSETLSLTCTVSGDSISSGDYYWGWIRQPPGKGLEWIGHIYYSGVTYYNPSLKSRVTISVDTSRNQFSLKLSSVTAADTAVYYCTREDSSNWRSRGQGTLVTVSSGSGGGGSGGGGSGGGGSFEEVQLVESGGGLVKPGGSLRLSCAASGFTFSNFEMNWVRQAPGKGLEWVSGISSNGRYINYADSVKGRFTISRDNAKNSLYLQMNSLRAEDTAVYYCARVVDFDQDYNGFDYWGQGTLVTVSSTRIQNPDPAVYQLRDSKSSDKSVCLFTDFDSQTNVSQSKDSDVYITDKTVLDMRSMDFKSNSAVAWSNKSDFACANAFNNSIIPEDTFFPSPESSCGTQSFGLLDPKLCYLLDGILFIYGVILTALFLRVKFSRSADAPAYQQGQNQLYNELNLGRREEYDVLDKRRGRDPEMGGKPQRRKNPQEGLYNELQKDKMAEAYSEIGMKGERRRGKGHDGLYQGLSTATKDTYDALHMQALPPR

SEQ ID NO: 13512 - protein, 1089 aa, Artificial Sequence
  Synthetic Polypeptide
MALPVTALLLPLALLLHAARPEVQLVESGGGLVQPGGSLRLSCAASGFSFSDFWMSWVRQAPGKGLEWVATISQAGSEKDYVDSVKGRFTISRDNAKKSLYLQMNSLRAEDTAVYYCASGVYSFDYRGQGTLVTVSSGTGGGGSGGGGSGGGGSEFDIQLTQSPSFLSASVGDRVTITCSLSLGISTWRDWFPPRLGRGLEPLTYAASTLQSGVPSRFSGSGSGTEFTLTISSLQPEDFATYYCQQLNSYPLTFGGGTKVEIKRLEDLKNVFPPEVAVFEPSEAEISHTQKATLVCLATGFYPDHVELSWWVNGKEVHSGVSTDPQPLKEQPALNDSRYCLSSRLRVSATFWQNPRNHFRCQVQFYGLSENDEWTQDRAKPVTQIVSAEAWGRADCGSQSFGLLDPKLCYLLDGILFIYGVILTALFLRVKFSRSADAPAYQQGQNQLYNELNLGRREEYDVLDKRRGRDPEMGGKPQRRKNPQEGLYNELQKDKMAEAYSEIGMKGERRRGKGHDGLYQGLSTATKDTYDALHMQALPPRRAKRSGSGATNFSLLKQAGDVEENPGPTSMDWIWRILFLVGAATGAHSGPQLQLQESGPGLVKPSETLSLTCTVSGDSISSGDYYWGWIRQPPGKGLEWIGHIYYSGVTYYNPSLKSRVTISVDTSRNQFSLKLSSVTAADTAVYYCTREDSSNWRSRGQGTLVTVSSGSGGGGSGGGGSGGGGSFEEVQLVESGGGLVKPGGSLRLSCAASGFTFSTYGMSWVRQAPGKGLEWVAYINNGSGYIYYADSVKGRFTISRDNAKNSLYLQMNSLRAEDTAVYYCARGQWWSGGDFDYWGQGTLVTVSSTRIQNPDPAVYQLRDSKSSDKSVCLFTDFDSQTNVSQSKDSDVYITDKTVLDMRSMDFKSNSAVAWSNKSDFACANAFNNSIIPEDTFFPSPESSCGTQSFGLLDPKLCYLLDGILFIYGVILTALFLRVKFSRSADAPAYQQGQNQLYNELNLGRREEYDVLDKRRGRDPEMGGKPQRRKNPQEGLYNELQKDKMAEAYSEIGMKGERRRGKGHDGLYQGLSTATKDTYDALHMQALPPR

SEQ ID NO: 13513 - protein, 1090 aa, Artificial Sequence
  Synthetic Polypeptide
MALPVTALLLPLALLLHAARPEVQLVESGGGLVQPGGSLRLSCAASGFSFSDFWMSWVRQAPGKGLEWVATISQAGSEKDYVDSVKGRFTISRDNAKKSLYLQMNSLRAEDTAVYYCASGVYSFDYRGQGTLVTVSSGTGGGGSGGGGSGGGGSEFEIVLTQSPATLSLSPGERATLSCSASSSVSYMYWYQQKPGQAPRLLIYRTSNLASGIPARFSGSGSGTDFTLTISSLEPEDFAVYYCQQYHSYPTTFGQGTKVEIKRTVLEDLKNVFPPEVAVFEPSEAEISHTQKATLVCLATGFYPDHVELSWWVNGKEVHSGVSTDPQPLKEQPALNDSRYCLSSRLRVSATFWQNPRNHFRCQVQFYGLSENDEWTQDRAKPVTQIVSAEAWGRADCGSQSFGLLDPKLCYLLDGILFIYGVILTALFLRVKFSRSADAPAYQQGQNQLYNELNLGRREEYDVLDKRRGRDPEMGGKPQRRKNPQEGLYNELQKDKMAEAYSEIGMKGERRRGKGHDGLYQGLSTATKDTYDALHMQALPPRRAKRSGSGATNFSLLKQAGDVEENPGPTSMDWIWRILFLVGAATGAHSGPQLQLQESGPGLVKPSETLSLTCTVSGDSISSGDYYWGWIRQPPGKGLEWIGHIYYSGVTYYNPSLKSRVTISVDTSRNQFSLKLSSVTAADTAVYYCTREDSSNWRSRGQGTLVTVSSGSGGGGSGGGGSGGGGSFEEVQLVESGGGLVQPGGSLRLSCAASGFSFNTYAMNWVRQAPGKGLEWVSHIRSKSNNFATYYADSVKDRFTISRDNAKNSLYLQMNSLRAEDTAVYYCARQGGDFPMDYWGQGTLVTVSSTRIQNPDPAVYQLRDSKSSDKSVCLFTDFDSQTNVSQSKDSDVYITDKTVLDMRSMDFKSNSAVAWSNKSDFACANAFNNSIIPEDTFFPSPESSCGTQSFGLLDPKLCYLLDGILFIYGVILTALFLRVKFSRSADAPAYQQGQNQLYNELNLGRREEYDVLDKRRGRDPEMGGKPQRRKNPQEGLYNELQKDKMAEAYSEIGMKGERRRGKGHDGLYQGLSTATKDTYDALHMQALPPR

SEQ ID NO: 13514 - protein, 1086 aa, Artificial Sequence
  Synthetic Polypeptide
MALPVTALLLPLALLLHAARPEVQLVESGGGLVQPGGSLRLSCAASGFSFSDFWMSWVRQAPGKGLEWVATISQAGSEKDYVDSVKGRFTISRDNAKKSLYLQMNSLRAEDTAVYYCASGVYSFDYRGQGTLVTVSSGTGGGGSGGGGSGGGGSEFDVVMTQSPSSLSASVGDRVTITCKASEDIYIRLAWYQQKPGKAPKLLIYAATSLETGVPSRFSGSGSGTDFTLTISSLQPEDFATYYCQQYWTTPWTFGGGTKVEIKLEDLKNVFPPEVAVFEPSEAEISHTQKATLVCLATGFYPDHVELSWWVNGKEVHSGVSTDPQPLKEQPALNDSRYCLSSRLRVSATFWQNPRNHFRCQVQFYGLSENDEWTQDRAKPVTQIVSAEAWGRADCGSQSFGLLDPKLCYLLDGILFIYGVILTALFLRVKFSRSADAPAYQQGQNQLYNELNLGRREEYDVLDKRRGRDPEMGGKPQRRKNPQEGLYNELQKDKMAEAYSEIGMKGERRRGKGHDGLYQGLSTATKDTYDALHMQALPPRRAKRSGSGATNFSLLKQAGDVEENPGPTSMDWIWRILFLVGAATGAHSGPQLQLQESGPGLVKPSETLSLTCTVSGDSISSGDYYWGWIRQPPGKGLEWIGHIYYSGVTYYNPSLKSRVTISVDTSRNQFSLKLSSVTAADTAVYYCTREDSSNWRSRGQGTLVTVSSGSGGGGSGGGGSGGGGSFEQVQLQESGPGLVKPSQTLSLTCTVSGYSITIDYTWNWIRQPPGKGLEWIGYITYSGSTDYNPSLKSRVLISVDTSKNQVSLKLSSVTAADTAVYYCARLGRRYALDYWGQGTTVTVSSTRIQNPDPAVYQLRDSKSSDKSVCLFTDFDSQTNVSQSKDSDVYITDKTVLDMRSMDFKSNSAVAWSNKSDFACANAFNNSIIPEDTFFPSPESSCGTQSFGLLDPKLCYLLDGILFIYGVILTALFLRVKFSRSADAPAYQQGQNQLYNELNLGRREEYDVLDKRRGRDPEMGGKPQRRKNPQEGLYNELQKDKMAEAYSEIGMKGERRRGKGHDGLYQGLSTATKDTYDALHMQALPPR

SEQ ID NO: 13515 - protein, 1090 aa, Artificial Sequence
  Synthetic Polypeptide
MALPVTALLLPLALLLHAARPEVQLVESGGGLVQPGGSLRLSCAASGFSFSDFWMSWVRQAPGKGLEWVATISQAGSEKDYVDSVKGRFTISRDNAKKSLYLQMNSLRAEDTAVYYCASGVYSFDYRGQGTLVTVSSGTGGGGSGGGGSGGGGSEFDIQMTQTTSSLSASLGDRVTISCRASQDISNYLNWYQQKPDGTVKLLIYYTSILHSGVPSRFSGSGSGTDYSLTISNLEQEDFATYFCQQGNTLPWTFGGGTKLEIKALEDLKNVFPPEVAVFEPSEAEISHTQKATLVCLATGFYPDHVELSWWVNGKEVHSGVSTDPQPLKEQPALNDSRYCLSSRLRVSATFWQNPRNHFRCQVQFYGLSENDEWTQDRAKPVTQIVSAEAWGRADCGSQSFGLLDPKLCYLLDGILFIYGVILTALFLRVKFSRSADAPAYQQGQNQLYNELNLGRREEYDVLDKRRGRDPEMGGKPQRRKNPQEGLYNELQKDKMAEAYSEIGMKGERRRGKGHDGLYQGLSTATKDTYDALHMQALPPRRAKRSGSGATNFSLLKQAGDVEENPGPTSMDWIWRILFLVGAATGAHSGPQLQLQESGPGLVKPSETLSLTCTVSGDSISSGDYYWGWIRQPPGKGLEWIGHIYYSGVTYYNPSLKSRVTISVDTSRNQFSLKLSSVTAADTAVYYCTREDSSNWRSRGQGTLVTVSSGSGGGGSGGGGSGGGGSFEVQLVESGGGLVKPGGSLKLSCAASGFAFSIYDMSWVRQTPEKRLEWVAYISSGGGTYYPDTVKGRFTISRDNAKNTLYLQMSSLKSEDTAMYYCARHSGYGTHWGVLFAYWGQGTLVTVSATRIQNPDPAVYQLRDSKSSDKSVCLFTDFDSQTNVSQSKDSDVYITDKTVLDMRSMDFKSNSAVAWSNKSDFACANAFNNSIIPEDTFFPSPESSCGTQSFGLLDPKLCYLLDGILFIYGVILTALFLRVKFSRSADAPAYQQGQNQLYNELNLGRREEYDVLDKRRGRDPEMGGKPQRRKNPQEGLYNELQKDKMAEAYSEIGMKGERRRGKGHDGLYQGLSTATKDTYDALHMQALPPR

SEQ ID NO: 13516 - protein, 1101 aa, Artificial Sequence
  Synthetic Polypeptide
MALPVTALLLPLALLLHAARPEVQLVESGGGLVQPGGSLRLSCAASGFSFSDFWMSWVRQAPGKGLEWVATISQAGSEKDYVDSVKGRFTISRDNAKKSLYLQMNSLRAEDTAVYYCASGVYSFDYRGQGTLVTVSSGTGGGGSGGGGSGGGGSEFDIVMTQSPDSLAVSLGERATINCKSSQSLLYRSNQKNYLAWYQQKPGQPPKLLIYWASTRESGVPDRFSGSGSGTDFTLTISSLQAEDVAVYYCQQYYNYPRTFGQGTKVEIKRTVLEDLKNVFPPEVAVFEPSEAEISHTQKATLVCLATGFYPDHVELSWWVNGKEVHSGVSTDPQPLKEQPALNDSRYCLSSRLRVSATFWQNPRNHFRCQVQFYGLSENDEWTQDRAKPVTQIVSAEAWGRADCGSQSFGLLDPKLCYLLDGILFIYGVILTALFLRVKFSRSADAPAYQQGQNQLYNELNLGRREEYDVLDKRRGRDPEMGGKPQRRKNPQEGLYNELQKDKMAEAYSEIGMKGERRRGKGHDGLYQGLSTATKDTYDALHMQALPPRRAKRSGSGATNFSLLKQAGDVEENPGPTSMDWIWRILFLVGAATGAHSGPQLQLQESGPGLVKPSETLSLTCTVSGDSISSGDYYWGWIRQPPGKGLEWIGHIYYSGVTYYNPSLKSRVTISVDTSRNQFSLKLSSVTAADTAVYYCTREDSSNWRSRGQGTLVTVSSGSGGGGSGGGGSGGGGSFEEVQLLESGGGLVQPGGSLRLSCAASGYSITSDYAWNWVRQAPGKGLEWVSYISNSGSTSYNPSLKSRFTISRDNSKNTLYLQMNSLRAEDTAVYYCAKERNYDYDDYYYAMDYWGQGTLVTVSSTRIQNPDPAVYQLRDSKSSDKSVCLFTDFDSQTNVSQSKDSDVYITDKTVLDMRSMDFKSNSAVAWSNKSDFACANAFNNSIIPEDTFFPSPESSCGTQSFGLLDPKLCYLLDGILFIYGVILTALFLRVKFSRSADAPAYQQGQNQLYNELNLGRREEYDVLDKRRGRDPEMGGKPQRRKNPQEGLYNELQKDKMAEAYSEIGMKGERRRGKGHDGLYQGLSTATKDTYDALHMQALPPR

SEQ ID NO: 13517 - protein, 1094 aa, Artificial Sequence
  Synthetic Polypeptide
MALPVTALLLPLALLLHAARPEVQLVESGGGLVQPGGSLRLSCAASGFSFSDFWMSWVRQAPGKGLEWVATISQAGSEKDYVDSVKGRFTISRDNAKKSLYLQMNSLRAEDTAVYYCASGVYSFDYRGQGTLVTVSSGTGGGGSGGGGSGGGGSEFDVVMTQSPLSLPVTLGQPASISCRSSQSLLHSSGNTYLEWYQQRPGQSPRPLIYKISTRFSGVPDRFSGSGSGTDFTLKISRVEAEDVGVYYCFQGSHVPYTFGGGTKVEIKRLEDLKNVFPPEVAVFEPSEAEISHTQKATLVCLATGFYPDHVELSWWVNGKEVHSGVSTDPQPLKEQPALNDSRYCLSSRLRVSATFWQNPRNHFRCQVQFYGLSENDEWTQDRAKPVTQIVSAEAWGRADCGSQSFGLLDPKLCYLLDGILFIYGVILTALFLRVKFSRSADAPAYQQGQNQLYNELNLGRREEYDVLDKRRGRDPEMGGKPQRRKNPQEGLYNELQKDKMAEAYSEIGMKGERRRGKGHDGLYQGLSTATKDTYDALHMQALPPRRAKRSGSGATNFSLLKQAGDVEENPGPTSMDWIWRILFLVGAATGAHSGPQLQLQESGPGLVKPSETLSLTCTVSGDSISSGDYYWGWIRQPPGKGLEWIGHIYYSGVTYYNPSLKSRVTISVDTSRNQFSLKLSSVTAADTAVYYCTREDSSNWRSRGQGTLVTVSSGSGGGGSGGGGSGGGGSFEQVQLVQSGAEVKKPGASVKVSCKASGLTIEDYYMHWVRQAPGQGLEWMGWIDPENGDTEYGPKFQGRVTMTRDTSINTAYMELSRLRSDDTAVYYCAVHNAHYGTWFAYWGQGTLVTVSSTRIQNPDPAVYQLRDSKSSDKSVCLFTDFDSQTNVSQSKDSDVYITDKTVLDMRSMDFKSNSAVAWSNKSDFACANAFNNSIIPEDTFFPSPESSCGTQSFGLLDPKLCYLLDGILFIYGVILTALFLRVKFSRSADAPAYQQGQNQLYNELNLGRREEYDVLDKRRGRDPEMGGKPQRRKNPQEGLYNELQKDKMAEAYSEIGMKGERRRGKGHDGLYQGLSTATKDTYDALHMQALPPR

SEQ ID NO: 13518 - protein, 1086 aa, Artificial Sequence
  Synthetic Polypeptide
MALPVTALLLPLALLLHAARPEVQLVESGGGLVQPGGSLRLSCAASGFSFSDFWMSWVRQAPGKGLEWVATISQAGSEKDYVDSVKGRFTISRDNAKKSLYLQMNSLRAEDTAVYYCASGVYSFDYRGQGTLVTVSSGTGGGGSGGGGSGGGGSEFDIQMTQSPSSLSASVGDRVTITCRASENIYSNLAWYQQKPGKAPKLLIYAATNLADGVPSRFSGSGSGTDFTLTISSLQPEDFATYYCQHFWGTPTFGQGTKVEIKRTVLEDLKNVFPPEVAVFEPSEAEISHTQKATLVCLATGFYPDHVELSWWVNGKEVHSGVSTDPQPLKEQPALNDSRYCLSSRLRVSATFWQNPRNHFRCQVQFYGLSENDEWTQDRAKPVTQIVSAEAWGRADCGSQSFGLLDPKLCYLLDGILFIYGVILTALFLRVKFSRSADAPAYQQGQNQLYNELNLGRREEYDVLDKRRGRDPEMGGKPQRRKNPQEGLYNELQKDKMAEAYSEIGMKGERRRGKGHDGLYQGLSTATKDTYDALHMQALPPRRAKRSGSGATNFSLLKQAGDVEENPGPTSMDWIWRILFLVGAATGAHSGPQLQLQESGPGLVKPSETLSLTCTVSGDSISSGDYYWGWIRQPPGKGLEWIGHIYYSGVTYYNPSLKSRVTISVDTSRNQFSLKLSSVTAADTAVYYCTREDSSNWRSRGQGTLVTVSSGSGGGGSGGGGSGGGGSFEEVQLVESGGGLVQPGGSLRLSCAASGFSLTNYGVHWVRQAPGKGLEWVSVIWSGGSTDYNAAFISRFTISADTSKNTAYLQMNSLRAEDTAVYYCARELIHAMDNWGQGTLVTVSSTRIQNPDPAVYQLRDSKSSDKSVCLFTDFDSQTNVSQSKDSDVYITDKTVLDMRSMDFKSNSAVAWSNKSDFACANAFNNSIIPEDTFFPSPESSCGTQSFGLLDPKLCYLLDGILFIYGVILTALFLRVKFSRSADAPAYQQGQNQLYNELNLGRREEYDVLDKRRGRDPEMGGKPQRRKNPQEGLYNELQKDKMAEAYSEIGMKGERRRGKGHDGLYQGLSTATKDTYDALHMQALPPR

SEQ ID NO: 13519 - protein, 1093 aa, Artificial Sequence
  Synthetic Polypeptide
MALPVTALLLPLALLLHAARPEVQLVESGGGLVQPGGSLRLSCAASGFSFSDFWMSWVRQAPGKGLEWVATISQAGSEKDYVDSVKGRFTISRDNAKKSLYLQMNSLRAEDTAVYYCASGVYSFDYRGQGTLVTVSSGTGGGGSGGGGSGGGGSEFDFVMTQSPLSLPVTPGEPASISCRSSQSIVHSNGNTYLEWYLQKPGQSPQLLIYKVSNRFSGVPDRFSGSGSGTDFTLKISRVEAEDVGVYYCFQGSHVPLTFGQGTKLEIKRLEDLKNVFPPEVAVFEPSEAEISHTQKATLVCLATGFYPDHVELSWWVNGKEVHSGVSTDPQPLKEQPALNDSRYCLSSRLRVSATFWQNPRNHFRCQVQFYGLSENDEWTQDRAKPVTQIVSAEAWGRADCGSQSFGLLDPKLCYLLDGILFIYGVILTALFLRVKFSRSADAPAYQQGQNQLYNELNLGRREEYDVLDKRRGRDPEMGGKPQRRKNPQEGLYNELQKDKMAEAYSEIGMKGERRRGKGHDGLYQGLSTATKDTYDALHMQALPPRRAKRSGSGATNFSLLKQAGDVEENPGPTSMDWIWRILFLVGAATGAHSGPQLQLQESGPGLVKPSETLSLTCTVSGDSISSGDYYWGWIRQPPGKGLEWIGHIYYSGVTYYNPSLKSRVTISVDTSRNQFSLKLSSVTAADTAVYYCTREDSSNWRSRGQGTLVTVSSGSGGGGSGGGGSGGGGSFEEVQLVESGAEVKKPGASVKVSCKASGYTFTSYWIHWVRQAPGQGLEWMGENDPSNGRTNYNEKFKNRVTLTVDTSISTAYMELSRLRSDDTAVYYCARGPNYFYSMDYWGQGTMVTVSSTRIQNPDPAVYQLRDSKSSDKSVCLFTDFDSQTNVSQSKDSDVYITDKTVLDMRSMDFKSNSAVAWSNKSDFACANAFNNSIIPEDTFFPSPESSCGTQSFGLLDPKLCYLLDGILFIYGVILTALFLRVKFSRSADAPAYQQGQNQLYNELNLGRREEYDVLDKRRGRDPEMGGKPQRRKNPQEGLYNELQKDKMAEAYSEIGMKGERRRGKGHDGLYQGLSTATKDTYDALHMQALPPR

SEQ ID NO: 13520 - protein, 1086 aa, Artificial Sequence
  Synthetic Polypeptide
MALPVTALLLPLALLLHAARPEVQLVESGGGLVQPGGSLRLSCAASGFSFSDFWMSWVRQAPGKGLEWVATISQAGSEKDYVDSVKGRFTISRDNAKKSLYLQMNSLRAEDTAVYYCASGVYSFDYRGQGTLVTVSSGTGGGGSGGGGSGGGGSEFDIQLTQSPSFLSASVGDRVTITCSARSSISFMYWYQQKPGKAPKLLIYDTSNLASGVPSRFSGSGSGTEFTLTISSLEAEDAATYYCQQWSSYPLTFGQGTKLEIKLEDLKNVFPPEVAVFEPSEAEISHTQKATLVCLATGFYPDHVELSWWVNGKEVHSGVSTDPQPLKEQPALNDSRYCLSSRLRVSATFWQNPRNHFRCQVQFYGLSENDEWTQDRAKPVTQIVSAEAWGRADCGSQSFGLLDPKLCYLLDGILFIYGVILTALFLRVKFSRSADAPAYQQGQNQLYNELNLGRREEYDVLDKRRGRDPEMGGKPQRRKNPQEGLYNELQKDKMAEAYSEIGMKGERRRGKGHDGLYQGLSTATKDTYDALHMQALPPRRAKRSGSGATNFSLLKQAGDVEENPGPTSMDWIWRILFLVGAATGAHSGPQLQLQESGPGLVKPSETLSLTCTVSGDSISSGDYYWGWIRQPPGKGLEWIGHIYYSGVTYYNPSLKSRVTISVDTSRNQFSLKLSSVTAADTAVYYCTREDSSNWRSRGQGTLVTVSSGSGGGGSGGGGSGGGGSFEQVQLVQSGAEVKKPGASVKVSCKASGYTFTGSWMNWVRQAPGQGLEWIGRIYPGDGETNYNGKFKDRVTITADKSTSTAYMELSSLRSEDTAVYYCARIYGNNVYFDVWGQGTTVTVSSTRIQNPDPAVYQLRDSKSSDKSVCLFTDFDSQTNVSQSKDSDVYITDKTVLDMRSMDFKSNSAVAWSNKSDFACANAFNNSIIPEDTFFPSPESSCGTQSFGLLDPKLCYLLDGILFIYGVILTALFLRVKFSRSADAPAYQQGQNQLYNELNLGRREEYDVLDKRRGRDPEMGGKPQRRKNPQEGLYNELQKDKMAEAYSEIGMKGERRRGKGHDGLYQGLSTATKDTYDALHMQALPPR

SEQ ID NO: 13521 - protein, 1094 aa, Artificial Sequence
  Synthetic Polypeptide
MALPVTALLLPLALLLHAARPEVQLVESGGGLVQPGGSLRLSCAASGFSFSDFWMSWVRQAPGKGLEWVATISQAGSEKDYVDSVKGRFTISRDNAKKSLYLQMNSLRAEDTAVYYCASGVYSFDYRGQGTLVTVSSGTGGGGSGGGGSGGGGSEFQLVLTQSPSASASLGSSVKLTCTLSSGHKTDTIDWYQQQPGKAPRYLMKLEGSGSYNKGSGVPDRFSGSSSGADWYLTISSLQSEDEADYYCGTDYPGNYLFGGGTQLTVLGLEDLKNVFPPEVAVFEPSEAEISHTQKATLVCLATGFYPDHVELSWWVNGKEVHSGVSTDPQPLKEQPALNDSRYCLSSRLRVSATFWQNPRNHFRCQVQFYGLSENDEWTQDRAKPVTQIVSAEAWGRADCGSQSFGLLDPKLCYLLDGILFIYGVILTALFLRVKFSRSADAPAYQQGQNQLYNELNLGRREEYDVLDKRRGRDPEMGGKPQRRKNPQEGLYNELQKDKMAEAYSEIGMKGERRRGKGHDGLYQGLSTATKDTYDALHMQALPPRRAKRSGSGATNFSLLKQAGDVEENPGPTSMDWIWRILFLVGAATGAHSGPQLQLQESGPGLVKPSETLSLTCTVSGDSISSGDYYWGWIRQPPGKGLEWIGHIYYSGVTYYNPSLKSRVTISVDTSRNQFSLKLSSVTAADTAVYYCTREDSSNWRSRGQGTLVTVSSGSGGGGSGGGGSGGGGSFEQEQLVESGGGLVQPGGSLRLSCAASGFTFSDYYMSWIRQAPGKGLEWVATIYPSSGKTYYADSAKGRLTISSDNAKDSLYLQMNSLRAEDTAVYYCTRDSYADDAALFDIWGQGTTVTVSSTRIQNPDPAVYQLRDSKSSDKSVCLFTDFDSQTNVSQSKDSDVYITDKTVLDMRSMDFKSNSAVAWSNKSDFACANAFNNSIIPEDTFFPSPESSCGTQSFGLLDPKLCYLLDGILFIYGVILTALFLRVKFSRSADAPAYQQGQNQLYNELNLGRREEYDVLDKRRGRDPEMGGKPQRRKNPQEGLYNELQKDKMAEAYSEIGMKGERRRGKGHDGLYQGLSTATKDTYDALHMQALPPR

SEQ ID NO: 13522 - protein, 1090 aa, Artificial Sequence
  Synthetic Polypeptide
MALPVTALLLPLALLLHAARPEVQLVESGGGLVQPGGSLRLSCAASGFSFSDFWMSWVRQAPGKGLEWVATISQAGSEKDYVDSVKGRFTISRDNAKKSLYLQMNSLRAEDTAVYYCASGVYSFDYRGQGTLVTVSSGTGGGGSGGGGSGGGGSEFEIVLTQSPDTLSLSPGEKATLSCRASQSVSSSFLAWYQQKPGQAPSLLIYVASRRAAGIPDRFSGSGSGTDFTLTISRLEPEDFGMFYCQHYGRTPFTFGPGTKVDIKRLEDLKNVFPPEVAVFEPSEAEISHTQKATLVCLATGFYPDHVELSWWVNGKEVHSGVSTDPQPLKEQPALNDSRYCLSSRLRVSATFWQNPRNHFRCQVQFYGLSENDEWTQDRAKPVTQIVSAEAWGRADCGSQSFGLLDPKLCYLLDGILFIYGVILTALFLRVKFSRSADAPAYQQGQNQLYNELNLGRREEYDVLDKRRGRDPEMGGKPQRRKNPQEGLYNELQKDKMAEAYSEIGMKGERRRGKGHDGLYQGLSTATKDTYDALHMQALPPRRAKRSGSGATNFSLLKQAGDVEENPGPTSMDWIWRILFLVGAATGAHSGPQLQLQESGPGLVKPSETLSLTCTVSGDSISSGDYYWGWIRQPPGKGLEWIGHIYYSGVTYYNPSLKSRVTISVDTSRNQFSLKLSSVTAADTAVYYCTREDSSNWRSRGQGTLVTVSSGSGGGGSGGGGSGGGGSFEQIQLVESGGGVVQPGRSLRLSCVASGFTFKNYGMHWVRQAPGKGLEWVAVIWYDGSNEYYGDPVKGRFTISRDNSKNMLYLQMNSLRADDTAVYYCARSGIAVAGAFDYWGQGTLVTVSSTRIQNPDPAVYQLRDSKSSDKSVCLFTDFDSQTNVSQSKDSDVYITDKTVLDMRSMDFKSNSAVAWSNKSDFACANAFNNSIIPEDTFFPSPESSCGTQSFGLLDPKLCYLLDGILFIYGVILTALFLRVKFSRSADAPAYQQGQNQLYNELNLGRREEYDVLDKRRGRDPEMGGKPQRRKNPQEGLYNELQKDKMAEAYSEIGMKGERRRGKGHDGLYQGLSTATKDTYDALHMQALPPR

SEQ ID NO: 13523 - protein, 1096 aa, Artificial Sequence
  Synthetic Polypeptide
MALPVTALLLPLALLLHAARPEVQLVESGGGLVQPGGSLRLSCAASGFSFSDFWMSWVRQAPGKGLEWVATISQAGSEKDYVDSVKGRFTISRDNAKKSLYLQMNSLRAEDTAVYYCASGVYSFDYRGQGTLVTVSSGTGGGGSGGGGSGGGGSEFDIQMTQSPSSLSASLGDRVTITCRASQGIRNDLGWYQQKPGKAPKRLIYASSTLQSGVPSRFSGSGSGTEFTLTISSLQPEDFATYYCLQHNNFPWTFGQGTKVEIKRLEDLKNVFPPEVAVFEPSEAEISHTQKATLVCLATGFYPDHVELSWWVNGKEVHSGVSTDPQPLKEQPALNDSRYCLSSRLRVSATFWQNPRNHFRCQVQFYGLSENDEWTQDRAKPVTQIVSAEAWGRADCGSQSFGLLDPKLCYLLDGILFIYGVILTALFLRVKFSRSADAPAYQQGQNQLYNELNLGRREEYDVLDKRRGRDPEMGGKPQRRKNPQEGLYNELQKDKMAEAYSEIGMKGERRRGKGHDGLYQGLSTATKDTYDALHMQALPPRRAKRSGSGATNFSLLKQAGDVEENPGPTSMDWIWRILFLVGAATGAHSGPQLQLQESGPGLVKPSETLSLTCTVSGDSISSGDYYWGWIRQPPGKGLEWIGHIYYSGVTYYNPSLKSRVTISVDTSRNQFSLKLSSVTAADTAVYYCTREDSSNWRSRGQGTLVTVSSGSGGGGSGGGGSGGGGSFEQVTLKESGPVLVKPTETLTLTCTVSGFSLINARMGVSWIRQPPGKALEWLAHIFSNAEKSYRTSLKSRLTISKDTSKSQVVLTMTNMDPVDTATYYCARIPGYGGNGDYHYYGMDVWGQGTTVTVSSTRIQNPDPAVYQLRDSKSSDKSVCLFTDFDSQTNVSQSKDSDVYITDKTVLDMRSMDFKSNSAVAWSNKSDFACANAFNNSIIPEDTFFPSPESSCGTQSFGLLDPKLCYLLDGILFIYGVILTALFLRVKFSRSADAPAYQQGQNQLYNELNLGRREEYDVLDKRRGRDPEMGGKPQRRKNPQEGLYNELQKDKMAEAYSEIGMKGERRRGKGHDGLYQGLSTATKDTYDALHMQALPPR

SEQ ID NO: 13524 - protein, 1089 aa, Artificial Sequence
  Synthetic Polypeptide
MALPVTALLLPLALLLHAARPEVQLVESGGGLVQPGGSLRLSCAASGFSFSDFWMSWVRQAPGKGLEWVATISQAGSEKDYVDSVKGRFTISRDNAKKSLYLQMNSLRAEDTAVYYCASGVYSFDYRGQGTLVTVSSGTGGGGSGGGGSGGGGSEFDIVLTQSPPSLAMSLGKRATISCRASESVTILGSHLIHWYQQKPGQPPTLLIQLASNVQTGVPARFSGSGSRTDFTLTIDPVEEDDVAVYYCLQSRTIPRTFGGGTKLEIKLEDLKNVFPPEVAVFEPSEAEISHTQKATLVCLATGFYPDHVELSWWVNGKEVHSGVSTDPQPLKEQPALNDSRYCLSSRLRVSATFWQNPRNHFRCQVQFYGLSENDEWTQDRAKPVTQIVSAEAWGRADCGSQSFGLLDPKLCYLLDGILFIYGVILTALFLRVKFSRSADAPAYQQGQNQLYNELNLGRREEYDVLDKRRGRDPEMGGKPQRRKNPQEGLYNELQKDKMAEAYSEIGMKGERRRGKGHDGLYQGLSTATKDTYDALHMQALPPRRAKRSGSGATNFSLLKQAGDVEENPGPTSMDWIWRILFLVGAATGAHSGPQLQLQESGPGLVKPSETLSLTCTVSGDSISSGDYYWGWIRQPPGKGLEWIGHIYYSGVTYYNPSLKSRVTISVDTSRNQFSLKLSSVTAADTAVYYCTREDSSNWRSRGQGTLVTVSSGSGGGGSGGGGSGGGGSFEQIQLVQSGPELKKPGETVKISCKASGYTFTDYSINWVKRAPGKGLKWMGWINTETREPAYAYDFRGRFAFSLETSASTAYLQINNLKYEDTATYFCALDYSYAMDYWGQGTSVTVSSTRIQNPDPAVYQLRDSKSSDKSVCLFTDFDSQTNVSQSKDSDVYITDKTVLDMRSMDFKSNSAVAWSNKSDFACANAFNNSIIPEDTFFPSPESSCGTQSFGLLDPKLCYLLDGILFIYGVILTALFLRVKFSRSADAPAYQQGQNQLYNELNLGRREEYDVLDKRRGRDPEMGGKPQRRKNPQEGLYNELQKDKMAEAYSEIGMKGERRRGKGHDGLYQGLSTATKDTYDALHMQALPPR

SEQ ID NO: 13525 - protein, 1091 aa, Artificial Sequence
  Synthetic Polypeptide
MALPVTALLLPLALLLHAARPEVQLVESGGGLVQPGGSLRLSCAASGFSFSDFWMSWVRQAPGKGLEWVATISQAGSEKDYVDSVKGRFTISRDNAKKSLYLQMNSLRAEDTAVYYCASGVYSFDYRGQGTLVTVSSGTGGGGSGGGGSGGGGSEFDIQLTQSPSSLSASVGDRVSFTCQASQDINNFLNWYQQKPGKAPKLLIYDASNLETGVPSRFSGSGSGTDFTFTISSLQPEDIATYYCQQYGNLPFTFGGGTKVEIKRLEDLKNVFPPEVAVFEPSEAEISHTQKATLVCLATGFYPDHVELSWWVNGKEVHSGVSTDPQPLKEQPALNDSRYCLSSRLRVSATFWQNPRNHFRCQVQFYGLSENDEWTQDRAKPVTQIVSAEAWGRADCGSQSFGLLDPKLCYLLDGILFIYGVILTALFLRVKFSRSADAPAYQQGQNQLYNELNLGRREEYDVLDKRRGRDPEMGGKPQRRKNPQEGLYNELQKDKMAEAYSEIGMKGERRRGKGHDGLYQGLSTATKDTYDALHMQALPPRRAKRSGSGATNFSLLKQAGDVEENPGPTSMDWIWRILFLVGAATGAHSGPQLQLQESGPGLVKPSETLSLTCTVSGDSISSGDYYWGWIRQPPGKGLEWIGHIYYSGVTYYNPSLKSRVTISVDTSRNQFSLKLSSVTAADTAVYYCTREDSSNWRSRGQGTLVTVSSGSGGGGSGGGGSGGGGSFEQVQLQESGPGLVKPSETLSLTCTVSGGSISSYYWSWIRQPPGKGLEWIGYIYYSGSTNYNPSLKSRVTISVDTSKNQFSLKLSSVTAADTAVYYCVSLVYCGGDCYSGFDYWGQGTLVTVSSTRIQNPDPAVYQLRDSKSSDKSVCLFTDFDSQTNVSQSKDSDVYITDKTVLDMRSMDFKSNSAVAWSNKSDFACANAFNNSIIPEDTFFPSPESSCGTQSFGLLDPKLCYLLDGILFIYGVILTALFLRVKFSRSADAPAYQQGQNQLYNELNLGRREEYDVLDKRRGRDPEMGGKPQRRKNPQEGLYNELQKDKMAEAYSEIGMKGERRRGKGHDGLYQGLSTATKDTYDALHMQALPPR

SEQ ID NO: 13526 - protein, 1093 aa, Artificial Sequence
  Synthetic Polypeptide
MALPVTALLLPLALLLHAARPEVQLVESGGGLVQPGGSLRLSCAASGFSFSDFWMSWVRQAPGKGLEWVATISQAGSEKDYVDSVKGRFTISRDNAKKSLYLQMNSLRAEDTAVYYCASGVYSFDYRGQGTLVTVSSGTGGGGSGGGGSGGGGSEFDIQLTQSPSSLSASVGDRVSFTCQASQDINNFLNWYQQKPGKAPKLLIYDASNLETGVPSRFSGSGSGTDFTFTISSLQPEDIATYYCQQYGNLPFTFGGGTKVEIKRLEDLKNVFPPEVAVFEPSEAEISHTQKATLVCLATGFYPDHVELSWWVNGKEVHSGVSTDPQPLKEQPALNDSRYCLSSRLRVSATFWQNPRNHFRCQVQFYGLSENDEWTQDRAKPVTQIVSAEAWGRADCGSQSFGLLDPKLCYLLDGILFIYGVILTALFLRVKFSRSADAPAYQQGQNQLYNELNLGRREEYDVLDKRRGRDPEMGGKPQRRKNPQEGLYNELQKDKMAEAYSEIGMKGERRRGKGHDGLYQGLSTATKDTYDALHMQALPPRRAKRSGSGATNFSLLKQAGDVEENPGPTSMDWIWRILFLVGAATGAHSGPQLQLQESGPGLVKPSETLSLTCTVSGDSISSGDYYWGWIRQPPGKGLEWIGHIYYSGVTYYNPSLKSRVTISVDTSRNQFSLKLSSVTAADTAVYYCTREDSSNWRSRGQGTLVTVSSGSGGGGSGGGGSGGGGSFEQVQLQESGPGLVKPSQTLSLTCTVSGGSISSGGFYWSWIRQHPGKGLEWIGYIHHSGSTHYNPSLKSRVTISIDTSKNLFSLRLSSVTAADTAVYYCASLVYCGGDCYSGFDYWGQGTLVTVSSTRIQNPDPAVYQLRDSKSSDKSVCLFTDFDSQTNVSQSKDSDVYITDKTVLDMRSMDFKSNSAVAWSNKSDFACANAFNNSIIPEDTFFPSPESSCGTQSFGLLDPKLCYLLDGILFIYGVILTALFLRVKFSRSADAPAYQQGQNQLYNELNLGRREEYDVLDKRRGRDPEMGGKPQRRKNPQEGLYNELQKDKMAEAYSEIGMKGERRRGKGHDGLYQGLSTATKDTYDALHMQALPPR

SEQ ID NO: 13527 - protein, 1089 aa, Artificial Sequence
  Synthetic Polypeptide
MALPVTALLLPLALLLHAARPEVQLVESGGGLVQPGGSLRLSCAASGFSFSDFWMSWVRQAPGKGLEWVATISQAGSEKDYVDSVKGRFTISRDNAKKSLYLQMNSLRAEDTAVYYCASGVYSFDYRGQGTLVTVSSGTGGGGSGGGGSGGGGSEFDIQMTQSPSSLSASVGDRVTITCKSSQSVLYSSNQKNYLAWFQQKPGKAPKLLIYWASTRESGVPSRFSGSGSGTDFTLTISSLQPEDFATYFCHQYLSSYTFGQGTKVEIKRLEDLKNVFPPEVAVFEPSEAEISHTQKATLVCLATGFYPDHVELSWWVNGKEVHSGVSTDPQPLKEQPALNDSRYCLSSRLRVSATFWQNPRNHFRCQVQFYGLSENDEWTQDRAKPVTQIVSAEAWGRADCGSQSFGLLDPKLCYLLDGILFIYGVILTALFLRVKFSRSADAPAYQQGQNQLYNELNLGRREEYDVLDKRRGRDPEMGGKPQRRKNPQEGLYNELQKDKMAEAYSEIGMKGERRRGKGHDGLYQGLSTATKDTYDALHMQALPPRRAKRSGSGATNFSLLKQAGDVEENPGPTSMDWIWRILFLVGAATGAHSGPQLQLQESGPGLVKPSETLSLTCTVSGDSISSGDYYWGWIRQPPGKGLEWIGHIYYSGVTYYNPSLKSRVTISVDTSRNQFSLKLSSVTAADTAVYYCTREDSSNWRSRGQGTLVTVSSGSGGGGSGGGGSGGGGSFEEVQLVESGGGLVQPGGSLRLSCAASGYTFTTYWMHWVRQAPGKGLEWVGYIRPSTGYTEYNQKFKDRFTISADTSKNTAYLQMNSLRAEDTAVYYCARSRWLLDYWGQGTLVTVSTRIQNPDPAVYQLRDSKSSDKSVCLFTDFDSQTNVSQSKDSDVYITDKTVLDMRSMDFKSNSAVAWSNKSDFACANAFNNSIIPEDTFFPSPESSCGTQSFGLLDPKLCYLLDGILFIYGVILTALFLRVKFSRSADAPAYQQGQNQLYNELNLGRREEYDVLDKRRGRDPEMGGKPQRRKNPQEGLYNELQKDKMAEAYSEIGMKGERRRGKGHDGLYQGLSTATKDTYDALHMQALPPR

SEQ ID NO: 13528 - protein, 1086 aa, Artificial Sequence
  Synthetic Polypeptide
MALPVTALLLPLALLLHAARPEVQLVESGGGLVQPGGSLRLSCAASGFSFSDFWMSWVRQAPGKGLEWVATISQAGSEKDYVDSVKGRFTISRDNAKKSLYLQMNSLRAEDTAVYYCASGVYSFDYRGQGTLVTVSSGTGGGGSGGGGSGGGGSEFDIQMTQSPSSLSASVGDRVTITCRASQDISNYLNWYQQKPGKAPKLLIYYTSRLHSGVPSRFSGSGSGTDFTLTISSLQPEDFATYYCQQGNTLPYTFGQGTKVEIKRLEDLKNVFPPEVAVFEPSEAEISHTQKATLVCLATGFYPDHVELSWWVNGKEVHSGVSTDPQPLKEQPALNDSRYCLSSRLRVSATFWQNPRNHFRCQVQFYGLSENDEWTQDRAKPVTQIVSAEAWGRADCGSQSFGLLDPKLCYLLDGILFIYGVILTALFLRVKFSRSADAPAYQQGQNQLYNELNLGRREEYDVLDKRRGRDPEMGGKPQRRKNPQEGLYNELQKDKMAEAYSEIGMKGERRRGKGHDGLYQGLSTATKDTYDALHMQALPPRRAKRSGSGATNFSLLKQAGDVEENPGPTSMDWIWRILFLVGAATGAHSGPQLQLQESGPGLVKPSETLSLTCTVSGDSISSGDYYWGWIRQPPGKGLEWIGHIYYSGVTYYNPSLKSRVTISVDTSRNQFSLKLSSVTAADTAVYYCTREDSSNWRSRGQGTLVTVSSGSGGGGSGGGGSGGGGSFEEVQLVESGGGLVQPGGSLRLSCAASGFTFSDYFMSWVRQAPGKGLEWVATISNGGTYTYYPDSVKGRFTISRDNSKNTLYLQMNSLRAEDTAVYYCARFDGYIFDYWGQGTLVTVSSTRIQNPDPAVYQLRDSKSSDKSVCLFTDFDSQTNVSQSKDSDVYITDKTVLDMRSMDFKSNSAVAWSNKSDFACANAFNNSIIPEDTFFPSPESSCGTQSFGLLDPKLCYLLDGILFIYGVILTALFLRVKFSRSADAPAYQQGQNQLYNELNLGRREEYDVLDKRRGRDPEMGGKPQRRKNPQEGLYNELQKDKMAEAYSEIGMKGERRRGKGHDGLYQGLSTATKDTYDALHMQALPPR

SEQ ID NO: 13529 - protein, 780 aa, Artificial Sequence
  Synthetic Polypeptide
MALPVTALLLPLALLLHAARPEVQLVESGGGLVQPGGSLRLSCAASGFSFSDFWMSWVRQAPGKGLEWVATISQAGSEKDYVDSVKGRFTISRDNAKKSLYLQMNSLRAEDTAVYYCASGVYSFDYRGQGTLVTVSSGTGGGGSGGGGSGGGGSEFDIQMTQTTSSLSASLGDRVTISCRASQDISKYLNWYQQKPDGTVKLLIYHTSRLHSGVPSRFSGSGSGTDYSLTISNLEQEDIATYFCQQGNTLPYTFGGGTKLEITLEGQPKANPTVTLFPPSSEELQANKATLVCLISDFYPGAVTVAWKADGSPVKAGVETTKPSKQSNNKYAASSYLSLTPEQWKSHRSYSCQVTHEGSTVEKTVAPTECSPIKTDVITMDPKDNCSKDANDTLLLQLTNTSAYYMYLLLLLKSVVYFAIITCCLLRRTAFCCNGEKSRAKRSGSGATNFSLLKQAGDVEENPGPTSMDWIWRILFLVGAATGAHSFEVKLQESGPGLVAPSQSLSVTCTVSGVSLPDYGVSWIRQPPRKGLEWLGVIWGSETTYYNSALKSRLTIIKDNSKSQVFLKMNSLQTDDTAIYYCAKHYYYGGSYAMDYWGQGTSVTVSSTRASTKGPSVFPLAPSSKSTSGGTAALGCLVKDYFPEPVTVSWNSGALTSGVHTFPAVLQSSGLYSLSSVVTVPSSSLGTQTYICNVNHKPSNTKVDKRVEPKSCEVKTDSTDHVKPKETENTKQPSKSCHKPKAIVHTEKVNMMSLTVLGLRMLFAKTVAVNFLLTAKLFFL

SEQ ID NO: 13530 - protein, 781 aa, Artificial Sequence
  Synthetic Polypeptide
MALPVTALLLPLALLLHAARPEVQLVESGGGLVQPGGSLRLSCAASGFSFSDFWMSWVRQAPGKGLEWVATISQAGSEKDYVDSVKGRFTISRDNAKKSLYLQMNSLRAEDTAVYYCASGVYSFDYRGQGTLVTVSSGTGGGGSGGGGSGGGGSEFEIVMTQSPATLSLSPGERATLSCRASQDISKYLNWYQQKPGQAPRLLIYHTSRLHSGIPARFSGSGSGTDYTLTISSLQPEDFAVYFCQQGNTLPYTFGQGTKLEIKLEGQPKANPTVTLFPPSSEELQANKATLVCLISDFYPGAVTVAWKADGSPVKAGVETTKPSKQSNNKYAASSYLSLTPEQWKSHRSYSCQVTHEGSTVEKTVAPTECSPIKTDVITMDPKDNCSKDANDTLLLQLTNTSAYYMYLLLLLKSVVYFAIITCCLLRRTAFCCNGEKSRAKRSGSGATNFSLLKQAGDVEENPGPTSMDWIWRILFLVGAATGAHSFEQVQLQESGPGLVKPSETLSLTCTVSGVSLPDYGVSWIRQPPGKGLEWIGVIWGSETTYYNSSLKSRVTISKDNSKNQVSLKLSSVTAADTAVYYCAKHYYYGGSYAMDYWGQGTLVTVSSTRASTKGPSVFPLAPSSKSTSGGTAALGCLVKDYFPEPVTVSWNSGALTSGVHTFPAVLQSSGLYSLSSVVTVPSSSLGTQTYICNVNHKPSNTKVDKRVEPKSCEVKTDSTDHVKPKETENTKQPSKSCHKPKAIVHTEKVNMMSLTVLGLRMLFAKTVAVNFLLTAKLFFL

SEQ ID NO: 13531 - protein, 782 aa, Artificial Sequence
  Synthetic Polypeptide
MALPVTALLLPLALLLHAARPEVQLVESGGGLVQPGGSLRLSCAASGFSFSDFWMSWVRQAPGKGLEWVATISQAGSEKDYVDSVKGRFTISRDNAKKSLYLQMNSLRAEDTAVYYCASGVYSFDYRGQGTLVTVSSGTGGGGSGGGGSGGGGSEFDEIVLTQSPATLSLSPGERATLSCSASSSVSYMHWYQQKPGQAPRLLIYDTSKLASGIPARFSGSGSGTDFTLTISSLEPEDVAVYYCFQGSVYPFTFGQGTKLEIKRLEGQPKANPTVTLFPPSSEELQANKATLVCLISDFYPGAVTVAWKADGSPVKAGVETTKPSKQSNNKYAASSYLSLTPEQWKSHRSYSCQVTHEGSTVEKTVAPTECSPIKTDVITMDPKDNCSKDANDTLLLQLTNTSAYYMYLLLLLKSVVYFAIITCCLLRRTAFCCNGEKSRAKRSGSGATNFSLLKQAGDVEENPGPTSMDWIWRILFLVGAATGAHSFEQVQLQESGPGLVKPSQTLSLTCTVSGGSISTSGMGVGWIRQHPGKGLEWIGHIWWDDDKRYNPALKSRVTISVDTSKNQFSLKLSSVTAADTAVYYCARMELWSYYFDYWGQGTLVTVSSTRASTKGPSVFPLAPSSKSTSGGTAALGCLVKDYFPEPVTVSWNSGALTSGVHTFPAVLQSSGLYSLSSVVTVPSSSLGTQTYICNVNHKPSNTKVDKRVEPKSCEVKTDSTDHVKPKETENTKQPSKSCHKPKAIVHTEKVNMMSLTVLGLRMLFAKTVAVNFLLTAKLFFL

SEQ ID NO: 13532 - protein, 780 aa, Artificial Sequence
  Synthetic Polypeptide
MALPVTALLLPLALLLHAARPEVQLVESGGGLVQPGGSLRLSCAASGFSFSDFWMSWVRQAPGKGLEWVATISQAGSEKDYVDSVKGRFTISRDNAKKSLYLQMNSLRAEDTAVYYCASGVYSFDYRGQGTLVTVSSGTGGGGSGGGGSGGGGSEFDYIHVTQSPSSLSVSIGDRVTINCQTSQGVGSDLHWYQHKPGRAPKLLIHHASSVEDGVPSRFSGTGFHTSFNLTINDLQADDIGTYYCQVLQSFGRGSRLDTKLEGQPKANPTVTLFPPSSEELQANKATLVCLISDFYPGAVTVAWKADGSPVKAGVETTKPSKQSNNKYAASSYLSLTPEQWKSHRSYSCQVTHEGSTVEKTVAPTECSPIKTDVITMDPKDNCSKDANDTLLLQLTNTSAYYMYLLLLLKSVVYFAIITCCLLRRTAFCCNGEKSRAKRSGSGATNFSLLKQAGDVEENPGPTSMDWIWRILFLVGAATGAHSFERAHLVQSGTAMKKPGASVRVSCQTSGYTFTAHILFWFRQAPGRGLEWVGWIKPQYGAVNFGGGFRDRVTLTRDVYREIAYMDIRGLKPDDTAVYYCARDRSYGDSSWALDAWGQGTTVVVSATRASTKGPSVFPLAPSSKSTSGGTAALGCLVKDYFPEPVTVSWNSGALTSGVHTFPAVLQSSGLYSLSSVVTVPSSSLGTQTYICNVNHKPSNTKVDKRVEPKSCEVKTDSTDHVKPKETENTKQPSKSCHKPKAIVHTEKVNMMSLTVLGLRMLFAKTVAVNFLLTAKLFFL

SEQ ID NO: 13533 - protein, 790 aa, Artificial Sequence
  Synthetic Polypeptide
MALPVTALLLPLALLLHAARPEVQLVESGGGLVQPGGSLRLSCAASGFSFSDFWMSWVRQAPGKGLEWVATISQAGSEKDYVDSVKGRFTISRDNAKKSLYLQMNSLRAEDTAVYYCASGVYSFDYRGQGTLVTVSSGTGGGGSGGGGSGGGGSEFDVQMIQTPDSLAVSLGQRATISCRASESVDNYGISFMHWYQQKPGQSPKLLIYRASNLESGIPARFSGSGSRTDFTLTINPVETDDVATYYCQQNNKDPPTFGGGTKLEIKLEGQPKANPTVTLFPPSSEELQANKATLVCLISDFYPGAVTVAWKADGSPVKAGVETTKPSKQSNNKYAASSYLSLTPEQWKSHRSYSCQVTHEGSTVEKTVAPTECSPIKTDVITMDPKDNCSKDANDTLLLQLTNTSAYYMYLLLLLKSVVYFAIITCCLLRRTAFCCNGEKSRAKRSGSGATNFSLLKQAGDVEENPGPTSMDWIWRILFLVGAATGAHSFEGGGGSQVQLQQSGAELVKPGASVKISCKASGYAFSSYWMNWVKQRPGKGLEWIGQIYPGDGDTTYNGKFKGKATLTADKSSSTVYMQLNSLTSEDSAVYFCVRYYYGSSGYFDYWGQGTTLTVSSTRASTKGPSVFPLAPSSKSTSGGTAALGCLVKDYFPEPVTVSWNSGALTSGVHTFPAVLQSSGLYSLSSVVTVPSSSLGTQTYICNVNHKPSNTKVDKRVEPKSCEVKTDSTDHVKPKETENTKQPSKSCHKPKAIVHTEKVNMMSLTVLGLRMLFAKTVAVNFLLTAKLFFL

SEQ ID NO: 13534 - protein, 781 aa, Artificial Sequence
  Synthetic Polypeptide
MALPVTALLLPLALLLHAARPEVQLVESGGGLVQPGGSLRLSCAASGFSFSDFWMSWVRQAPGKGLEWVATISQAGSEKDYVDSVKGRFTISRDNAKKSLYLQMNSLRAEDTAVYYCASGVYSFDYRGQGTLVTVSSGTGGGGSGGGGSGGGGSEFDVQMIQTPSSLSASLGDRVTISCRASQDIGNYLNWYQQKPDGTVKLLIYYTSRLHSGVPSRFSGSGSGTEYSLTISNLEQEDIATYFCQQGSALPPTFGGGTKLEINLEGQPKANPTVTLFPPSSEELQANKATLVCLISDFYPGAVTVAWKADGSPVKAGVETTKPSKQSNNKYAASSYLSLTPEQWKSHRSYSCQVTHEGSTVEKTVAPTECSPIKTDVITMDPKDNCSKDANDTLLLQLTNTSAYYMYLLLLLKSVVYFAIITCCLLRRTAFCCNGEKSRAKRSGSGATNFSLLKQAGDVEENPGPTSMDWIWRILFLVGAATGAHSFEALQLQQSGAELVRPGASVTLSCKASGYTFTDYEMHWVKQTPVHGLEWIGAIDPETGGTAYNQKFEGKAILTADKSSSTAYMELRSLTSEDSPVYYCARRRYYGSSSFDYWGQGTTLTVSSTRASTKGPSVFPLAPSSKSTSGGTAALGCLVKDYFPEPVTVSWNSGALTSGVHTFPAVLQSSGLYSLSSVVTVPSSSLGTQTYICNVNHKPSNTKVDKRVEPKSCEVKTDSTDHVKPKETENTKQPSKSCHKPKAIVHTEKVNMMSLTVLGLRMLFAKTVAVNFLLTAKLFFL

SEQ ID NO: 13535 - protein, 785 aa, Artificial Sequence
  Synthetic Polypeptide
MALPVTALLLPLALLLHAARPEVQLVESGGGLVQPGGSLRLSCAASGFSFSDFWMSWVRQAPGKGLEWVATISQAGSEKDYVDSVKGRFTISRDNAKKSLYLQMNSLRAEDTAVYYCASGVYSFDYRGQGTLVTVSSGTGGGGSGGGGSGGGGSEFDIVLTQSPASLAVSLGQRATISCRASKSVSTSGYSYLHWYQQKPGQPPKLLIYLASNLESGVPARFSGSGSGTDFTLNIHPVEEEDAATYYCQHSRELPFTFGSGTKLEIKLEGQPKANPTVTLFPPSSEELQANKATLVCLISDFYPGAVTVAWKADGSPVKAGVETTKPSKQSNNKYAASSYLSLTPEQWKSHRSYSCQVTHEGSTVEKTVAPTECSPIKTDVITMDPKDNCSKDANDTLLLQLTNTSAYYMYLLLLLKSVVYFAIITCCLLRRTAFCCNGEKSRAKRSGSGATNFSLLKQAGDVEENPGPTSMDWIWRILFLVGAATGAHSFEQVQLVESGGGLVQPGGSLKLSCAASGFDFSRYWMSWVRQAPGKGLEWIGEINPTSSTINFTPSLKDKVFISRDNAKNTLYLQMSKVRSEDTALYYCARGNYYRYGDAMDYWGQGTSVTVSTRASTKGPSVFPLAPSSKSTSGGTAALGCLVKDYFPEPVTVSWNSGALTSGVHTFPAVLQSSGLYSLSSVVTVPSSSLGTQTYICNVNHKPSNTKVDKRVEPKSCEVKTDSTDHVKPKETENTKQPSKSCHKPKAIVHTEKVNMMSLTVLGLRMLFAKTVAVNFLLTAKLFFL

SEQ ID NO: 13536 - protein, 783 aa, Artificial Sequence
  Synthetic Polypeptide
MALPVTALLLPLALLLHAARPEVQLVESGGGLVQPGGSLRLSCAASGFSFSDFWMSWVRQAPGKGLEWVATISQAGSEKDYVDSVKGRFTISRDNAKKSLYLQMNSLRAEDTAVYYCASGVYSFDYRGQGTLVTVSSGTGGGGSGGGGSGGGGSEFDIQMTQSPSSLSASVGDRVTITCSASQDISNYLNWYQQKPGKAPKLLIYYTSNLHSGVPSRFSGSGSGTDFTLTISSLQPEDFATYYCQQYRKLPWTFGQGTKLEIKRLEGQPKANPTVTLFPPSSEELQANKATLVCLISDFYPGAVTVAWKADGSPVKAGVETTKPSKQSNNKYAASSYLSLTPEQWKSHRSYSCQVTHEGSTVEKTVAPTECSPIKTDVITMDPKDNCSKDANDTLLLQLTNTSAYYMYLLLLLKSVVYFAIITCCLLRRTAFCCNGEKSRAKRSGSGATNFSLLKQAGDVEENPGPTSMDWIWRILFLVGAATGAHSFEQVQLVQSGAEVKKPGSSVKVSCKASGGTFSNYWMHWVRQAPGQGLEWMGATYRGHSDTYYNQKFKGRVTITADKSTSTAYMELSSLRSEDTAVYYCARGAIYDGYDVLDNWGQGTLVTVSSTRASTKGPSVFPLAPSSKSTSGGTAALGCLVKDYFPEPVTVSWNSGALTSGVHTFPAVLQSSGLYSLSSVVTVPSSSLGTQTYICNVNHKPSNTKVDKRVEPKSCEVKTDSTDHVKPKETENTKQPSKSCHKPKAIVHTEKVNMMSLTVLGLRMLFAKTVAVNFLLTAKLFFL

SEQ ID NO: 13537 - protein, 783 aa, Artificial Sequence
  Synthetic Polypeptide
MALPVTALLLPLALLLHAARPEVQLVESGGGLVQPGGSLRLSCAASGFSFSDFWMSWVRQAPGKGLEWVATISQAGSEKDYVDSVKGRFTISRDNAKKSLYLQMNSLRAEDTAVYYCASGVYSFDYRGQGTLVTVSSGTGGGGSGGGGSGGGGSEFDIVLTQSPATLSLSPGDRATISCRASESVTILGSHLIYWYQQKPGQPPRLLIQLASNVQTGVPARFSGSGSRTDFTLTISSVEPEDFAVYYCLQSRTIPRTFGQGTKLEIKRLEGQPKANPTVTLFPPSSEELQANKATLVCLISDFYPGAVTVAWKADGSPVKAGVETTKPSKQSNNKYAASSYLSLTPEQWKSHRSYSCQVTHEGSTVEKTVAPTECSPIKTDVITMDPKDNCSKDANDTLLLQLTNTSAYYMYLLLLLKSVVYFAIITCCLLRRTAFCCNGEKSRAKRSGSGATNFSLLKQAGDVEENPGPTSMDWIWRILFLVGAATGAHSFEQVQLVQSGPEVKKPGESVKISCKASGYTFRHYSMNWVKQAPGQGLKWMGRINTESGVPIYADDFKGRFSFTVDTSASTAYLEISSLTSEDTAVYFCSNDYLYSLDFWGQGTTLTVSSTRASTKGPSVFPLAPSSKSTSGGTAALGCLVKDYFPEPVTVSWNSGALTSGVHTFPAVLQSSGLYSLSSVVTVPSSSLGTQTYICNVNHKPSNTKVDKRVEPKSCEVKTDSTDHVKPKETENTKQPSKSCHKPKAIVHTEKVNMMSLTVLGLRMLFAKTVAVNFLLTAKLFFL

SEQ ID NO: 13538 - protein, 784 aa, Artificial Sequence
  Synthetic Polypeptide
MALPVTALLLPLALLLHAARPEVQLVESGGGLVQPGGSLRLSCAASGFSFSDFWMSWVRQAPGKGLEWVATISQAGSEKDYVDSVKGRFTISRDNAKKSLYLQMNSLRAEDTAVYYCASGVYSFDYRGQGTLVTVSSGTGGGGSGGGGSGGGGSEFQSVLTQPPSVSGAPGQRVTISCTGSSSNIGAGFDVHWYQQLPGTAPKLLIYGNSNRPSGVPDRFSGSKSGTSASLAITGLQAEDEADYYCQSYDSSLSGYVFGTGTKVTVLGLEGQPKANPTVTLFPPSSEELQANKATLVCLISDFYPGAVTVAWKADGSPVKAGVETTKPSKQSNNKYAASSYLSLTPEQWKSHRSYSCQVTHEGSTVEKTVAPTECSPIKTDVITMDPKDNCSKDANDTLLLQLTNTSAYYMYLLLLLKSVVYFAIITCCLLRRTAFCCNGEKSRAKRSGSGATNFSLLKQAGDVEENPGPTSMDWIWRILFLVGAATGAHSFEQVQLVQSGAEVKKPGASVKVSCKASGYTFTDYYMHWVRQAPGQRLEWMGWINPNSGGTNYAQKFQDRITVTRDTSSNTGYMELTRLRSDDTAVYYCARSPYSGVLDKWGQGTLVTVSSTRASTKGPSVFPLAPSSKSTSGGTAALGCLVKDYFPEPVTVSWNSGALTSGVHTFPAVLQSSGLYSLSSVVTVPSSSLGTQTYICNVNHKPSNTKVDKRVEPKSCEVKTDSTDHVKPKETENTKQPSKSCHKPKAIVHTEKVNMMSLTVLGLRMLFAKTVAVNFLLTAKLFFL

SEQ ID NO: 13539 - protein, 781 aa, Artificial Sequence
  Synthetic Polypeptide
MALPVTALLLPLALLLHAARPEVQLVESGGGLVQPGGSLRLSCAASGFSFSDFWMSWVRQAPGKGLEWVATISQAGSEKDYVDSVKGRFTISRDNAKKSLYLQMNSLRAEDTAVYYCASGVYSFDYRGQGTLVTVSSGTGGGGSGGGGSGGGGSEFQAVLTQPPSASGTPGQRVTISCSGSSSNIGSYTVSWYQQLPGTAPKFLIYSNNQRPSGVPDRFSGSKSGTSASLAISGLQSEDEADYYCAAWDDSLNGYVFGTGTKVTVLGLEGQPKANPTVTLFPPSSEELQANKATLVCLISDFYPGAVTVAWKADGSPVKAGVETTKPSKQSNNKYAASSYLSLTPEQWKSHRSYSCQVTHEGSTVEKTVAPTECSPIKTDVITMDPKDNCSKDANDTLLLQLTNTSAYYMYLLLLLKSVVYFAIITCCLLRRTAFCCNGEKSRAKRSGSGATNFSLLKQAGDVEENPGPTSMDWIWRILFLVGAATGAHSFEVQLVQSGAEVKKPGESLKISCKGSGYDFTTYWIGWVRQMPGKGLEWMGIIYPGDSDTRYSPSVRGRVTISADKSINTAYLQWSSLEASDTAMYYCARMWTFSQDGWGQGTLVTVSSTRASTKGPSVFPLAPSSKSTSGGTAALGCLVKDYFPEPVTVSWNSGALTSGVHTFPAVLQSSGLYSLSSVVTVPSSSLGTQTYICNVNHKPSNTKVDKRVEPKSCEVKTDSTDHVKPKETENTKQPSKSCHKPKAIVHTEKVNMMSLTVLGLRMLFAKTVAVNFLLTAKLFFL

SEQ ID NO: 13540 - protein, 784 aa, Artificial Sequence
  Synthetic Polypeptide
MALPVTALLLPLALLLHAARPEVQLVESGGGLVQPGGSLRLSCAASGFSFSDFWMSWVRQAPGKGLEWVATISQAGSEKDYVDSVKGRFTISRDNAKKSLYLQMNSLRAEDTAVYYCASGVYSFDYRGQGTLVTVSSGTGGGGSGGGGSGGGGSEFDIVMTQSPDSLAVSLGERATINCKSSQSILYSSNQKNYLAWYQQKPGQSPKLLIYWASTRESGVPDRFSGSGSGTDFTLTISSLQAEDVAVYYCHQYISSYTFGQGTKLEIKLEGQPKANPTVTLFPPSSEELQANKATLVCLISDFYPGAVTVAWKADGSPVKAGVETTKPSKQSNNKYAASSYLSLTPEQWKSHRSYSCQVTHEGSTVEKTVAPTECSPIKTDVITMDPKDNCSKDANDTLLLQLTNTSAYYMYLLLLLKSVVYFAIITCCLLRRTAFCCNGEKSRAKRSGSGATNFSLLKQAGDVEENPGPTSMDWIWRILFLVGAATGAHSFEQVQLVQSGAEVKKPGASVKVSCKASGYTFASQWMHWMRQAPGQGLEWIGWINPGNVNTKYNEKFKGRATLTVDTSTNTAYMELSSLRSEDTAVYYCARSTWYRPLDYWGQGTLVTVSSTRASTKGPSVFPLAPSSKSTSGGTAALGCLVKDYFPEPVTVSWNSGALTSGVHTFPAVLQSSGLYSLSSVVTVPSSSLGTQTYICNVNHKPSNTKVDKRVEPKSCEVKTDSTDHVKPKETENTKQPSKSCHKPKAIVHTEKVNMMSLTVLGLRMLFAKTVAVNFLLTAKLFFL

SEQ ID NO: 13541 - protein, 784 aa, Artificial Sequence
  Synthetic Polypeptide
MALPVTALLLPLALLLHAARPEVQLVESGGGLVQPGGSLRLSCAASGFSFSDFWMSWVRQAPGKGLEWVATISQAGSEKDYVDSVKGRFTISRDNAKKSLYLQMNSLRAEDTAVYYCASGVYSFDYRGQGTLVTVSSGTGGGGSGGGGSGGGGSEFDHIVLTQSPSSLSASLGDRVTISCRASQDISTYLNWYQQKPDGTVKLLIFYTSRLHAGVPSRFSGSGSGTHHSLTISNLEQEDIATYFCQQGNSLPFTFGSGTKLEIKRLEGQPKANPTVTLFPPSSEELQANKATLVCLISDFYPGAVTVAWKADGSPVKAGVETTKPSKQSNNKYAASSYLSLTPEQWKSHRSYSCQVTHEGSTVEKTVAPTECSPIKTDVITMDPKDNCSKDANDTLLLQLTNTSAYYMYLLLLLKSVVYFAIITCCLLRRTAFCCNGEKSRAKRSGSGATNFSLLKQAGDVEENPGPTSMDWIWRILFLVGAATGAHSFEQVQLKESGPELEKPGASVKISCKASGYSFTAYSMNWVKQNNGMSLEWIGSIDPYYGDTKYAQKFKGKATLTVDKASSTAYLQLKSLTSEDSAVYYCARRMITTGDWYFDVWGAGTTVTVSSTRASTKGPSVFPLAPSSKSTSGGTAALGCLVKDYFPEPVTVSWNSGALTSGVHTFPAVLQSSGLYSLSSVVTVPSSSLGTQTYICNVNHKPSNTKVDKRVEPKSCEVKTDSTDHVKPKETENTKQPSKSCHKPKAIVHTEKVNMMSLTVLGLRMLFAKTVAVNFLLTAKLFFL

SEQ ID NO: 13542 - protein, 784 aa, Artificial Sequence; identical to SEQ ID NO: 13541
  Synthetic Polypeptide

SEQ ID NO: 13543 - protein, 784 aa, Artificial Sequence
  Synthetic Polypeptide
MALPVTALLLPLALLLHAARPEVQLVESGGGLVQPGGSLRLSCAASGFSFSDFWMSWVRQAPGKGLEWVATISQAGSEKDYVDSVKGRFTISRDNAKKSLYLQMNSLRAEDTAVYYCASGVYSFDYRGQGTLVTVSSGTGGGGSGGGGSGGGGSEFDEIVLTQSPATLSLSPGERATLSCRASQSVSSYLAWYQQKPGQAPRLLIYDASNRATGIPARFSGSGSGTDFTLTISSLEPEDFAVYYCQQRSNWPITFGQGTRLEIKLEGQPKANPTVTLFPPSSEELQANKATLVCLISDFYPGAVTVAWKADGSPVKAGVETTKPSKQSNNKYAASSYLSLTPEQWKSHRSYSCQVTHEGSTVEKTVAPTECSPIKTDVITMDPKDNCSKDANDTLLLQLTNTSAYYMYLLLLLKSVVYFAIITCCLLRRTAFCCNGEKSRAKRSGSGATNFSLLKQAGDVEENPGPTSMDWIWRILFLVGAATGAHSFEEVQLVESGGGLVQPGRSLRLSCAASGFTFNDYAMHWVRQAPGKGLEWVSTISWNSGSIGYADSVKGRFTISRDNAKKSLYLQMNSLRAEDTALYYCAKDIQYGNYYYGMDVWGQGTTVTVSSTRASTKGPSVFPLAPSSKSTSGGTAALGCLVKDYFPEPVTVSWNSGALTSGVHTFPAVLQSSGLYSLSSVVTVPSSSLGTQTYICNVNHKPSNTKVDKRVEPKSCEVKTDSTDHVKPKETENTKQPSKSCHKPKAIVHTEKVNMMSLTVLGLRMLFAKTVAVNFLLTAKLFFL

SEQ ID NO: 13544 - protein, 786 aa, Artificial Sequence
  Synthetic Polypeptide
MALPVTALLLPLALLLHAARPEVQLVESGGGLVQPGGSLRLSCAASGFSFSDFWMSWVRQAPGKGLEWVATISQAGSEKDYVDSVKGRFTISRDNAKKSLYLQMNSLRAEDTAVYYCASGVYSFDYRGQGTLVTVSSGTGGGGSGGGGSGGGGSEFDIVMTQTPLSLPVTPGEPASISCRSSKSLLHSNGITYLYWYLQKPGQSPQLLIYQMSNLVSGVPDRFSGSGSGTDFTLKISRVEAEDVGVYYCAQNLELPYTFGGGTKVEIKRLEGQPKANPTVTLFPPSSEELQANKATLVCLISDFYPGAVTVAWKADGSPVKAGVETTKPSKQSNNKYAASSYLSLTPEQWKSHRSYSCQVTHEGSTVEKTVAPTECSPIKTDVITMDPKDNCSKDANDTLLLQLTNTSAYYMYLLLLLKSVVYFAIITCCLLRRTAFCCNGEKSRAKRSGSGATNFSLLKQAGDVEENPGPTSMDWIWRILFLVGAATGAHSFEQVQLVQSGAEVKKPGSSVKVSCKASGYAFSYSWINWVRQAPGQGLEWMGRIFPGDGDTDYNGKFKGRVTITADKSTSTAYMELSSLRSEDTAVYYCARNVFDGYWLVYWGQGTLVTVSSTRASTKGPSVFPLAPSSKSTSGGTAALGCLVKDYFPEPVTVSWNSGALTSGVHTFPAVLQSSGLYSLSSVVTVPSSSLGTQTYICNVNHKPSNTKVDKRVEPKSCEVKTDSTDHVKPKETENTKQPSKSCHKPKAIVHTEKVNMMSLTVLGLRMLFAKTVAVNFLLTAKLFFL

SEQ ID NO: 13545 - protein, 787 aa, Artificial Sequence
  Synthetic Polypeptide
MALPVTALLLPLALLLHAARPEVQLVESGGGLVQPGGSLRLSCAASGFSFSDFWMSWVRQAPGKGLEWVATISQAGSEKDYVDSVKGRFTISRDNAKKSLYLQMNSLRAEDTAVYYCASGVYSFDYRGQGTLVTVSSGTGGGGSGGGGSGGGGSEFDIQMTQSPSSLSASVGDRVTITCRSSQSIVHSVGNTFLEWYQQKPGKAPKLLIYKVSNRFSGVPSRFSGSGSGTDFTLTISSLQPEDFATYYCFQGSQFPYTFGQGTKVEIKRLEGQPKANPTVTLFPPSSEELQANKATLVCLISDFYPGAVTVAWKADGSPVKAGVETTKPSKQSNNKYAASSYLSLTPEQWKSHRSYSCQVTHEGSTVEKTVAPTECSPIKTDVITMDPKDNCSKDANDTLLLQLTNTSAYYMYLLLLLKSVVYFAIITCCLLRRTAFCCNGEKSRAKRSGSGATNFSLLKQAGDVEENPGPTSMDWIWRILFLVGAATGAHSFEEVQLVESGGGLVQPGGSLRLSCAASGYEFSRSWMNWVRQAPGKGLEWVGRIYPGDGDTNYSGKFKGRFTISADTSKNTAYLQMNSLRAEDTAVYYCARDGSSWDWYFDVWGQGTLVTVSSTRASTKGPSVFPLAPSSKSTSGGTAALGCLVKDYFPEPVTVSWNSGALTSGVHTFPAVLQSSGLYSLSSVVTVPSSSLGTQTYICNVNHKPSNTKVDKRVEPKSCEVKTDSTDHVKPKETENTKQPSKSCHKPKAIVHTEKVNMMSLTVLGLRMLFAKTVAVNFLLTAKLFFL

SEQ ID NO: 13546 - protein, 785 aa, Artificial Sequence
  Synthetic Polypeptide
MALPVTALLLPLALLLHAARPEVQLVESGGGLVQPGGSLRLSCAASGFSFSDFWMSWVRQAPGKGLEWVATISQAGSEKDYVDSVKGRFTISRDNAKKSLYLQMNSLRAEDTAVYYCASGVYSFDYRGQGTLVTVSSGTGGGGSGGGGSGGGGSEFDIQMTQSPSSLSASVGDRVTITCRASQTIWSYLNWYQQRPGKAPNLLIYAASSLQSGVPSRFSGRGSGTDFTLTISSLQAEDFATYYCQQSYSIPQIFGQGTKLEIKLEGQPKANPTVTLFPPSSEELQANKATLVCLISDFYPGAVTVAWKADGSPVKAGVETTKPSKQSNNKYAASSYLSLTPEQWKSHRSYSCQVTHEGSTVEKTVAPTECSPIKTDVITMDPKDNCSKDANDTLLLQLTNTSAYYMYLLLLLKSVVYFAIITCCLLRRTAFCCNGEKSRAKRSGSGATNFSLLKQAGDVEENPGPTSMDWIWRILFLVGAATGAHSFEQVQLQQSGPGLVKPSQTLSLTCAISGDSVSSNSAAWNWIRQSPSRGLEWLGRTYYRSKWYNDYAVSVKSRITINPDTSKNQFSLQLNSVTPEDTAVYYCAREVTGDLEDAFDIWGQGTMVTVSSTRASTKGPSVFPLAPSSKSTSGGTAALGCLVKDYFPEPVTVSWNSGALTSGVHTFPAVLQSSGLYSLSSVVTVPSSSLGTQTYICNVNHKPSNTKVDKRVEPKSCEVKTDSTDHVKPKETENTKQPSKSCHKPKAIVHTEKVNMMSLTVLGLRMLFAKTVAVNFLLTAKLFFL

SEQ ID NO: 13547 - protein, 778 aa, Artificial Sequence
  Synthetic Polypeptide
MALPVTALLLPLALLLHAARPEVQLVESGGGLVQPGGSLRLSCAASGFSFSDFWMSWVRQAPGKGLEWVATISQAGSEKDYVDSVKGRFTISRDNAKKSLYLQMNSLRAEDTAVYYCASGVYSFDYRGQGTLVTVSSGTGGGGSGGGGSGGGGSEFDIQMTQSPATIENTSLSASVGDRVTITCRASQGISSWLTWYQQKPEKAPKSLIYAASSLQSGVPSRFSGSGSGTDFTLTISSLQPEDFATYYCQQYDSYPITFGQGTRLEIKLEGQPKANPTVTLFPPSSEELQANKATLVCLISDFYPGAVTVAWKADGSPVKAGVETTKPSKQSNNKYAASSYLSLTPEQWKSHRSYSCQVTHEGSTVEKTVAPTECSPIKTDVITMDPKDNCSKDANDTLLLQLTNTSAYYMYLLLLLKSVVYFAIITCCLLRRTAFCCNGEKSRAKRSGSGATNFSLLKQAGDVEENPGPTSMDWIWRILFLVGAATGAHSFEQVQLQQWGAGLLKPSETLSLTCAVYGGSFSAYYWSWIRQPPGKGLEWIGDINHGGGTNYNPSLKSRVTISVDTSKNQFSLKLNSVTAADTAVYYCASLTAYWGQGSLVTVSSTRASTKGPSVFPLAPSSKSTSGGTAALGCLVKDYFPEPVTVSWNSGALTSGVHTFPAVLQSSGLYSLSSVVTVPSSSLGTQTYICNVNHKPSNTKVDKRVEPKSCEVKTDSTDHVKPKETENTKQPSKSCHKPKAIVHTEKVNMMSLTVLGLRMLFAKTVAVNFLLTAKLFFL

SEQ ID NO: 13548 - protein, 783 aa, Artificial Sequence
  Synthetic Polypeptide
MALPVTALLLPLALLLHAARPEVQLVESGGGLVQPGGSLRLSCAASGFSFSDFWMSWVRQAPGKGLEWVATISQAGSEKDYVDSVKGRFTISRDNAKKSLYLQMNSLRAEDTAVYYCASGVYSFDYRGQGTLVTVSSGTGGGGSGGGGSGGGGSEFDEIVLTQSPDSLAVSLGERATINCKASQSVDFDGDSYLNWYQQKPGQPPKVLIYAASTLQSGVPSRFSGSGSGTDFTLTINSLEAEDAATYYCQQSNEDPWTFGGGTKVEIKLEGQPKANPTVTLFPPSSEELQANKATLVCLISDFYPGAVTVAWKADGSPVKAGVETTKPSKQSNNKYAASSYLSLTPEQWKSHRSYSCQVTHEGSTVEKTVAPTECSPIKTDVITMDPKDNCSKDANDTLLLQLTNTSAYYMYLLLLLKSVVYFAIITCCLLRRTAFCCNGEKSRAKRSGSGATNFSLLKQAGDVEENPGPTSMDWIWRILFLVGAATGAHSFEQVQLVQSGAEVKKPGASVKVSCKVSGYTFTDYYITWVRQAPGQALEWMGWIYPGSGNTKYSQKFQGRFVFSVDTSASTAYLQLSSLKAEDTAVYYCANYGNYWFAYWGQGTLVTVSSTRASTKGPSVFPLAPSSKSTSGGTAALGCLVKDYFPEPVTVSWNSGALTSGVHTFPAVLQSSGLYSLSSVVTVPSSSLGTQTYICNVNHKPSNTKVDKRVEPKSCEVKTDSTDHVKPKETENTKQPSKSCHKPKAIVHTEKVNMMSLTVLGLRMLFAKTVAVNFLLTAKLFFL

SEQ ID NO: 13549 - protein, 780 aa, Artificial Sequence
  Synthetic Polypeptide
MALPVTALLLPLALLLHAARPEVQLVESGGGLVQPGGSLRLSCAASGFSFSDFWMSWVRQAPGKGLEWVATISQAGSEKDYVDSVKGRFTISRDNAKKSLYLQMNSLRAEDTAVYYCASGVYSFDYRGQGTLVTVSSGTGGGGSGGGGSGGGGSEFDIQMTQSPSSLSASVGDRVTITCRASQGISSWLAWYQQKPEKAPKSLIYAASSLQSGVPSRFSGSGSGTDFTLTISSLQPEDFATYYCQQYNSYPPTFGGGTKVEIKLEGQPKANPTVTLFPPSSEELQANKATLVCLISDFYPGAVTVAWKADGSPVKAGVETTKPSKQSNNKYAASSYLSLTPEQWKSHRSYSCQVTHEGSTVEKTVAPTECSPIKTDVITMDPKDNCSKDANDTLLLQLTNTSAYYMYLLLLLKSVVYFAIITCCLLRRTAFCCNGEKSRAKRSGSGATNFSLLKQAGDVEENPGPTSMDWIWRILFLVGAATGAHSFEEVQLVQSGGGLVHPGGSLRLSCAGSGFAFSSSTMHWIRQAPGKGLEWISLIGSGGGIYYGDSVKGRFTISRDNAKNSLYLQMNSLRAEDMAVYYCVRGYFDWVDYFDYWGQGTLVTVSSTRASTKGPSVFPLAPSSKSTSGGTAALGCLVKDYFPEPVTVSWNSGALTSGVHTFPAVLQSSGLYSLSSVVTVPSSSLGTQTYICNVNHKPSNTKVDKRVEPKSCEVKTDSTDHVKPKETENTKQPSKSCHKPKAIVHTEKVNMMSLTVLGLRMLFAKTVAVNFLLTAKLFFL

SEQ ID NO: 13550 - protein, 790 aa, Artificial Sequence
  Synthetic Polypeptide
MALPVTALLLPLALLLHAARPEVQLVESGGGLVQPGGSLRLSCAASGFSFSDFWMSWVRQAPGKGLEWVATISQAGSEKDYVDSVKGRFTISRDNAKKSLYLQMNSLRAEDTAVYYCASGVYSFDYRGQGTLVTVSSGTGGGGSGGGGSGGGGSEFDDIVMTQSPDSLTVSLGERTTINCKSSQSVLDSSKNKNSLAWYQQKPGQPPKLLLSWASTRESGIPDRFSGSGSGTDFTLTIDSLQPEDSATYYCQQSAHFPITFGQGTRLEIKLEGQPKANPTVTLFPPSSEELQANKATLVCLISDFYPGAVTVAWKADGSPVKAGVETTKPSKQSNNKYAASSYLSLTPEQWKSHRSYSCQVTHEGSTVEKTVAPTECSPIKTDVITMDPKDNCSKDANDTLLLQLTNTSAYYMYLLLLLKSVVYFAIITCCLLRRTAFCCNGEKSRAKRSGSGATNFSLLKQAGDVEENPGPTSMDWIWRILFLVGAATGAHSFEQVQLVQSGAEVKKPGASVKVSCKASGYTFTNYGMNWVKQAPGQGLKWMGWINTYTGEPTYADDFKGRVTMTSDTSTSTAYLELHNLRSDDTAVYYCARWSWSDGYYVYFDYWGQGTTVTVSSTRASTKGPSVFPLAPSSKSTSGGTAALGCLVKDYFPEPVTVSWNSGALTSGVHTFPAVLQSSGLYSLSSVVTVPSSSLGTQTYICNVNHKPSNTKVDKRVEPKSCEVKTDSTDHVKPKETENTKQPSKSCHKPKAIVHTEKVNMMSLTVLGLRMLFAKTVAVNFLLTAKLFFL

SEQ ID NO: 13551 - protein, 786 aa, Artificial Sequence
  Synthetic Polypeptide
MALPVTALLLPLALLLHAARPEVQLVESGGGLVQPGGSLRLSCAASGFSFSDFWMSWVRQAPGKGLEWVATISQAGSEKDYVDSVKGRFTISRDNAKKSLYLQMNSLRAEDTAVYYCASGVYSFDYRGQGTLVTVSSGTGGGGSGGGGSGGGGSEFDEIVLTQSPGSLAVSPGERVTMSCKSSQSVFFSSSQKNYLAWYQQIPGQSPRLLIYWASTRESGVPDRFTGSGSGTDFTLTISSVQPEDLAIYYCHQYLSSRTFGQGTKLEIKRLEGQPKANPTVTLFPPSSEELQANKATLVCLISDFYPGAVTVAWKADGSPVKAGVETTKPSKQSNNKYAASSYLSLTPEQWKSHRSYSCQVTHEGSTVEKTVAPTECSPIKTDVITMDPKDNCSKDANDTLLLQLTNTSAYYMYLLLLLKSVVYFAIITCCLLRRTAFCCNGEKSRAKRSGSGATNFSLLKQAGDVEENPGPTSMDWIWRILFLVGAATGAHSFEQVQLQQPGAEVVKPGASVKMSCKASGYTFTSYYIHWIKQTPGQGLEWVGVIYPGNDDISYNQKFQGKATLTADKSSTTAYMQLSSLTSEDSAVYYCAREVRLRYFDVWGQGTTVTVSSTRASTKGPSVFPLAPSSKSTSGGTAALGCLVKDYFPEPVTVSWNSGALTSGVHTFPAVLQSSGLYSLSSVVTVPSSSLGTQTYICNVNHKPSNTKVDKRVEPKSCEVKTDSTDHVKPKETENTKQPSKSCHKPKAIVHTEKVNMMSLTVLGLRMLFAKTVAVNFLLTAKLFFL

SEQ ID NO: 13552 - protein, 790 aa, Artificial Sequence
  Synthetic Polypeptide
MALPVTALLLPLALLLHAARPEVQLVESGGGLVQPGGSLRLSCAASGFSFSDFWMSWVRQAPGKGLEWVATISQAGSEKDYVDSVKGRFTISRDNAKKSLYLQMNSLRAEDTAVYYCASGVYSFDYRGQGTLVTVSSGTGGGGSGGGGSGGGGSEFDVLLTQSPLSLPVTLGQPASISCRSSQTIVHSNGNTYLEWFQQRPGQSPRLLIYQVSNRFSGVPDRFSGSGSGTDFTLKISRVEAEDVGVYYCFQGSHVPRTFGGGTKVEIKRALEGQPKANPTVTLFPPSSEELQANKATLVCLISDFYPGAVTVAWKADGSPVKAGVETTKPSKQSNNKYAASSYLSLTPEQWKSHRSYSCQVTHEGSTVEKTVAPTECSPIKTDVITMDPKDNCSKDANDTLLLQLTNTSAYYMYLLLLLKSVVYFAIITCCLLRRTAFCCNGEKSRAKRSGSGATNFSLLKQAGDVEENPGPTSMDWIWRILFLVGAATGAHSFEQIQLVQSGSELKKPGASVKVSCKASGYTFTNYGMNWVRQAPGQGLKWMGWINTNTGEPKYAEEFKGRFALSLDTSVSTAYLQINSLKAEDTAVYFCARGYGNYARGAWLAYWGQGTLVTVSSTRASTKGPSVFPLAPSSKSTSGGTAALGCLVKDYFPEPVTVSWNSGALTSGVHTFPAVLQSSGLYSLSSVVTVPSSSLGTQTYICNVNHKPSNTKVDKRVEPKSCEVKTDSTDHVKPKETENTKQPSKSCHKPKAIVHTEKVNMMSLTVLGLRMLFAKTVAVNFLLTAKLFFL

SEQ ID NO: 13553 - protein, 775 aa, Artificial Sequence
  Synthetic Polypeptide
MALPVTALLLPLALLLHAARPEVQLVESGGGLVQPGGSLRLSCAASGFSFSDFWMSWVRQAPGKGLEWVATISQAGSEKDYVDSVKGRFTISRDNAKKSLYLQMNSLRAEDTAVYYCASGVYSFDYRGQGTLVTVSSGTGGGGSGGGGSGGGGSEFDEIVLTQSPATLSLSPGERATLSCSASSSINYIYWLQQKPGQAPRILIYLTSNLASGVPARFSGSGSGTDFTLTISSLEPEDFAVYYCLQWSSNPLTFGGGTKVEIKLEGQPKANPTVTLFPPSSEELQANKATLVCLISDFYPGAVTVAWKADGSPVKAGVETTKPSKQSNNKYAASSYLSLTPEQWKSHRSYSCQVTHEGSTVEKTVAPTECSPIKTDVITMDPKDNCSKDANDTLLLQLTNTSAYYMYLLLLLKSVVYFAIITCCLLRRTAFCCNGEKSRAKRSGSGATNFSLLKQAGDVEENPGPTSMDWIWRILFLVGAATGAHSFEEVQLVESGGGLVKPGGSLRLSCAASGFTFSSYDMSWVRQAPGKGLEWVSTISSGGSYTYYLDSIKGRFTISRDNAKNSLYLQMNSLRAEDTAVYYCARQGLDYWGRGTLVTVSSTRASTKGPSVFPLAPSSKSTSGGTAALGCLVKDYFPEPVTVSWNSGALTSGVHTFPAVLQSSGLYSLSSVVTVPSSSLGTQTYICNVNHKPSNTKVDKRVEPKSCEVKTDSTDHVKPKETENTKQPSKSCHKPKAIVHTEKVNMMSLTVLGLRMLFAKTVAVNFLLTAKLFFL

SEQ ID NO: 13554 - protein, 784 aa, Artificial Sequence
  Synthetic Polypeptide
MALPVTALLLPLALLLHAARPEVQLVESGGGLVQPGGSLRLSCAASGFSFSDFWMSWVRQAPGKGLEWVATISQAGSEKDYVDSVKGRFTISRDNAKKSLYLQMNSLRAEDTAVYYCASGVYSFDYRGQGTLVTVSSGTGGGGSGGGGSGGGGSEFDIVMTQSPDSLAVSLGERATINCRASKSVSTSGYSFMHWYQQKPGQPPKLLIYLASNLESGVPDRFSGSGSGTDFTLTISSLQAEDVAVYYCQHSREVPWTFGQGTKVEIKRLEGQPKANPTVTLFPPSSEELQANKATLVCLISDFYPGAVTVAWKADGSPVKAGVETTKPSKQSNNKYAASSYLSLTPEQWKSHRSYSCQVTHEGSTVEKTVAPTECSPIKTDVITMDPKDNCSKDANDTLLLQLTNTSAYYMYLLLLLKSVVYFAIITCCLLRRTAFCCNGEKSRAKRSGSGATNFSLLKQAGDVEENPGPTSMDWIWRILFLVGAATGAHSFEQVQLVQSGAEVKKPGASVKVSCKASGYTFTNYGMNWVRQAPGQGLEWMGWINTYTGEPTYADAFKGRFAFSLDTSTSTAYLQINSLRSDDTAVYYCARDYGDYGMDYWGQGTTVTVSSTRASTKGPSVFPLAPSSKSTSGGTAALGCLVKDYFPEPVTVSWNSGALTSGVHTFPAVLQSSGLYSLSSVVTVPSSSLGTQTYICNVNHKPSNTKVDKRVEPKSCEVKTDSTDHVKPKETENTKQPSKSCHKPKAIVHTEKVNMMSLTVLGLRMLFAKTVAVNFLLTAKLFFL

SEQ ID NO: 13555 - protein, 780 aa, Artificial Sequence
  Synthetic Polypeptide
MALPVTALLLPLALLLHAARPEVQLVESGGGLVQPGGSLRLSCAASGFSFSDFWMSWVRQAPGKGLEWVATISQAGSEKDYVDSVKGRFTISRDNAKKSLYLQMNSLRAEDTAVYYCASGVYSFDYRGQGTLVTVSSGTGGGGSGGGGSGGGGSEFDIVMTQTPLTLSVTIGQPASISCKSSQSLLDSDGKTYLNWLLQRPGQSPERLIYLVSKLDSGVPDRFTGSGSGTDFTLKISRVEAEDLGVYCCWQGTHFPYTFGGGTKVEIKGLEGQPKANPTVTLFPPSSEELQANKATLVCLISDFYPGAVTVAWKADGSPVKAGVETTKPSKQSNNKYAASSYLSLTPEQWKSHRSYSCQVTHEGSTVEKTVAPTECSPIKTDVITMDPKDNCSKDANDTLLLQLTNTSAYYMYLLLLLKSVVYFAIITCCLLRRTAFCCNGEKSRAKRSGSGATNFSLLKQAGDVEENPGPTSMDWIWRILFLVGAATGAHSFEQVQLQQPGAELVRPGASVKLSCKASGYTFTSYWMNWVKQRPGQGLEWIGMIDPSDSETHYNHIFKDKATLTVDKSSSTAYLQLSSLTSEDSAVYYCARNLYLWGQGTSVTVSSTRASTKGPSVFPLAPSSKSTSGGTAALGCLVKDYFPEPVTVSWNSGALTSGVHTFPAVLQSSGLYSLSSVVTVPSSSLGTQTYICNVNHKPSNTKVDKRVEPKSCEVKTDSTDHVKPKETENTKQPSKSCHKPKAIVHTEKVNMMSLTVLGLRMLFAKTVAVNFLLTAKLFFL

SEQ ID NO: 13556 - protein, 788 aa, Artificial Sequence
  Synthetic Polypeptide
MALPVTALLLPLALLLHAARPEVQLVESGGGLVQPGGSLRLSCAASGFSFSDFWMSWVRQAPGKGLEWVATISQAGSEKDYVDSVKGRFTISRDNAKKSLYLQMNSLRAEDTAVYYCASGVYSFDYRGQGTLVTVSSGTGGGGSGGGGSGGGGSEFDIVMTQSPDSLAVSLGERATINCESSQSLLNSGNQKNYLTWYQQKPGQPPKPLIYWASTRESGVPDRFSGSGSGTDFTLTISSLQAEDVAVYYCQNDYSYPYTFGQGTKLEIKRLEGQPKANPTVTLFPPSSEELQANKATLVCLISDFYPGAVTVAWKADGSPVKAGVETTKPSKQSNNKYAASSYLSLTPEQWKSHRSYSCQVTHEGSTVEKTVAPTECSPIKTDVITMDPKDNCSKDANDTLLLQLTNTSAYYMYLLLLLKSVVYFAIITCCLLRRTAFCCNGEKSRAKRSGSGATNFSLLKQAGDVEENPGPTSMDWIWRILFLVGAATGAHSFEEVQLVQSGAEVKKPGESLKISCKGSGYSFTDYYMKWARQMPGKGLEWMGDIIPSNGATFYNQKFKGQVTISADKSISTTYLQWSSLKASDTAMYYCARSHLLRASWFAYWGQGTMVTVSSTRASTKGPSVFPLAPSSKSTSGGTAALGCLVKDYFPEPVTVSWNSGALTSGVHTFPAVLQSSGLYSLSSVVTVPSSSLGTQTYICNVNHKPSNTKVDKRVEPKSCEVKTDSTDHVKPKETENTKQPSKSCHKPKAIVHTEKVNMMSLTVLGLRMLFAKTVAVNFLLTAKLFFL

SEQ ID NO: 13557 - protein, 783 aa, Artificial Sequence
  Synthetic Polypeptide
MALPVTALLLPLALLLHAARPEVQLVESGGGLVQPGGSLRLSCAASGFSFSDFWMSWVRQAPGKGLEWVATISQAGSEKDYVDSVKGRFTISRDNAKKSLYLQMNSLRAEDTAVYYCASGVYSFDYRGQGTLVTVSSGTGGGGSGGGGSGGGGSEFDIQMTQSTSSLSASLGDRVTISCSASQGINNYLNWYQQKPDGTVELLIYYTSTLQSGVPSRFSGSGSGTDYSLTISNLEPEDIGTYYCQQYSKLPRTFGGGTKLEIKLEGQPKANPTVTLFPPSSEELQANKATLVCLISDFYPGAVTVAWKADGSPVKAGVETTKPSKQSNNKYAASSYLSLTPEQWKSHRSYSCQVTHEGSTVEKTVAPTECSPIKTDVITMDPKDNCSKDANDTLLLQLTNTSAYYMYLLLLLKSVVYFAIITCCLLRRTAFCCNGEKSRAKRSGSGATNFSLLKQAGDVEENPGPTSMDWIWRILFLVGAATGAHSFEQVQLQQSGSELMMPGASVKISCKATGYTFSNYWIEWVKQRPGHGLEWIGEILPGTGRTIYNEKFKGKATFTADISSNTVQMQLSSLTSEDSAVYYCARRDYYGNFYYAMDYWGQGTSVTVSSTRASTKGPSVFPLAPSSKSTSGGTAALGCLVKDYFPEPVTVSWNSGALTSGVHTFPAVLQSSGLYSLSSVVTVPSSSLGTQTYICNVNHKPSNTKVDKRVEPKSCEVKTDSTDHVKPKETENTKQPSKSCHKPKAIVHTEKVNMMSLTVLGLRMLFAKTVAVNFLLTAKLFFL

SEQ ID NO: 13558 - protein, 778 aa, Artificial Sequence
  Synthetic Polypeptide
MALPVTALLLPLALLLHAARPEVQLVESGGGLVQPGGSLRLSCAASGFSFSDFWMSWVRQAPGKGLEWVATISQAGSEKDYVDSVKGRFTISRDNAKKSLYLQMNSLRAEDTAVYYCASGVYSFDYRGQGTLVTVSSGTGGGGSGGGGSGGGGSEFDIQMTQSPASLSVSVGETVTITCRASENIYSNLAWYQQKQGKSPQLLVYAATNLADGVPSRFSGSGSGTQYSLKINSLQSEDFGSYYCQHFWGTWTFGGGTTLEIKLEGQPKANPTVTLFPPSSEELQANKATLVCLISDFYPGAVTVAWKADGSPVKAGVETTKPSKQSNNKYAASSYLSLTPEQWKSHRSYSCQVTHEGSTVEKTVAPTECSPIKTDVITMDPKDNCSKDANDTLLLQLTNTSAYYMYLLLLLKSVVYFAIITCCLLRRTAFCCNGEKSRAKRSGSGATNFSLLKQAGDVEENPGPTSMDWIWRILFLVGAATGAHSFEEVQLQQSGPELVKPGASVKMSCKASGYTFTDYYMKWMKQSHGKSLEWIGDINPNNGGTTYNQKFKGKATLTVDKSSSTAYMQLNSLTSEDSAVYYCARDYGYGYFDYWGQGTTLTVSSTRASTKGPSVFPLAPSSKSTSGGTAALGCLVKDYFPEPVTVSWNSGALTSGVHTFPAVLQSSGLYSLSSVVTVPSSSLGTQTYICNVNHKPSNTKVDKRVEPKSCEVKTDSTDHVKPKETENTKQPSKSCHKPKAIVHTEKVNMMSLTVLGLRMLFAKTVAVNFLLTAKLFFL

SEQ ID NO: 13559 - protein, 781 aa, Artificial Sequence
  Synthetic Polypeptide
MALPVTALLLPLALLLHAARPEVQLVESGGGLVQPGGSLRLSCAASGFSFSDFWMSWVRQAPGKGLEWVATISQAGSEKDYVDSVKGRFTISRDNAKKSLYLQMNSLRAEDTAVYYCASGVYSFDYRGQGTLVTVSSGTGGGGSGGGGSGGGGSEFEIVLTQSPGTLSLSPGERATLSCRASQSVGGYLAWYQQKPGQAPRLLIYDASNRATGIPARFSGSGSGTDFTLTISSLEPEDFAVYYCQQRNNWPPMYTFGQGTKLEIKRLEGQPKANPTVTLFPPSSEELQANKATLVCLISDFYPGAVTVAWKADGSPVKAGVETTKPSKQSNNKYAASSYLSLTPEQWKSHRSYSCQVTHEGSTVEKTVAPTECSPIKTDVITMDPKDNCSKDANDTLLLQLTNTSAYYMYLLLLLKSVVYFAIITCCLLRRTAFCCNGEKSRAKRSGSGATNFSLLKQAGDVEENPGPTSMDWIWRILFLVGAATGAHSFEQVQLVQSGAEVKKPGSSVKVSCKASGGTFSSYAISWVRQAPGQGLEWMGGIIPILGTANYAQKFQGRVTITADESTSTAYMELSSLRSEDTAVYYCARWGGGAFDIWGQGTMVTVSSTRASTKGPSVFPLAPSSKSTSGGTAALGCLVKDYFPEPVTVSWNSGALTSGVHTFPAVLQSSGLYSLSSVVTVPSSSLGTQTYICNVNHKPSNTKVDKRVEPKSCEVKTDSTDHVKPKETENTKQPSKSCHKPKAIVHTEKVNMMSLTVLGLRMLFAKTVAVNFLLTAKLFFL

SEQ ID NO: 13560 - protein, 776 aa, Artificial Sequence
  Synthetic Polypeptide
MALPVTALLLPLALLLHAARPEVQLVESGGGLVQPGGSLRLSCAASGFSFSDFWMSWVRQAPGKGLEWVATISQAGSEKDYVDSVKGRFTISRDNAKKSLYLQMNSLRAEDTAVYYCASGVYSFDYRGQGTLVTVSSGTGGGGSGGGGSGGGGSEFQIVLTQSPALMSASPGEKVTMTCSASSSVRYMYWYQQKPRSSPKPWIHLTSNLASGVPARFSGSGSGTSYSLTISSMEAEDAATYYCQQWSSHPFTFGSGTKLEIKLEGQPKANPTVTLFPPSSEELQANKATLVCLISDFYPGAVTVAWKADGSPVKAGVETTKPSKQSNNKYAASSYLSLTPEQWKSHRSYSCQVTHEGSTVEKTVAPTECSPIKTDVITMDPKDNCSKDANDTLLLQLTNTSAYYMYLLLLLKSVVYFAIITCCLLRRTAFCCNGEKSRAKRSGSGATNFSLLKQAGDVEENPGPTSMDWIWRILFLVGAATGAHSFEDVQLQESGPGLVKPSQSLSLTCTVTGFSITSDYSWNWIRQFPGNKLEWMGYISYSGHTSYNPSLESRISITRDTSKNQFFLQLNSVTTEDTATYYCTRGNWDVVYWGQGTLVTVSATRASTKGPSVFPLAPSSKSTSGGTAALGCLVKDYFPEPVTVSWNSGALTSGVHTFPAVLQSSGLYSLSSVVTVPSSSLGTQTYICNVNHKPSNTKVDKRVEPKSCEVKTDSTDHVKPKETENTKQPSKSCHKPKAIVHTEKVNMMSLTVLGLRMLFAKTVAVNFLLTAKLFFL

SEQ ID NO: 13561 - protein, 786 aa, Artificial Sequence
  Synthetic Polypeptide
MALPVTALLLPLALLLHAARPEVQLVESGGGLVQPGGSLRLSCAASGFSFSDFWMSWVRQAPGKGLEWVATISQAGSEKDYVDSVKGRFTISRDNAKKSLYLQMNSLRAEDTAVYYCASGVYSFDYRGQGTLVTVSSGTGGGGSGGGGSGGGGSEFDVVMTQSPLSLPVTLGQPASISCRSSQSIVHSDGNTYLEWYQQRPGQSPRRLIYKVSNRFSGVPDRFSGSGSGTDFTLKISRVEAEDVGVYYCFQGSHAPWTFGGGTKVEIKLEGQPKANPTVTLFPPSSEELQANKATLVCLISDFYPGAVTVAWKADGSPVKAGVETTKPSKQSNNKYAASSYLSLTPEQWKSHRSYSCQVTHEGSTVEKTVAPTECSPIKTDVITMDPKDNCSKDANDTLLLQLTNTSAYYMYLLLLLKSVVYFAIITCCLLRRTAFCCNGEKSRAKRSGSGATNFSLLKQAGDVEENPGPTSMDWIWRILFLVGAATGAHSFEEVQLVESGGGLVQPGGSLRLSCAASGFTFSSYGMHWVRQAPGKGLEWVAYITTRSSTIYYADSVKGRFTISRDNAKNSLYLQMNSLRAEDTAVYYCTREPLTGYYAMDYWGQGTSVTVSSTRASTKGPSVFPLAPSSKSTSGGTAALGCLVKDYFPEPVTVSWNSGALTSGVHTFPAVLQSSGLYSLSSVVTVPSSSLGTQTYICNVNHKPSNTKVDKRVEPKSCEVKTDSTDHVKPKETENTKQPSKSCHKPKAIVHTEKVNMMSLTVLGLRMLFAKTVAVNFLLTAKLFFL

SEQ ID NO: 13562 - protein, 778 aa, Artificial Sequence
  Synthetic Polypeptide
MALPVTALLLPLALLLHAARPEVQLVESGGGLVQPGGSLRLSCAASGFSFSDFWMSWVRQAPGKGLEWVATISQAGSEKDYVDSVKGRFTISRDNAKKSLYLQMNSLRAEDTAVYYCASGVYSFDYRGQGTLVTVSSGTGGGGSGGGGSGGGGSEFDIQMTQSPSSLSASVGDRVTITCRASQSISLWLNWYQQKPGKAPKLLIYAASTLQSGVPSRFSGSGSGTDFTLTISSLQPEDFATYYCQQYYTSPYTFGQGTKVEIKRLEGQPKANPTVTLFPPSSEELQANKATLVCLISDFYPGAVTVAWKADGSPVKAGVETTKPSKQSNNKYAASSYLSLTPEQWKSHRSYSCQVTHEGSTVEKTVAPTECSPIKTDVITMDPKDNCSKDANDTLLLQLTNTSAYYMYLLLLLKSVVYFAIITCCLLRRTAFCCNGEKSRAKRSGSGATNFSLLKQAGDVEENPGPTSMDWIWRILFLVGAATGAHSFEQVQLLESGGGLVQPGGSLRLSCAASGFTFSSYAMSWVRQAPGKGLEWVSVIRSSGSSTYYADSVKGRFTISRDNSKNTLYLQMNSLRAEDTAVYYCARGGGYFDYWGQGTLVTVSSTRASTKGPSVFPLAPSSKSTSGGTAALGCLVKDYFPEPVTVSWNSGALTSGVHTFPAVLQSSGLYSLSSVVTVPSSSLGTQTYICNVNHKPSNTKVDKRVEPKSCEVKTDSTDHVKPKETENTKQPSKSCHKPKAIVHTEKVNMMSLTVLGLRMLFAKTVAVNFLLTAKLFFL

SEQ ID NO: 13563 - protein, 781 aa, Artificial Sequence
  Synthetic Polypeptide
MALPVTALLLPLALLLHAARPEVQLVESGGGLVQPGGSLRLSCAASGFSFSDFWMSWVRQAPGKGLEWVATISQAGSEKDYVDSVKGRFTISRDNAKKSLYLQMNSLRAEDTAVYYCASGVYSFDYRGQGTLVTVSSGTGGGGSGGGGSGGGGSEFDIQMTQSPSSLSASVGDRVTITCRASQSISSYLNWYQQKPGKAPKLLIYAVSTLQSGVPSRFSGSGSGTDFTLTISSLQPEDFATYYCQQSGTFPPTTFGQGTKVEIKRLEGQPKANPTVTLFPPSSEELQANKATLVCLISDFYPGAVTVAWKADGSPVKAGVETTKPSKQSNNKYAASSYLSLTPEQWKSHRSYSCQVTHEGSTVEKTVAPTECSPIKTDVITMDPKDNCSKDANDTLLLQLTNTSAYYMYLLLLLKSVVYFAIITCCLLRRTAFCCNGEKSRAKRSGSGATNFSLLKQAGDVEENPGPTSMDWIWRILFLVGAATGAHSFEQVQLLESGGGLVQPGGSLRLSCAASGFTFSSHGMHWVRQAPGKGLEWVSVISGSGSNTGYADSVKGRFTISRDNSKNTLYLQMNSLRAEDTAVYYCARQWGSYAFDSWGQGTLVTVSSTRASTKGPSVFPLAPSSKSTSGGTAALGCLVKDYFPEPVTVSWNSGALTSGVHTFPAVLQSSGLYSLSSVVTVPSSSLGTQTYICNVNHKPSNTKVDKRVEPKSCEVKTDSTDHVKPKETENTKQPSKSCHKPKAIVHTEKVNMMSLTVLGLRMLFAKTVAVNFLLTAKLFFL

SEQ ID NO: 13564 - protein, 791 aa, Artificial Sequence
  Synthetic Polypeptide
MALPVTALLLPLALLLHAARPEVQLVESGGGLVQPGGSLRLSCAASGFSFSDFWMSWVRQAPGKGLEWVATISQAGSEKDYVDSVKGRFTISRDNAKKSLYLQMNSLRAEDTAVYYCASGVYSFDYRGQGTLVTVSSGTGGGGSGGGGSGGGGSEFDIVMSQSPSSLAVSVGEKVTMSCKSSQSLLHSSNQKNYLAWYQQKPGQSPKVLIYWASTRESGVPDRFTGSGSGTDFTLTITSVKSEDLAVYYCQQYYSYPWTFGGGTRLEIKRLEGQPKANPTVTLFPPSSEELQANKATLVCLISDFYPGAVTVAWKADGSPVKAGVETTKPSKQSNNKYAASSYLSLTPEQWKSHRSYSCQVTHEGSTVEKTVAPTECSPIKTDVITMDPKDNCSKDANDTLLLQLTNTSAYYMYLLLLLKSVVYFAIITCCLLRRTAFCCNGEKSRAKRSGSGATNFSLLKQAGDVEENPGPTSMDWIWRILFLVGAATGAHSFEEVQLQQSVAELVKPGASVKMSCKVSGYTLTDHTIHWMKQRPEQGLEWIGYIYPRDGITGYNEKFKGKATLTADTSSSTAYMQLNSLTSEDSAVYFCARWGYSYRNYAYYYDYWGQGTTLTVSSTRASTKGPSVFPLAPSSKSTSGGTAALGCLVKDYFPEPVTVSWNSGALTSGVHTFPAVLQSSGLYSLSSVVTVPSSSLGTQTYICNVNHKPSNTKVDKRVEPKSCEVKTDSTDHVKPKETENTKQPSKSCHKPKAIVHTEKVNMMSLTVLGLRMLFAKTVAVNFLLTAKLFFL

SEQ ID NO: 13565 - protein, 788 aa, Artificial Sequence
  Synthetic Polypeptide
MALPVTALLLPLALLLHAARPEVQLVESGGGLVQPGGSLRLSCAASGFSFSDFWMSWVRQAPGKGLEWVATISQAGSEKDYVDSVKGRFTISRDNAKKSLYLQMNSLRAEDTAVYYCASGVYSFDYRGQGTLVTVSSGTGGGGSGGGGSGGGGSEFEIVLTQSPGTLSLSPGERATLSCRASQSVSSSYLAWYQQKPGQAPRLLIYGTSSRATGIPDRFSGSGSGTDFTLTISRLEPEDFAVYYCQQYGSSPFTFGGGTKVEIKRLEGQPKANPTVTLFPPSSEELQANKATLVCLISDFYPGAVTVAWKADGSPVKAGVETTKPSKQSNNKYAASSYLSLTPEQWKSHRSYSCQVTHEGSTVEKTVAPTECSPIKTDVITMDPKDNCSKDANDTLLLQLTNTSAYYMYLLLLLKSVVYFAIITCCLLRRTAFCCNGEKSRAKRSGSGATNFSLLKQAGDVEENPGPTSMDWIWRILFLVGAATGAHSFEQVQLQESGPGLAKPSETLSLTCTVSGDSITSYYWSWIRQPPGKGLEWIGYIYYSGSTNYNPSLKSRVTISVDTSKNQFSLKLSSVTAADTAVYYCARDQRRIAAAGTHFYGMDVWGQGTTVTVSSTRASTKGPSVFPLAPSSKSTSGGTAALGCLVKDYFPEPVTVSWNSGALTSGVHTFPAVLQSSGLYSLSSVVTVPSSSLGTQTYICNVNHKPSNTKVDKRVEPKSCEVKTDSTDHVKPKETENTKQPSKSCHKPKAIVHTEKVNMMSLTVLGLRMLFAKTVAVNFLLTAKLFFL

SEQ ID NO: 13566 - protein, 780 aa, Artificial Sequence
  Synthetic Polypeptide
MALPVTALLLPLALLLHAARPEVQLVESGGGLVQPGGSLRLSCAASGFSFSDFWMSWVRQAPGKGLEWVATISQAGSEKDYVDSVKGRFTISRDNAKKSLYLQMNSLRAEDTAVYYCASGVYSFDYRGQGTLVTVSSGTGGGGSGGGGSGGGGSEFDILLTQSPVILSVSPGERVSFSCRASQSIGTNIHWYQQRTNGSPRLLIKYASESISGIPSRFSGSGSGTDFTLSINSVESEDIADYYCQQNNNWPTTFGAGTKLELKLEGQPKANPTVTLFPPSSEELQANKATLVCLISDFYPGAVTVAWKADGSPVKAGVETTKPSKQSNNKYAASSYLSLTPEQWKSHRSYSCQVTHEGSTVEKTVAPTECSPIKTDVITMDPKDNCSKDANDTLLLQLTNTSAYYMYLLLLLKSVVYFAIITCCLLRRTAFCCNGEKSRAKRSGSGATNFSLLKQAGDVEENPGPTSMDWIWRILFLVGAATGAHSFEQVQLKQSGPGLVQPSQSLSITCTVSGFSLTNYGVHWVRQSPGKGLEWLGVIWSGGNTDYNTPFTSRLSINKDNSKSQVFFKMNSLQSNDTAIYYCARALTYYDYEFAYWGQGTLVTVSATRASTKGPSVFPLAPSSKSTSGGTAALGCLVKDYFPEPVTVSWNSGALTSGVHTFPAVLQSSGLYSLSSVVTVPSSSLGTQTYICNVNHKPSNTKVDKRVEPKSCEVKTDSTDHVKPKETENTKQPSKSCHKPKAIVHTEKVNMMSLTVLGLRMLFAKTVAVNFLLTAKLFFL

SEQ ID NO: 13567 - protein, 773 aa, Artificial Sequence
  Synthetic Polypeptide
MALPVTALLLPLALLLHAARPEVQLVESGGGLVQPGGSLRLSCAASGFSFSDFWMSWVRQAPGKGLEWVATISQAGSEKDYVDSVKGRFTISRDNAKKSLYLQMNSLRAEDTAVYYCASGVYSFDYRGQGTLVTVSSGTGGGGSGGGGSGGGGSEFMTQSPKFLLVSAGDRVTLTCKASQSVNNDVYWYQQEPGQSPKLLIYWASTRESGVPDRFTGSGSGTDFTLTISSVQAEDLAVYYCKQSYNLYTFGGGTKLEIKRLEGQPKANPTVTLFPPSSEELQANKATLVCLISDFYPGAVTVAWKADGSPVKAGVETTKPSKQSNNKYAASSYLSLTPEQWKSHRSYSCQVTHEGSTVEKTVAPTECSPIKTDVITMDPKDNCSKDANDTLLLQLTNTSAYYMYLLLLLKSVVYFAIITCCLLRRTAFCCNGEKSRAKRSGSGATNFSLLKQAGDVEENPGPTSMDWIWRILFLVGAATGAHSFEESGRGLVQPGGSRKLSCAASGFTFSTSGMHWVRQAPEKGLEWVAYISSGSTTIYHADTVKGRFTISRDNPKNTLFLQMTSLRSEDTAMYYCCARSGQFGNYFDYWGQGTTLTVSSTRASTKGPSVFPLAPSSKSTSGGTAALGCLVKDYFPEPVTVSWNSGALTSGVHTFPAVLQSSGLYSLSSVVTVPSSSLGTQTYICNVNHKPSNTKVDKRVEPKSCEVKTDSTDHVKPKETENTKQPSKSCHKPKAIVHTEKVNMMSLTVLGLRMLFAKTVAVNFLLTAKLFFL

SEQ ID NO: 13568 - protein, 778 aa, Artificial Sequence
  Synthetic Polypeptide
MALPVTALLLPLALLLHAARPEVQLVESGGGLVQPGGSLRLSCAASGFSFSDFWMSWVRQAPGKGLEWVATISQAGSEKDYVDSVKGRFTISRDNAKKSLYLQMNSLRAEDTAVYYCASGVYSFDYRGQGTLVTVSSGTGGGGSGGGGSGGGGSEFQSPSSLAVSAGEKVTMSCKSSQSLLNSRTRKNYLAWYQQKPGQSPKLLIYWASTRESGVPDRFTGSGSGTDFTLTISSVQAEDLAVYYCKQSNLYTFGGGTKLEIKLEGQPKANPTVTLFPPSSEELQANKATLVCLISDFYPGAVTVAWKADGSPVKAGVETTKPSKQSNNKYAASSYLSLTPEQWKSHRSYSCQVTHEGSTVEKTVAPTECSPIKTDVITMDPKDNCSKDANDTLLLQLTNTSAYYMYLLLLLKSVVYFAIITCCLLRRTAFCCNGEKSRAKRSGSGATNFSLLKQAGDVEENPGPTSMDWIWRILFLVGAATGAHSFEQVQLEESGPELVKPGASVKLSCKASGYTFTEYIIHWVKQRSGQGLEWIGWFYPGSGSIKYNEKFKDKATLTADKSSSTVYMELSGLTSEDSAVYFCARHDGYSYFDYWGQGTTLTVSSTRASTKGPSVFPLAPSSKSTSGGTAALGCLVKDYFPEPVTVSWNSGALTSGVHTFPAVLQSSGLYSLSSVVTVPSSSLGTQTYICNVNHKPSNTKVDKRVEPKSCEVKTDSTDHVKPKETENTKQPSKSCHKPKAIVHTEKVNMMSLTVLGLRMLFAKTVAVNFLLTAKLFFL

SEQ ID NO: 13569 - protein, 781 aa, Artificial Sequence
  Synthetic Polypeptide
MALPVTALLLPLALLLHAARPEVQLVESGGGLVQPGGSLRLSCAASGFSFSDFWMSWVRQAPGKGLEWVATISQAGSEKDYVDSVKGRFTISRDNAKKSLYLQMNSLRAEDTAVYYCASGVYSFDYRGQGTLVTVSSGTGGGGSGGGGSGGGGSEFDIQMTQSPSSLSASLGERVSLTCRATQELSGYLSWLQQKPDGTIKRLIYAASTLDSGVPKRFSGNRSGSDYSLTISSLESEDFADYYCLQYAIYPYTFGGGTKLEIKLEGQPKANPTVTLFPPSSEELQANKATLVCLISDFYPGAVTVAWKADGSPVKAGVETTKPSKQSNNKYAASSYLSLTPEQWKSHRSYSCQVTHEGSTVEKTVAPTECSPIKTDVITMDPKDNCSKDANDTLLLQLTNTSAYYMYLLLLLKSVVYFAIITCCLLRRTAFCCNGEKSRAKRSGSGATNFSLLKQAGDVEENPGPTSMDWIWRILFLVGAATGAHSFEEVQLQQSGPELVKPGASVKMSCKASGYTFTSYFIHWVKQKPGQGLEWIGFINPYNDGSKYNEKFKGKATLTSDKSSSTAYMELSSLTSEDSAVYYCTRDDGYYGYAMDYWGQGTSVTVSSTRASTKGPSVFPLAPSSKSTSGGTAALGCLVKDYFPEPVTVSWNSGALTSGVHTFPAVLQSSGLYSLSSVVTVPSSSLGTQTYICNVNHKPSNTKVDKRVEPKSCEVKTDSTDHVKPKETENTKQPSKSCHKPKAIVHTEKVNMMSLTVLGLRMLFAKTVAVNFLLTAKLFFL

SEQ ID NO: 13570 - protein, 786 aa, Artificial Sequence
  Synthetic Polypeptide
MALPVTALLLPLALLLHAARPEVQLVESGGGLVQPGGSLRLSCAASGFSFSDFWMSWVRQAPGKGLEWVATISQAGSEKDYVDSVKGRFTISRDNAKKSLYLQMNSLRAEDTAVYYCASGVYSFDYRGQGTLVTVSSGTGGGGSGGGGSGGGGSEFDTIVLTQSPASLAVSLGQRATISCRASESVDSYGNSFMHWYQQKPGQPPKLLIYLASNLESGVPARFSGSGSRTDFTLTIDPVEADDAATYYCQQNNYDPWTFGGGTKLEIKLEGQPKANPTVTLFPPSSEELQANKATLVCLISDFYPGAVTVAWKADGSPVKAGVETTKPSKQSNNKYAASSYLSLTPEQWKSHRSYSCQVTHEGSTVEKTVAPTECSPIKTDVITMDPKDNCSKDANDTLLLQLTNTSAYYMYLLLLLKSVVYFAIITCCLLRRTAFCCNGEKSRAKRSGSGATNFSLLKQAGDVEENPGPTSMDWIWRILFLVGAATGAHSFEEVQLQQSGPELVKPGASVKMSCKASGYTFTSYVMHWVKQKPGQGLEWIGYINPYNDGTKYNEKFKGKATLTSDTSSSTAYMELNSLTSEDSAVYFCARPIYFDNDYFDYWGQGTTLKVSSTRASTKGPSVFPLAPSSKSTSGGTAALGCLVKDYFPEPVTVSWNSGALTSGVHTFPAVLQSSGLYSLSSVVTVPSSSLGTQTYICNVNHKPSNTKVDKRVEPKSCEVKTDSTDHVKPKETENTKQPSKSCHKPKAIVHTEKVNMMSLTVLGLRMLFAKTVAVNFLLTAKLFFL

SEQ ID NO: 13571 - protein, 781 aa, Artificial Sequence
  Synthetic Polypeptide
MALPVTALLLPLALLLHAARPEVQLVESGGGLVQPGGSLRLSCAASGFSFSDFWMSWVRQAPGKGLEWVATISQAGSEKDYVDSVKGRFTISRDNAKKSLYLQMNSLRAEDTAVYYCASGVYSFDYRGQGTLVTVSSGTGGGGSGGGGSGGGGSEFDIQMTQSPSSLSASVGDRVTITCKASQDVGIAVAWYQQKPGKVPKLLIYWASTRHTGVPDRFSGSGSGTDFTLTISSLQPEDVATYYCQQYSSYPYTFGQGTKVEIKRLEGQPKANPTVTLFPPSSEELQANKATLVCLISDFYPGAVTVAWKADGSPVKAGVETTKPSKQSNNKYAASSYLSLTPEQWKSHRSYSCQVTHEGSTVEKTVAPTECSPIKTDVITMDPKDNCSKDANDTLLLQLTNTSAYYMYLLLLLKSVVYFAIITCCLLRRTAFCCNGEKSRAKRSGSGATNFSLLKQAGDVEENPGPTSMDWIWRILFLVGAATGAHSFEEVQLVESGGGLVQPGGSLRLSCAASGFDFSRYWMSWVRQAPGKGLEWIGEINPDSSTINYAPSLKDKFIISRDNAKNSLYLQMNSLRAEDTAVYYCARPDGNYWYFDVWGQGTLVTVSSTRASTKGPSVFPLAPSSKSTSGGTAALGCLVKDYFPEPVTVSWNSGALTSGVHTFPAVLQSSGLYSLSSVVTVPSSSLGTQTYICNVNHKPSNTKVDKRVEPKSCEVKTDSTDHVKPKETENTKQPSKSCHKPKAIVHTEKVNMMSLTVLGLRMLFAKTVAVNFLLTAKLFFL

SEQ ID NO: 13572 - protein, 781 aa, Artificial Sequence
  Synthetic Polypeptide
MALPVTALLLPLALLLHAARPEVQLVESGGGLVQPGGSLRLSCAASGFSFSDFWMSWVRQAPGKGLEWVATISQAGSEKDYVDSVKGRFTISRDNAKKSLYLQMNSLRAEDTAVYYCASGVYSFDYRGQGTLVTVSSGTGGGGSGGGGSGGGGSEFDIVMTQSQKSMSTSVGDRVSITCKASQDVITGVAWYQQKPGQSPKLLIYSASYRYTGVPDRFTGSGSGTDFTFTISNVQAEDLAVYYCQQHYSTPLTFGAGTKLELKLEGQPKANPTVTLFPPSSEELQANKATLVCLISDFYPGAVTVAWKADGSPVKAGVETTKPSKQSNNKYAASSYLSLTPEQWKSHRSYSCQVTHEGSTVEKTVAPTECSPIKTDVITMDPKDNCSKDANDTLLLQLTNTSAYYMYLLLLLKSVVYFAIITCCLLRRTAFCCNGEKSRAKRSGSGATNFSLLKQAGDVEENPGPTSMDWIWRILFLVGAATGAHSFEQVQLQQPGAELVRPGASVKLSCKASGYSFTTYWMNWVKQRPGQGLEWIGMIHPSDSETRLNQKFKDKATLTVDKSSSTAYMQLSSPTSEDSAVYYCARSTMIATRAMDYWGQGTSVTVSSTRASTKGPSVFPLAPSSKSTSGGTAALGCLVKDYFPEPVTVSWNSGALTSGVHTFPAVLQSSGLYSLSSVVTVPSSSLGTQTYICNVNHKPSNTKVDKRVEPKSCEVKTDSTDHVKPKETENTKQPSKSCHKPKAIVHTEKVNMMSLTVLGLRMLFAKTVAVNFLLTAKLFFL

SEQ ID NO: 13573 - protein, 787 aa, Artificial Sequence
  Synthetic Polypeptide
MALPVTALLLPLALLLHAARPEVQLVESGGGLVQPGGSLRLSCAASGFSFSDFWMSWVRQAPGKGLEWVATISQAGSEKDYVDSVKGRFTISRDNAKKSLYLQMNSLRAEDTAVYYCASGVYSFDYRGQGTLVTVSSGTGGGGSGGGGSGGGGSEFQSVLTQPPSVSGAPGQRVTISCTGSGSNIGAPYDVSWYQQLPGTAPKLLIYHNNKRPSGVPDRFSGSKSGTSASLAITGLQAEDEADYYCATVEAGLSGSVFGGGTKLTVLGALEGQPKANPTVTLFPPSSEELQANKATLVCLISDFYPGAVTVAWKADGSPVKAGVETTKPSKQSNNKYAASSYLSLTPEQWKSHRSYSCQVTHEGSTVEKTVAPTECSPIKTDVITMDPKDNCSKDANDTLLLQLTNTSAYYMYLLLLLKSVVYFAIITCCLLRRTAFCCNGEKSRAKRSGSGATNFSLLKQAGDVEENPGPTSMDWIWRILFLVGAATGAHSFEQVQLVQSGAEVKKPGASVKVSCKVSGYTLTELSIHWVRQAPGKGLEWMGGFDPEENEIVYAQRFQGRVTMTEDTSTDTAYMELSSLRSEDTAVYYCAIVGSFSPLTLGLWGQGTMVTVSSTRASTKGPSVFPLAPSSKSTSGGTAALGCLVKDYFPEPVTVSWNSGALTSGVHTFPAVLQSSGLYSLSSVVTVPSSSLGTQTYICNVNHKPSNTKVDKRVEPKSCEVKTDSTDHVKPKETENTKQPSKSCHKPKAIVHTEKVNMMSLTVLGLRMLFAKTVAVNFLLTAKLFFL

SEQ ID NO: 13574 - protein, 787 aa, Artificial Sequence
  Synthetic Polypeptide
MALPVTALLLPLALLLHAARPEVQLVESGGGLVQPGGSLRLSCAASGFSFSDFWMSWVRQAPGKGLEWVATISQAGSEKDYVDSVKGRFTISRDNAKKSLYLQMNSLRAEDTAVYYCASGVYSFDYRGQGTLVTVSSGTGGGGSGGGGSGGGGSEFQSVLTQPPSVSGAPGQRVTISCTGSGSNIGAPYDVSWYQQLPGTAPKLLIYHNNKRPSGVPDRFSGSKSGTSASLAITGLQAEDEADYYCQSYDSSSISTIFGGGTKLTVLGALEGQPKANPTVTLFPPSSEELQANKATLVCLISDFYPGAVTVAWKADGSPVKAGVETTKPSKQSNNKYAASSYLSLTPEQWKSHRSYSCQVTHEGSTVEKTVAPTECSPIKTDVITMDPKDNCSKDANDTLLLQLTNTSAYYMYLLLLLKSVVYFAIITCCLLRRTAFCCNGEKSRAKRSGSGATNFSLLKQAGDVEENPGPTSMDWIWRILFLVGAATGAHSFEQVQLVQSGAEVKKPGASVKVSCKVSGYTLTELSIHWVRQAPGKGLEWMGGFDPEENEIVYAQRFQGRVTMTEDTSTDTAYMELSSLRSEDTAVYYCAIVGSFSGIAYRPWGQGTMVTVSSTRASTKGPSVFPLAPSSKSTSGGTAALGCLVKDYFPEPVTVSWNSGALTSGVHTFPAVLQSSGLYSLSSVVTVPSSSLGTQTYICNVNHKPSNTKVDKRVEPKSCEVKTDSTDHVKPKETENTKQPSKSCHKPKAIVHTEKVNMMSLTVLGLRMLFAKTVAVNFLLTAKLFFL

SEQ ID NO: 13575 - protein, 775 aa, Artificial Sequence
  Synthetic Polypeptide
MALPVTALLLPLALLLHAARPEVQLVESGGGLVQPGGSLRLSCAASGFSFSDFWMSWVRQAPGKGLEWVATISQAGSEKDYVDSVKGRFTISRDNAKKSLYLQMNSLRAEDTAVYYCASGVYSFDYRGQGTLVTVSSGTGGGGSGGGGSGGGGSEFDIQMTQSPSSLSASVGDRVTITCRASQGIRNNLAWYQQKPGKAPKRLIYAASNLQSGVPSRFTGSGSGTEFTLIVSSLQPEDFATYYCLQHHSYPLTSGGGTKVELEGQPKANPTVTLFPPSSEELQANKATLVCLISDFYPGAVTVAWKADGSPVKAGVETTKPSKQSNNKYAASSYLSLTPEQWKSHRSYSCQVTHEGSTVEKTVAPTECSPIKTDVITMDPKDNCSKDANDTLLLQLTNTSAYYMYLLLLLKSVVYFAIITCCLLRRTAFCCNGEKSRAKRSGSGATNFSLLKQAGDVEENPGPTSMDWIWRILFLVGAATGAHSFEEVQVLESGGGLVQPGGSLRLSCAASGFTFSSYAMSWVRQAPGKGLEWVSAISGSGGSTNYADSVKGRFTISRDNSKNTLYLQMNSLRAEDTAVYYCAGSSGWSEYWGQGTLVTVSSTRASTKGPSVFPLAPSSKSTSGGTAALGCLVKDYFPEPVTVSWNSGALTSGVHTFPAVLQSSGLYSLSSVVTVPSSSLGTQTYICNVNHKPSNTKVDKRVEPKSCEVKTDSTDHVKPKETENTKQPSKSCHKPKAIVHTEKVNMMSLTVLGLRMLFAKTVAVNFLLTAKLFFL

SEQ ID NO: 13576 - protein, 781 aa, Artificial Sequence
  Synthetic Polypeptide
MALPVTALLLPLALLLHAARPEVQLVESGGGLVQPGGSLRLSCAASGFSFSDFWMSWVRQAPGKGLEWVATISQAGSEKDYVDSVKGRFTISRDNAKKSLYLQMNSLRAEDTAVYYCASGVYSFDYRGQGTLVTVSSGTGGGGSGGGGSGGGGSEFDEIQLVQSGAEVKKPGESLRISCKGSGFNIEDYYIHWVRQMPGKGLEWMGRIDPENDETKYGPIFQGHVTISADTSINTVYLQWSSLKASDTAMYYCAFRGGVYWGQGTTVTVSSLEGQPKANPTVTLFPPSSEELQANKATLVCLISDFYPGAVTVAWKADGSPVKAGVETTKPSKQSNNKYAASSYLSLTPEQWKSHRSYSCQVTHEGSTVEKTVAPTECSPIKTDVITMDPKDNCSKDANDTLLLQLTNTSAYYMYLLLLLKSVVYFAIITCCLLRRTAFCCNGEKSRAKRSGSGATNFSLLKQAGDVEENPGPTSMDWIWRILFLVGAATGAHSFEDVVMTQSPDSLAVSLGERATINCKSSQSLLDSDGKTYLNWLQQKPGQPPKRLISLVSKLDSGVPDRFSGSGSGTDFTLTISSLQAEDVAVYYCWQGTHFPGTFGGGTKVEIKTRASTKGPSVFPLAPSSKSTSGGTAALGCLVKDYFPEPVTVSWNSGALTSGVHTFPAVLQSSGLYSLSSVVTVPSSSLGTQTYICNVNHKPSNTKVDKRVEPKSCEVKTDSTDHVKPKETENTKQPSKSCHKPKAIVHTEKVNMMSLTVLGLRMLFAKTVAVNFLLTAKLFFL

SEQ ID NO: 13577 - protein, 788 aa, Artificial Sequence
  Synthetic Polypeptide
MALPVTALLLPLALLLHAARPEVQLVESGGGLVQPGGSLRLSCAASGFSFSDFWMSWVRQAPGKGLEWVATISQAGSEKDYVDSVKGRFTISRDNAKKSLYLQMNSLRAEDTAVYYCASGVYSFDYRGQGTLVTVSSGTGGGGSGGGGSGGGGSEFDELVMTQSPSSLTVTAGEKVTMSCKSSQSLLNSGNQKNYLTWYQQKPGQPPKLLIYWASTRESGVPDRFTGSGSGTDFTLTISSVQAEDLAVYYCQNDYSYPLTFGAGTKLEIKLEGQPKANPTVTLFPPSSEELQANKATLVCLISDFYPGAVTVAWKADGSPVKAGVETTKPSKQSNNKYAASSYLSLTPEQWKSHRSYSCQVTHEGSTVEKTVAPTECSPIKTDVITMDPKDNCSKDANDTLLLQLTNTSAYYMYLLLLLKSVVYFAIITCCLLRRTAFCCNGEKSRAKRSGSGATNFSLLKQAGDVEENPGPTSMDWIWRILFLVGAATGAHSFEEVQLLEQSGAELVRPGTSVKISCKASGYAFTNYWLGWVKQRPGHGLEWIGDIFPGSGNIHYNEKFKGKATLTADKSSSTAYMQLSSLTFEDSAVYFCARLRNWDEPMDYWGQGTTVTVSSTRASTKGPSVFPLAPSSKSTSGGTAALGCLVKDYFPEPVTVSWNSGALTSGVHTFPAVLQSSGLYSLSSVVTVPSSSLGTQTYICNVNHKPSNTKVDKRVEPKSCEVKTDSTDHVKPKETENTKQPSKSCHKPKAIVHTEKVNMMSLTVLGLRMLFAKTVAVNFLLTAKLFFL

SEQ ID NO: 13578 - protein, 789 aa, Artificial Sequence
  Synthetic Polypeptide
MALPVTALLLPLALLLHAARPEVQLVESGGGLVQPGGSLRLSCAASGFSFSDFWMSWVRQAPGKGLEWVATISQAGSEKDYVDSVKGRFTISRDNAKKSLYLQMNSLRAEDTAVYYCASGVYSFDYRGQGTLVTVSSGTGGGGSGGGGSGGGGSEFDELQMTQSPSSLSASVGDRVTITCRASQSISSYLNWYQQKPGQPPKLLIYWASTRESGVPDRFSGSESGTNYTLTISSLQPEDFATYFCQQSDSLPITFGQGTRLDIQLEGQPKANPTVTLFPPSSEELQANKATLVCLISDFYPGAVTVAWKADGSPVKAGVETTKPSKQSNNKYAASSYLSLTPEQWKSHRSYSCQVTHEGSTVEKTVAPTECSPIKTDVITMDPKDNCSKDANDTLLLQLTNTSAYYMYLLLLLKSVVYFAIITCCLLRRTAFCCNGEKSRAKRSGSGATNFSLLKQAGDVEENPGPTSMDWIWRILFLVGAATGAHSFEEVQLLESGGGVVQPGRSLRLSCAASGFTFSSYGMHWVRQAPGKGLEWVAVISYDGSNKYYADSVKGRFTISRDNSKNTLYLQMNSLRAEDTAVYYCAKDMGWGSGWRPYYYYGMDVWGQGTTVTVSSTRASTKGPSVFPLAPSSKSTSGGTAALGCLVKDYFPEPVTVSWNSGALTSGVHTFPAVLQSSGLYSLSSVVTVPSSSLGTQTYICNVNHKPSNTKVDKRVEPKSCEVKTDSTDHVKPKETENTKQPSKSCHKPKAIVHTEKVNMMSLTVLGLRMLFAKTVAVNFLLTAKLFFL

SEQ ID NO: 13579 - protein, 786 aa, Artificial Sequence
  Synthetic Polypeptide
MALPVTALLLPLALLLHAARPEVQLVESGGGLVQPGGSLRLSCAASGFSFSDFWMSWVRQAPGKGLEWVATISQAGSEKDYVDSVKGRFTISRDNAKKSLYLQMNSLRAEDTAVYYCASGVYSFDYRGQGTLVTVSSGTGGGGSGGGGSGGGGSEFDDIQMTQSPSSLSASVGDRVTITCRASQSISSYLNWYQQKPGKAPKLLIYAASSLQSGVPSRFSGSGSGTDFTLTISSLQPEDLATYYCQQSYSTPFTFGPGTKVDIKLEGQPKANPTVTLFPPSSEELQANKATLVCLISDFYPGAVTVAWKADGSPVKAGVETTKPSKQSNNKYAASSYLSLTPEQWKSHRSYSCQVTHEGSTVEKTVAPTECSPIKTDVITMDPKDNCSKDANDTLLLQLTNTSAYYMYLLLLLKSVVYFAIITCCLLRRTAFCCNGEKSRAKRSGSGATNFSLLKQAGDVEENPGPTSMDWIWRILFLVGAATGAHSFEVHEVQLVQSGAEVKKPGSSVKVSCKASGGTFSSYAISWVRQAPGQGLEWMGGIIPIFGTANYAQKFQGRVTITADKSTSTAYMELSSLRSEDTAVYYCATFALFGFREQAFDIWGQGTTVTVSSTRASTKGPSVFPLAPSSKSTSGGTAALGCLVKDYFPEPVTVSWNSGALTSGVHTFPAVLQSSGLYSLSSVVTVPSSSLGTQTYICNVNHKPSNTKVDKRVEPKSCEVKTDSTDHVKPKETENTKQPSKSCHKPKAIVHTEKVNMMSLTVLGLRMLFAKTVAVNFLLTAKLFFL

SEQ ID NO: 13580 - protein, 784 aa, Artificial Sequence
  Synthetic Polypeptide
MALPVTALLLPLALLLHAARPEVQLVESGGGLVQPGGSLRLSCAASGFSFSDFWMSWVRQAPGKGLEWVATISQAGSEKDYVDSVKGRFTISRDNAKKSLYLQMNSLRAEDTAVYYCASGVYSFDYRGQGTLVTVSSGTGGGGSGGGGSGGGGSEFDIVLTQSPLSLAVSLGQPAIISCKASQSVSFAGTSLMHWYHQKPGQQPRLLIYRASNLEAGVPDRFSGSGSKTDFTLTISPVEAEDAATYYCQQSREYPYTFGGGTKLEIKRLEGQPKANPTVTLFPPSSEELQANKATLVCLISDFYPGAVTVAWKADGSPVKAGVETTKPSKQSNNKYAASSYLSLTPEQWKSHRSYSCQVTHEGSTVEKTVAPTECSPIKTDVITMDPKDNCSKDANDTLLLQLTNTSAYYMYLLLLLKSVVYFAIITCCLLRRTAFCCNGEKSRAKRSGSGATNFSLLKQAGDVEENPGPTSMDWIWRILFLVGAATGAHSFEQVQLVQSGAEVVKPGASVKISCKASGYTFTGYFMNWVKQSPGQSLEWIGRIHPYDGDTFYNQKFQGKATLTVDKSSNTAHMELLSLTSEDFAVYYCTRYDGSRAMDYWGQGTTVTVSSTRASTKGPSVFPLAPSSKSTSGGTAALGCLVKDYFPEPVTVSWNSGALTSGVHTFPAVLQSSGLYSLSSVVTVPSSSLGTQTYICNVNHKPSNTKVDKRVEPKSCEVKTDSTDHVKPKETENTKQPSKSCHKPKAIVHTEKVNMMSLTVLGLRMLFAKTVAVNFLLTAKLFFL

SEQ ID NO: 13581 - protein, 781 aa, Artificial Sequence
  Synthetic Polypeptide
MALPVTALLLPLALLLHAARPEVQLVESGGGLVQPGGSLRLSCAASGFSFSDFWMSWVRQAPGKGLEWVATISQAGSEKDYVDSVKGRFTISRDNAKKSLYLQMNSLRAEDTAVYYCASGVYSFDYRGQGTLVTVSSGTGGGGSGGGGSGGGGSEFDDVVMTQTPLSLPVTPGEPASISCRSSQSLVHRNGNTYLHWYLQKPGQSPKLLIHKVSNRFSGVPDRFSGSGSGTDFTLKISRVEAEDLGVYFCSQSTHVPPLTFGAGTKLELKLEGQPKANPTVTLFPPSSEELQANKATLVCLISDFYPGAVTVAWKADGSPVKAGVETTKPSKQSNNKYAASSYLSLTPEQWKSHRSYSCQVTHEGSTVEKTVAPTECSPIKTDVITMDPKDNCSKDANDTLLLQLTNTSAYYMYLLLLLKSVVYFAIITCCLLRRTAFCCNGEKSRAKRSGSGATNFSLLKQAGDVEENPGPTSMDWIWRILFLVGAATGAHSFEEVQLVQSGAEVEKPGASVKISCKASGSSFTGYNMNWVRQNIGKSLEWIGAIDPYYGGTSYNQKFKGRATLTVDKSTSTAYMHLKSLRSEDTAVYYCVSGMEYWGQGTSVTVSSTRASTKGPSVFPLAPSSKSTSGGTAALGCLVKDYFPEPVTVSWNSGALTSGVHTFPAVLQSSGLYSLSSVVTVPSSSLGTQTYICNVNHKPSNTKVDKRVEPKSCEVKTDSTDHVKPKETENTKQPSKSCHKPKAIVHTEKVNMMSLTVLGLRMLFAKTVAVNFLLTAKLFFL

SEQ ID NO: 13582 - protein, 779 aa, Artificial Sequence
  Synthetic Polypeptide
MALPVTALLLPLALLLHAARPEVQLVESGGGLVQPGGSLRLSCAASGFSFSDFWMSWVRQAPGKGLEWVATISQAGSEKDYVDSVKGRFTISRDNAKKSLYLQMNSLRAEDTAVYYCASGVYSFDYRGQGTLVTVSSGTGGGGSGGGGSGGGGSEFDEIVMTQTPATLSVSAGERVTITCKASQSVSNDVTWYQQKPGQAPRLLIYSASNRYSGVPARFSGSGYGTEFTFTISSVQSEDFAVYFCQQDYSSFGQGTKLEIKRLEGQPKANPTVTLFPPSSEELQANKATLVCLISDFYPGAVTVAWKADGSPVKAGVETTKPSKQSNNKYAASSYLSLTPEQWKSHRSYSCQVTHEGSTVEKTVAPTECSPIKTDVITMDPKDNCSKDANDTLLLQLTNTSAYYMYLLLLLKSVVYFAIITCCLLRRTAFCCNGEKSRAKRSGSGATNFSLLKQAGDVEENPGPTSMDWIWRILFLVGAATGAHSFEQVQLVESGPGVVQPGRSLRISCAVSGFSVTNYGVHWVRQPPGKGLEWLGVIWAGGITNYNSAFMSRLTISKDNSKNTVYLQMNSLRAEDTAMYYCASRGGHYGYALDYWGQGTLVTVSSTRASTKGPSVFPLAPSSKSTSGGTAALGCLVKDYFPEPVTVSWNSGALTSGVHTFPAVLQSSGLYSLSSVVTVPSSSLGTQTYICNVNHKPSNTKVDKRVEPKSCEVKTDSTDHVKPKETENTKQPSKSCHKPKAIVHTEKVNMMSLTVLGLRMLFAKTVAVNFLLTAKLFFL

SEQ ID NO: 13583 - protein, 781 aa, Artificial Sequence
  Synthetic Polypeptide
MALPVTALLLPLALLLHAARPEVQLVESGGGLVQPGGSLRLSCAASGFSFSDFWMSWVRQAPGKGLEWVATISQAGSEKDYVDSVKGRFTISRDNAKKSLYLQMNSLRAEDTAVYYCASGVYSFDYRGQGTLVTVSSGTGGGGSGGGGSGGGGSEFDIQMTQTASSLPASLGDRVTISCSASQDISNYLNWYQQKPDGTVKLLIFYSSNLHSGVPSRFSGGGSGTDYSLTISNLEPEDIATYFCHQYSKLPWTFGGGTKLEIKRLEGQPKANPTVTLFPPSSEELQANKATLVCLISDFYPGAVTVAWKADGSPVKAGVETTKPSKQSNNKYAASSYLSLTPEQWKSHRSYSCQVTHEGSTVEKTVAPTECSPIKTDVITMDPKDNCSKDANDTLLLQLTNTSAYYMYLLLLLKSVVYFAIITCCLLRRTAFCCNGEKSRAKRSGSGATNFSLLKQAGDVEENPGPTSMDWIWRILFLVGAATGAHSFEEVTLVESGGDFVKPGGSLKVSCAASGFAFSHYAMSWVRQTPAKRLEWVAYISSGGSGTYYSDSVKGRFTISRDNAKNTLYLQMRSLRSEDSAMYFCTRVKLGTYYFDSWGQGTTLTVSSTRASTKGPSVFPLAPSSKSTSGGTAALGCLVKDYFPEPVTVSWNSGALTSGVHTFPAVLQSSGLYSLSSVVTVPSSSLGTQTYICNVNHKPSNTKVDKRVEPKSCEVKTDSTDHVKPKETENTKQPSKSCHKPKAIVHTEKVNMMSLTVLGLRMLFAKTVAVNFLLTAKLFFL

SEQ ID NO: 13584 - protein, 783 aa, Artificial Sequence
  Synthetic Polypeptide
MALPVTALLLPLALLLHAARPEVQLVESGGGLVQPGGSLRLSCAASGFSFSDFWMSWVRQAPGKGLEWVATISQAGSEKDYVDSVKGRFTISRDNAKKSLYLQMNSLRAEDTAVYYCASGVYSFDYRGQGTLVTVSSGTGGGGSGGGGSGGGGSEFQFVLTQSPSASAALGASAKLTCTLSSAHKTYTIDWYQQQKGKAPRYLIQVKSDGTYTKATGVPDRFSGSSSGADRYLIIPSVQADDEADYYCGTDYTGGYVFGGGTQLTVTLEGQPKANPTVTLFPPSSEELQANKATLVCLISDFYPGAVTVAWKADGSPVKAGVETTKPSKQSNNKYAASSYLSLTPEQWKSHRSYSCQVTHEGSTVEKTVAPTECSPIKTDVITMDPKDNCSKDANDTLLLQLTNTSAYYMYLLLLLKSVVYFAIITCCLLRRTAFCCNGEKSRAKRSGSGATNFSLLKQAGDVEENPGPTSMDWIWRILFLVGAATGAHSFEEQLKESGGGLFKPTDTLTLTCTVSGFSLSYYGVNWVRQAPGNGLEWIGTIGGSGDTYYASWAKSRSTIIRNTNENTVTLKMTSLTAADTATYFCVRYANIGYEYFNVWGPGTLVTVSSTRASTKGPSVFPLAPSSKSTSGGTAALGCLVKDYFPEPVTVSWNSGALTSGVHTFPAVLQSSGLYSLSSVVTVPSSSLGTQTYICNVNHKPSNTKVDKRVEPKSCEVKTDSTDHVKPKETENTKQPSKSCHKPKAIVHTEKVNMMSLTVLGLRMLFAKTVAVNFLLTAKLFFL

SEQ ID NO: 13585 - protein, 788 aa, Artificial Sequence
  Synthetic Polypeptide
MALPVTALLLPLALLLHAARPEVQLVESGGGLVQPGGSLRLSCAASGFSFSDFWMSWVRQAPGKGLEWVATISQAGSEKDYVDSVKGRFTISRDNAKKSLYLQMNSLRAEDTAVYYCASGVYSFDYRGQGTLVTVSSGTGGGGSGGGGSGGGGSEFQFVLTQSPSVSAALGASAKLTCTLSSAHKTYTIDWYQQQQGEAPRYLMQVKSDGSYTKGTGVPDRFSGSSSGADRYLIIPSVQADDEAGYVCGADDNGGYVFGGGTQLTVTLEGQPKANPTVTLFPPSSEELQANKATLVCLISDFYPGAVTVAWKADGSPVKAGVETTKPSKQSNNKYAASSYLSLTPEQWKSHRSYSCQVTHEGSTVEKTVAPTECSPIKTDVITMDPKDNCSKDANDTLLLQLTNTSAYYMYLLLLLKSVVYFAIITCCLLRRTAFCCNGEKSRAKRSGSGATNFSLLKQAGDVEENPGPTSMDWIWRILFLVGAATGAHSFEQSVKESEGGLFKPTDTLTLTCTVSGFSLSRHALTWVRQAPGNGLEWIGAIDNAGTTYYASWAKSRSTITRNTDLHTVTLKMTSLTASDTATYFCARVFYDINSGYYLDGMDLWGPGTLVTVSSTRASTKGPSVFPLAPSSKSTSGGTAALGCLVKDYFPEPVTVSWNSGALTSGVHTFPAVLQSSGLYSLSSVVTVPSSSLGTQTYICNVNHKPSNTKVDKRVEPKSCEVKTDSTDHVKPKETENTKQPSKSCHKPKAIVHTEKVNMMSLTVLGLRMLFAKTVAVNFLLTAKLFFL

SEQ ID NO: 13586 - protein, 782 aa, Artificial Sequence
  Synthetic Polypeptide
MALPVTALLLPLALLLHAARPEVQLVESGGGLVQPGGSLRLSCAASGFSFSDFWMSWVRQAPGKGLEWVATISQAGSEKDYVDSVKGRFTISRDNAKKSLYLQMNSLRAEDTAVYYCASGVYSFDYRGQGTLVTVSSGTGGGGSGGGGSGGGGSEFDIQMTQSPSSLSASVGDRVTITCRASQGISSWLAWYQQKPEKAPKSLIYAASSLQSGVPSRFSGSGSGTDFTLTISSLQPEDFATYYCQQYNSYPPTFGGGTKVEIKLEGQPKANPTVTLFPPSSEELQANKATLVCLISDFYPGAVTVAWKADGSPVKAGVETTKPSKQSNNKYAASSYLSLTPEQWKSHRSYSCQVTHEGSTVEKTVAPTECSPIKTDVITMDPKDNCSKDANDTLLLQLTNTSAYYMYLLLLLKSVVYFAIITCCLLRRTAFCCNGEKSRAKRSGSGATNFSLLKQAGDVEENPGPTSMDWIWRILFLVGAATGAHSFEEVQLVESGGGLVQPGESLRLSCVASGFTFSRYKMNWVRQAPGKGLEWVSYISRSGRDIYYADSVKGRFTISRDNAKNSLYLQMNSLRDEDTAVYYCAGTVTTYYYFGMDVWGHGTTVTVSSTRASTKGPSVFPLAPSSKSTSGGTAALGCLVKDYFPEPVTVSWNSGALTSGVHTFPAVLQSSGLYSLSSVVTVPSSSLGTQTYICNVNHKPSNTKVDKRVEPKSCEVKTDSTDHVKPKETENTKQPSKSCHKPKAIVHTEKVNMMSLTVLGLRMLFAKTVAVNFLLTAKLFFL

SEQ ID NO: 13587 - protein, 783 aa, Artificial Sequence
  Synthetic Polypeptide
MALPVTALLLPLALLLHAARPEVQLVESGGGLVQPGGSLRLSCAASGFSFSDFWMSWVRQAPGKGLEWVATISQAGSEKDYVDSVKGRFTISRDNAKKSLYLQMNSLRAEDTAVYYCASGVYSFDYRGQGTLVTVSSGTGGGGSGGGGSGGGGSEFDIQMTQSPSSLSASVGDRVTITCRASQGISSWLAWYQQKPEKAPKSLIYAASSLQSGVPSRFSGSGSGTDFTLTISSLQPEDFATYYCQQYNSYPPTFGGGTKVEIKLEGQPKANPTVTLFPPSSEELQANKATLVCLISDFYPGAVTVAWKADGSPVKAGVETTKPSKQSNNKYAASSYLSLTPEQWKSHRSYSCQVTHEGSTVEKTVAPTECSPIKTDVITMDPKDNCSKDANDTLLLQLTNTSAYYMYLLLLLKSVVYFAIITCCLLRRTAFCCNGEKSRAKRSGSGATNFSLLKQAGDVEENPGPTSMDWIWRILFLVGAATGAHSFEEVQLVESGGGSVQPGESLRLSCVASGFTFSRYKMNWVRQAPGKGLEWVSYISRSGRDIYYADSVKGRFTISRDNAKNSLYLQMNSLRDEDTAVYYCAGTVTTYYYDFGMDVWGQGTTVTVSSTRASTKGPSVFPLAPSSKSTSGGTAALGCLVKDYFPEPVTVSWNSGALTSGVHTFPAVLQSSGLYSLSSVVTVPSSSLGTQTYICNVNHKPSNTKVDKRVEPKSCEVKTDSTDHVKPKETENTKQPSKSCHKPKAIVHTEKVNMMSLTVLGLRMLFAKTVAVNFLLTAKLFFL

SEQ ID NO: 13588 - protein, 781 aa, Artificial Sequence
  Synthetic Polypeptide
MALPVTALLLPLALLLHAARPEVQLVESGGGLVQPGGSLRLSCAASGFSFSDFWMSWVRQAPGKGLEWVATISQAGSEKDYVDSVKGRFTISRDNAKKSLYLQMNSLRAEDTAVYYCASGVYSFDYRGQGTLVTVSSGTGGGGSGGGGSGGGGSEFQSVLTQPPSASGTPGQRVTISCSGSRSNVGGNYVFWYQQVPGATPKLLIYRSNQRPSGVPDRFAGSKSGSSASLAISGLRSEDEADYYCATWDDSLSGFVFGTGTKVTVLGLEGQPKANPTVTLFPPSSEELQANKATLVCLISDFYPGAVTVAWKADGSPVKAGVETTKPSKQSNNKYAASSYLSLTPEQWKSHRSYSCQVTHEGSTVEKTVAPTECSPIKTDVITMDPKDNCSKDANDTLLLQLTNTSAYYMYLLLLLKSVVYFAIITCCLLRRTAFCCNGEKSRAKRSGSGATNFSLLKQAGDVEENPGPTSMDWIWRILFLVGAATGAHSFEVQLVESGGGLVKPGGSLRLSCAASGFTFSDYYMSWIRQAPGKGLEWVSYISSSGSTIYYADSVKGRFTISRDNAKNSLYLQMNSLRAEDTAVYYCARGYGKAYDQWGQGTLVTVSSTRASTKGPSVFPLAPSSKSTSGGTAALGCLVKDYFPEPVTVSWNSGALTSGVHTFPAVLQSSGLYSLSSVVTVPSSSLGTQTYICNVNHKPSNTKVDKRVEPKSCEVKTDSTDHVKPKETENTKQPSKSCHKPKAIVHTEKVNMMSLTVLGLRMLFAKTVAVNFLLTAKLFFL

SEQ ID NO: 13589 - protein, 780 aa, Artificial Sequence
  Synthetic Polypeptide
MALPVTALLLPLALLLHAARPEVQLVESGGGLVQPGGSLRLSCAASGFSFSDFWMSWVRQAPGKGLEWVATISQAGSEKDYVDSVKGRFTISRDNAKKSLYLQMNSLRAEDTAVYYCASGVYSFDYRGQGTLVTVSSGTGGGGSGGGGSGGGGSEFQSVVTQPPSMSAAPGQQVTISCSGGNSNIERNYVSWYLQLPGTAPKLVIFDNDRRPSGIPDRFSGSKSGTSATLGITGLQTGDEADYYCGTWDSSLRGWVFGGGTKLTVLGLEGQPKANPTVTLFPPSSEELQANKATLVCLISDFYPGAVTVAWKADGSPVKAGVETTKPSKQSNNKYAASSYLSLTPEQWKSHRSYSCQVTHEGSTVEKTVAPTECSPIKTDVITMDPKDNCSKDANDTLLLQLTNTSAYYMYLLLLLKSVVYFAIITCCLLRRTAFCCNGEKSRAKRSGSGATNFSLLKQAGDVEENPGPTSMDWIWRILFLVGAATGAHSFEVQLVESGGGLIQPGGSLRLSCAASGFTFSNYAMNWVRQAPGKGLEWVSTINGRGSSTIYADSVKGRFTISRDNSKNTLYLQMNSLRAEDTATYYCARYISRGLGDSWGQGTLVTVTRASTKGPSVFPLAPSSKSTSGGTAALGCLVKDYFPEPVTVSWNSGALTSGVHTFPAVLQSSGLYSLSSVVTVPSSSLGTQTYICNVNHKPSNTKVDKRVEPKSCEVKTDSTDHVKPKETENTKQPSKSCHKPKAIVHTEKVNMMSLTVLGLRMLFAKTVAVNFLLTAKLFFL

SEQ ID NO: 13590 - protein, 781 aa, Artificial Sequence
  Synthetic Polypeptide
MALPVTALLLPLALLLHAARPEVQLVESGGGLVQPGGSLRLSCAASGFSFSDFWMSWVRQAPGKGLEWVATISQAGSEKDYVDSVKGRFTISRDNAKKSLYLQMNSLRAEDTAVYYCASGVYSFDYRGQGTLVTVSSGTGGGGSGGGGSGGGGSEFDVVMTQTPLSLPVSLGDQASISCRSSQSLVHSNGNTYLHWYLQKPGQSPKLLIYKVSNRFSGVPDRFSGSGSGTDFTLKISRVEAEDLGVYFCSQNTPVPPKFGSGTKLEIKLEGQPKANPTVTLFPPSSEELQANKATLVCLISDFYPGAVTVAWKADGSPVKAGVETTKPSKQSNNKYAASSYLSLTPEQWKSHRSYSCQVTHEGSTVEKTVAPTECSPIKTDVITMDPKDNCSKDANDTLLLQLTNTSAYYMYLLLLLKSVVYFAIITCCLLRRTAFCCNGEKSRAKRSGSGATNFSLLKQAGDVEENPGPTSMDWIWRILFLVGAATGAHSFEQVQLQQSGAELVRPGASVKLSCKASGYTFNDYEMHWVKQTPVHGLKWIGALEPKTGDTAYSQKFKGKATLTADKSSSTAYMELRSLTSEDSAVYYCTSCYYYTYSGQGTLVTVSATRASTKGPSVFPLAPSSKSTSGGTAALGCLVKDYFPEPVTVSWNSGALTSGVHTFPAVLQSSGLYSLSSVVTVPSSSLGTQTYICNVNHKPSNTKVDKRVEPKSCEVKTDSTDHVKPKETENTKQPSKSCHKPKAIVHTEKVNMMSLTVLGLRMLFAKTVAVNFLLTAKLFFL

SEQ ID NO: 13591 - protein, 780 aa, Artificial Sequence
  Synthetic Polypeptide
MALPVTALLLPLALLLHAARPEVQLVESGGGLVQPGGSLRLSCAASGFSFSDFWMSWVRQAPGKGLEWVATISQAGSEKDYVDSVKGRFTISRDNAKKSLYLQMNSLRAEDTAVYYCASGVYSFDYRGQGTLVTVSSGTGGGGSGGGGSGGGGSEFDIQLTQSPSSLSASVGDRVTITCRASQGIRNDLGWYQQKPGKAPKRLIYAASSLQNGVPSRFSGSGSGTEFTLTISSLQPEDFATYYCLQHNTYPAFGQGTKVEIKRLEGQPKANPTVTLFPPSSEELQANKATLVCLISDFYPGAVTVAWKADGSPVKAGVETTKPSKQSNNKYAASSYLSLTPEQWKSHRSYSCQVTHEGSTVEKTVAPTECSPIKTDVITMDPKDNCSKDANDTLLLQLTNTSAYYMYLLLLLKSVVYFAIITCCLLRRTAFCCNGEKSRAKRSGSGATNFSLLKQAGDVEENPGPTSMDWIWRILFLVGAATGAHSFEQVQLQESGPGLVKPSQTLSLTCTVSGGSISSFNYYWSWIRHHPGKGLEWIGYIYYSGSTYSNPSLKSRVTISVDTSKNQFSLTLSSVTAADTAVYYCARGYNWNYFDYWGQGTLVTVSSTRASTKGPSVFPLAPSSKSTSGGTAALGCLVKDYFPEPVTVSWNSGALTSGVHTFPAVLQSSGLYSLSSVVTVPSSSLGTQTYICNVNHKPSNTKVDKRVEPKSCEVKTDSTDHVKPKETENTKQPSKSCHKPKAIVHTEKVNMMSLTVLGLRMLFAKTVAVNFLLTAKLFFL

SEQ ID NO: 13592 - protein, 782 aa, Artificial Sequence
  Synthetic Polypeptide
MALPVTALLLPLALLLHAARPEVQLVESGGGLVQPGGSLRLSCAASGFSFSDFWMSWVRQAPGKGLEWVATISQAGSEKDYVDSVKGRFTISRDNAKKSLYLQMNSLRAEDTAVYYCASGVYSFDYRGQGTLVTVSSGTGGGGSGGGGSGGGGSEFDDIVLTQSPASLAVSLGQSVTISCRASESVEYYGTSLMQWYQQKPGQPPKLLIYATSNVESGVPARFSGSGSGTDFSLNIHPVEEDDIAMYFCQQSRKLPSTFGGGTKLEIKLEGQPKANPTVTLFPPSSEELQANKATLVCLISDFYPGAVTVAWKADGSPVKAGVETTKPSKQSNNKYAASSYLSLTPEQWKSHRSYSCQVTHEGSTVEKTVAPTECSPIKTDVITMDPKDNCSKDANDTLLLQLTNTSAYYMYLLLLLKSVVYFAIITCCLLRRTAFCCNGEKSRAKRSGSGATNFSLLKQAGDVEENPGPTSMDWIWRILFLVGAATGAHSFEDVRLQESGPGQVKPSQTVSLTCSVTGYSITNGNHWWNWIRQVSGSKLEWIGYISSSGSTDSNPSLKSRISITRDTSKNQLFLQLNSVTTEDIATYYCARGYYFDYWGQGTTLTVSSTRASTKGPSVFPLAPSSKSTSGGTAALGCLVKDYFPEPVTVSWNSGALTSGVHTFPAVLQSSGLYSLSSVVTVPSSSLGTQTYICNVNHKPSNTKVDKRVEPKSCEVKTDSTDHVKPKETENTKQPSKSCHKPKAIVHTEKVNMMSLTVLGLRMLFAKTVAVNFLLTAKLFFL

SEQ ID NO: 13593 - protein, 781 aa, Artificial Sequence
  Synthetic Polypeptide
MALPVTALLLPLALLLHAARPEVQLVESGGGLVQPGGSLRLSCAASGFSFSDFWMSWVRQAPGKGLEWVATISQAGSEKDYVDSVKGRFTISRDNAKKSLYLQMNSLRAEDTAVYYCASGVYSFDYRGQGTLVTVSSGTGGGGSGGGGSGGGGSEFDIQMTQSPSSLSASVGDRVTITCRASQDVNTAVAWYQQKPGKAPKLLIYSASFLESGVPSRFSGSRSGTDFTLTISSLQPEDFATYYCQQHYTTPPTFGQTKVEIKRLEGQPKANPTVTLFPPSSEELQANKATLVCLISDFYPGAVTVAWKADGSPVKAGVETTKPSKQSNNKYAASSYLSLTPEQWKSHRSYSCQVTHEGSTVEKTVAPTECSPIKTDVITMDPKDNCSKDANDTLLLQLTNTSAYYMYLLLLLKSVVYFAIITCCLLRRTAFCCNGEKSRAKRSGSGATNFSLLKQAGDVEENPGPTSMDWIWRILFLVGAATGAHSFEEVQLVESGGGLVQPGGSLRLSCAASGFNIKDTYIHWVRQAPGKGLEWVARIYPTNGYTRYADSVKGRFTISADTSKNTAYLQMNSLRAEDTAVYYCSRWGGDGFYAMDVWGQGTLVTVSSTRASTKGPSVFPLAPSSKSTSGGTAALGCLVKDYFPEPVTVSWNSGALTSGVHTFPAVLQSSGLYSLSSVVTVPSSSLGTQTYICNVNHKPSNTKVDKRVEPKSCEVKTDSTDHVKPKETENTKQPSKSCHKPKAIVHTEKVNMMSLTVLGLRMLFAKTVAVNFLLTAKLFFL

SEQ ID NO: 13594 - protein, 780 aa, Artificial Sequence
  Synthetic Polypeptide
MALPVTALLLPLALLLHAARPEVQLVESGGGLVQPGGSLRLSCAASGFSFSDFWMSWVRQAPGKGLEWVATISQAGSEKDYVDSVKGRFTISRDNAKKSLYLQMNSLRAEDTAVYYCASGVYSFDYRGQGTLVTVSSGTGGGGSGGGGSGGGGSEFDQSVLTQPPSVSVAPGKTARIPCEGNYIGSSNVHWYQQKPGQAPVLVIHFDSDRPSGIPDRFSGSNSGNMATLTISRVEAGDEADYYCQVWENHGWVFGGGTKLTVLSLEGQPKANPTVTLFPPSSEELQANKATLVCLISDFYPGAVTVAWKADGSPVKAGVETTKPSKQSNNKYAASSYLSLTPEQWKSHRSYSCQVTHEGSTVEKTVAPTECSPIKTDVITMDPKDNCSKDANDTLLLQLTNTSAYYMYLLLLLKSVVYFAIITCCLLRRTAFCCNGEKSRAKRSGSGATNFSLLKQAGDVEENPGPTSMDWIWRILFLVGAATGAHSFEEVQLVETGGGLVQPGESLRLSCAASGFTFSDYEMNWVRQAPGKGLEWVSYISSSGSTIYYADSVKGRFTIYRDNAKNSLYLQMNSLRAEDTALYYCARAWGVGPPDYWGQGTLVTVSSTRASTKGPSVFPLAPSSKSTSGGTAALGCLVKDYFPEPVTVSWNSGALTSGVHTFPAVLQSSGLYSLSSVVTVPSSSLGTQTYICNVNHKPSNTKVDKRVEPKSCEVKTDSTDHVKPKETENTKQPSKSCHKPKAIVHTEKVNMMSLTVLGLRMLFAKTVAVNFLLTAKLFFL

SEQ ID NO: 13595 - protein, 788 aa, Artificial Sequence
  Synthetic Polypeptide
MALPVTALLLPLALLLHAARPEVQLVESGGGLVQPGGSLRLSCAASGFSFSDFWMSWVRQAPGKGLEWVATISQAGSEKDYVDSVKGRFTISRDNAKKSLYLQMNSLRAEDTAVYYCASGVYSFDYRGQGTLVTVSSGTGGGGSGGGGSGGGGSEFDIQMTQSPSSLSASVGDTVTITCQANGYLNWYQQRRGKAPKLLIYDGSKLERGVPSRFSGRRWGQEYNLTINNLQPEDIATYFCQVYEFVVPGTRLDLKRTVAAPLEGQPKANPTVTLFPPSSEELQANKATLVCLISDFYPGAVTVAWKADGSPVKAGVETTKPSKQSNNKYAASSYLSLTPEQWKSHRSYSCQVTHEGSTVEKTVAPTECSPIKTDVITMDPKDNCSKDANDTLLLQLTNTSAYYMYLLLLLKSVVYFAIITCCLLRRTAFCCNGEKSRAKRSGSGATNFSLLKQAGDVEENPGPTSMDWIWRILFLVGAATGAHSFEQVQLLQSGAAVTKPGASVRVSCEASGYNIRDYFIHWWRQAPGQGLQWVGWINPKTGQPNNPRQFQGRVSLTRHASWDFDTFSFYMDLKALRSDDTAVYFCARQRSDYWDFDVWGSGTQVTVSSASTKGPTRASTKGPSVFPLAPSSKSTSGGTAALGCLVKDYFPEPVTVSWNSGALTSGVHTFPAVLQSSGLYSLSSVVTVPSSSLGTQTYICNVNHKPSNTKVDKRVEPKSCEVKTDSTDHVKPKETENTKQPSKSCHKPKAIVHTEKVNMMSLTVLGLRMLFAKTVAVNFLLTAKLFFL

SEQ ID NO: 13596 - protein, 794 aa, Artificial Sequence
  Synthetic Polypeptide
MALPVTALLLPLALLLHAARPEVQLVESGGGLVQPGGSLRLSCAASGFSFSDFWMSWVRQAPGKGLEWVATISQAGSEKDYVDSVKGRFTISRDNAKKSLYLQMNSLRAEDTAVYYCASGVYSFDYRGQGTLVTVSSGTGGGGSGGGGSGGGGSEFQSALTQPPSASGSPGQSITISCTGTSNNFVSWYQQHAGKAPKLVIYDVNKRPSGVPDRFSGSKSGNTASLTVSGLQTDDEAVYYCGSLVGNWDVIFGGGTKLTVLLEGQPKANPTVTLFPPSSEELQANKATLVCLISDFYPGAVTVAWKADGSPVKAGVETTKPSKQSNNKYAASSYLSLTPEQWKSHRSYSCQVTHEGSTVEKTVAPTECSPIKTDVITMDPKDNCSKDANDTLLLQLTNTSAYYMYLLLLLKSVVYFAIITCCLLRRTAFCCNGEKSRAKRSGSGATNFSLLKQAGDVEENPGPTSMDWIWRILFLVGAATGAHSFEQPQLQESGPTLVEASETLSLTCAVSGDSTAACNSFWGWVRQPPGKGLEWVGSLSHCASYWNRGWTYHNPSLKSRLTLALDTPKNLVFLKLNSVTAADTATYYCARFGGEVLRYTDWPKPAWVDLWGRGTLVTVSSTRASTKGPSVFPLAPSSKSTSGGTAALGCLVKDYFPEPVTVSWNSGALTSGVHTFPAVLQSSGLYSLSSVVTVPSSSLGTQTYICNVNHKPSNTKVDKRVEPKSCEVKTDSTDHVKPKETENTKQPSKSCHKPKAIVHTEKVNMMSLTVLGLRMLFAKTVAVNFLLTAKLFFL

SEQ ID NO: 13597 - protein, 779 aa, Artificial Sequence
  Synthetic Polypeptide
MALPVTALLLPLALLLHAARPEVQLVESGGGLVQPGGSLRLSCAASGFSFSDFWMSWVRQAPGKGLEWVATISQAGSEKDYVDSVKGRFTISRDNAKKSLYLQMNSLRAEDTAVYYCASGVYSFDYRGQGTLVTVSSGTGGGGSGGGGSGGGGSEFEIVLTQSPGTLSLSPGETAIISCRTSQYGSLAWYQQRPGQAPRLVIYSGSTRAAGIPDRFSGSRWGPDYNLTISNLESGDFGVYYCQQYEFFGQGTKVQVDIKRLEGQPKANPTVTLFPPSSEELQANKATLVCLISDFYPGAVTVAWKADGSPVKAGVETTKPSKQSNNKYAASSYLSLTPEQWKSHRSYSCQVTHEGSTVEKTVAPTECSPIKTDVITMDPKDNCSKDANDTLLLQLTNTSAYYMYLLLLLKSVVYFAIITCCLLRRTAFCCNGEKSRAKRSGSGATNFSLLKQAGDVEENPGPTSMDWIWRILFLVGAATGAHSFEQVQLVQSGGQMKKPGESMRISCRASGYEFIDCTLNWIRLAPGKRPEWMGWLKPRGGAVNYARPLQGRVTMTRDVYSDTAFLELRSLTVDDTAVYFCTRGKNCDYNWDFEHWGRGTPVIVSSTRASTKGPSVFPLAPSSKSTSGGTAALGCLVKDYFPEPVTVSWNSGALTSGVHTFPAVLQSSGLYSLSSVVTVPSSSLGTQTYICNVNHKPSNTKVDKRVEPKSCEVKTDSTDHVKPKETENTKQPSKSCHKPKAIVHTEKVNMMSLTVLGLRMLFAKTVAVNFLLTAKLFFL

SEQ ID NO: 13598 - protein, 789 aa, Artificial Sequence
  Synthetic Polypeptide
MALPVTALLLPLALLLHAARPEVQLVESGGGLVQPGGSLRLSCAASGFSFSDFWMSWVRQAPGKGLEWVATISQAGSEKDYVDSVKGRFTISRDNAKKSLYLQMNSLRAEDTAVYYCASGVYSFDYRGQGTLVTVSSGTGGGGSGGGGSGGGGSEFELVLTQSPGTLSLSAGERATLSCRASQSVSSGSLAWYQQKPGQAPRLLIYGASTRATGIPDRFSGSGSGTDFTLTIGRLEPEDLAVYYCQQYGTSPYTFGQGTKLEILEGQPKANPTVTLFPPSSEELQANKATLVCLISDFYPGAVTVAWKADGSPVKAGVETTKPSKQSNNKYAASSYLSLTPEQWKSHRSYSCQVTHEGSTVEKTVAPTECSPIKTDVITMDPKDNCSKDANDTLLLQLTNTSAYYMYLLLLLKSVVYFAIITCCLLRRTAFCCNGEKSRAKRSGSGATNFSLLKQAGDVEENPGPTSMDWIWRILFLVGAATGAHSFELEQSGAEVKKPGSSVQVSCKASGGTFSMYGFNWVRQAPGHGLEWMGGIIPIFGTSNYAQKFRGRVTFTADQATSTAYMELTNLRSDDTAVYYCARDFGPDWEDGDSYDGSGRGFFDFWGQGTLVTVSSTRASTKGPSVFPLAPSSKSTSGGTAALGCLVKDYFPEPVTVSWNSGALTSGVHTFPAVLQSSGLYSLSSVVTVPSSSLGTQTYICNVNHKPSNTKVDKRVEPKSCEVKTDSTDHVKPKETENTKQPSKSCHKPKAIVHTEKVNMMSLTVLGLRMLFAKTVAVNFLLTAKLFFL

SEQ ID NO: 13599 - protein, 769 aa, Artificial Sequence
  Synthetic Polypeptide
MALPVTALLLPLALLLHAARPEVQLVESGGGLVQPGGSLRLSCAASGFSFSDFWMSWVRQAPGKGLEWVATISQAGSEKDYVDSVKGRFTISRDNAKKSLYLQMNSLRAEDTAVYYCASGVYSFDYRGQGTLVTVSSGTGGGGSGGGGSGGGGSEFDIQMTQSPSSLSASVGDRVTITCQASQDINNYLNWYQQKPGKAPKLLIYDASNLQTGVPSRFSGSGSGTDFTFTIEDIATYYCQQYTFGPGTKVDIKLEGQPKANPTVTLFPPSSEELQANKATLVCLISDFYPGAVTVAWKADGSPVKAGVETTKPSKQSNNKYAASSYLSLTPEQWKSHRSYSCQVTHEGSTVEKTVAPTECSPIKTDVITMDPKDNCSKDANDTLLLQLTNTSAYYMYLLLLLKSVVYFAIITCCLLRRTAFCCNGEKSRAKRSGSGATNFSLLKQAGDVEENPGPTSMDWIWRILFLVGAATGAHSFEEVQLLESGGGLVQPGGSLRLSCAASGFTFSWYSMTWVRQAPGKGLEWVSSIVPWGDFTQYADSVKGRFTISRDNSKNTLYLQMNSLRAEDTAVYYCAKGPGWGSFDLWGRGTLVTVSSTRASTKGPSVFPLAPSSKSTSGGTAALGCLVKDYFPEPVTVSWNSGALTSGVHTFPAVLQSSGLYSLSSVVTVPSSSLGTQTYICNVNHKPSNTKVDKRVEPKSCEVKTDSTDHVKPKETENTKQPSKSCHKPKAIVHTEKVNMMSLTVLGLRMLFAKTVAVNFLLTAKLFFL

SEQ ID NO: 13600 - protein, 779 aa, Artificial Sequence
  Synthetic Polypeptide
MALPVTALLLPLALLLHAARPEVQLVESGGGLVQPGGSLRLSCAASGFSFSDFWMSWVRQAPGKGLEWVATISQAGSEKDYVDSVKGRFTISRDNAKKSLYLQMNSLRAEDTAVYYCASGVYSFDYRGQGTLVTVSSGTGGGGSGGGGSGGGGSEFDIQMTQSPSSLSASVGDRVTITCTASLSVSSTYLHWYQQKPGSSPKLWIYSTSNLASGVPSRFSGSGSGTSYTLTISSLQPEDFATYYCHQYHRSPLTFGGGTKVEIKRLEGQPKANPTVTLFPPSSEELQANKATLVCLISDFYPGAVTVAWKADGSPVKAGVETTKPSKQSNNKYAASSYLSLTPEQWKSHRSYSCQVTHEGSTVEKTVAPTECSPIKTDVITMDPKDNCSKDANDTLLLQLTNTSAYYMYLLLLLKSVVYFAIITCCLLRRTAFCCNGEKSRAKRSGSGATNFSLLKQAGDVEENPGPTSMDWIWRILFLVGAATGAHSFEEVQLVESGGGLVQPGGSLRLSCAASGFSLTKYGVHWVRQAPGKGLEWVGVKWAGGSTDYNSALMSRFTISKDNAKNSLYLQMNSLRAEDTAVYYCARDHRDAMDYWGQGTLVTVSSTRASTKGPSVFPLAPSSKSTSGGTAALGCLVKDYFPEPVTVSWNSGALTSGVHTFPAVLQSSGLYSLSSVVTVPSSSLGTQTYICNVNHKPSNTKVDKRVEPKSCEVKTDSTDHVKPKETENTKQPSKSCHKPKAIVHTEKVNMMSLTVLGLRMLFAKTVAVNFLLTAKLFFL

SEQ ID NO: 13601 - protein, 783 aa, Artificial Sequence
  Synthetic Polypeptide
MALPVTALLLPLALLLHAARPEVQLVESGGGLVQPGGSLRLSCAASGFSFSDFWMSWVRQAPGKGLEWVATISQAGSEKDYVDSVKGRFTISRDNAKKSLYLQMNSLRAEDTAVYYCASGVYSFDYRGQGTLVTVSSGTGGGGSGGGGSGGGGSEFDIQMTQSPSSLSASVGDRVTITCKASQDVGTAVAWYQQKPGKAPKLLIYSASYRSTGVPSRFSGSGSGTDFTLTISSLQPEDFATYYCQHHYSAPWTFGGGTKVEIKLEGQPKANPTVTLFPPSSEELQANKATLVCLISDFYPGAVTVAWKADGSPVKAGVETTKPSKQSNNKYAASSYLSLTPEQWKSHRSYSCQVTHEGSTVEKTVAPTECSPIKTDVITMDPKDNCSKDANDTLLLQLTNTSAYYMYLLLLLKSVVYFAIITCCLLRRTAFCCNGEKSRAKRSGSGATNFSLLKQAGDVEENPGPTSMDWIWRILFLVGAATGAHSFEEVQLVESGGGLVQPGGSLRLSCAASGFTFSRNGMSWVRQAPGKGLEWVATVSSGGSYIYYADSVKGRFTISRDNAKNSLYLQMNSLRAEDTAVYYCARQGTTALATRFFDVWGQGTLVTVSSTRASTKGPSVFPLAPSSKSTSGGTAALGCLVKDYFPEPVTVSWNSGALTSGVHTFPAVLQSSGLYSLSSVVTVPSSSLGTQTYICNVNHKPSNTKVDKRVEPKSCEVKTDSTDHVKPKETENTKQPSKSCHKPKAIVHTEKVNMMSLTVLGLRMLFAKTVAVNFLLTAKLFFL

SEQ ID NO: 13602 - protein, 779 aa, Artificial Sequence
  Synthetic Polypeptide
MALPVTALLLPLALLLHAARPEVQLVESGGGLVQPGGSLRLSCAASGFSFSDFWMSWVRQAPGKGLEWVATISQAGSEKDYVDSVKGRFTISRDNAKKSLYLQMNSLRAEDTAVYYCASGVYSFDYRGQGTLVTVSSGTGGGGSGGGGSGGGGSEFDIQMTQSPPSLSASVGGKVTITCKASQDIDRYMAWYQDKPGKGPKLLIHDTSTLQPGIPSRFSGSGSGRDYSFSISNLEPEDIATYYCLQYDNLWTFGGGTKLEIKRLEGQPKANPTVTLFPPSSEELQANKATLVCLISDFYPGAVTVAWKADGSPVKAGVETTKPSKQSNNKYAASSYLSLTPEQWKSHRSYSCQVTHEGSTVEKTVAPTECSPIKTDVITMDPKDNCSKDANDTLLLQLTNTSAYYMYLLLLLKSVVYFAIITCCLLRRTAFCCNGEKSRAKRSGSGATNFSLLKQAGDVEENPGPTSMDWIWRILFLVGAATGAHSFEQVQLVQSGAELVKPGASVKMSCKASGYIFTNYNIHWVKKSPGQGLEWIGAIYPGNGDAPYSQKFQDRATLTADTSSSTTYMELSSLTSEDSAVYYCVRANWDVAFAYWGQGTLVSVSSTRASTKGPSVFPLAPSSKSTSGGTAALGCLVKDYFPEPVTVSWNSGALTSGVHTFPAVLQSSGLYSLSSVVTVPSSSLGTQTYICNVNHKPSNTKVDKRVEPKSCEVKTDSTDHVKPKETENTKQPSKSCHKPKAIVHTEKVNMMSLTVLGLRMLFAKTVAVNFLLTAKLFFL

SEQ ID NO: 13603 - protein, 780 aa, Artificial Sequence
  Synthetic Polypeptide
MALPVTALLLPLALLLHAARPEVQLVESGGGLVQPGGSLRLSCAASGFSFSDFWMSWVRQAPGKGLEWVATISQAGSEKDYVDSVKGRFTISRDNAKKSLYLQMNSLRAEDTAVYYCASGVYSFDYRGQGTLVTVSSGTGGGGSGGGGSGGGGSEFDIQMTQSPASLSASVGETVTITCRVSGNIHNYLAWYQQKQGKSPQLLVYNAKTLADGVPSRFSGSGSGTQYSLKINSLQPEDFGSYYCQHFWSNPYTFGGGTKLEIKLEGQPKANPTVTLFPPSSEELQANKATLVCLISDFYPGAVTVAWKADGSPVKAGVETTKPSKQSNNKYAASSYLSLTPEQWKSHRSYSCQVTHEGSTVEKTVAPTECSPIKTDVITMDPKDNCSKDANDTLLLQLTNTSAYYMYLLLLLKSVVYFAIITCCLLRRTAFCCNGEKSRAKRSGSGATNFSLLKQAGDVEENPGPTSMDWIWRILFLVGAATGAHSFEQVQLQQSGASVKVSCKASELVRPGTGYAFTNYLIEWVKQRPGQGLEWIGVINPGSGGTNYNEKFKGKATLTADKSSSTAYMQLSSLTSDDSAVYFCARYRSYDWYFDVWGAGTTVTVSSTRASTKGPSVFPLAPSSKSTSGGTAALGCLVKDYFPEPVTVSWNSGALTSGVHTFPAVLQSSGLYSLSSVVTVPSSSLGTQTYICNVNHKPSNTKVDKRVEPKSCEVKTDSTDHVKPKETENTKQPSKSCHKPKAIVHTEKVNMMSLTVLGLRMLFAKTVAVNFLLTAKLFFL

SEQ ID NO: 13604 - protein, 779 aa, Artificial Sequence
  Synthetic Polypeptide
MALPVTALLLPLALLLHAARPEVQLVESGGGLVQPGGSLRLSCAASGFSFSDFWMSWVRQAPGKGLEWVATISQAGSEKDYVDSVKGRFTISRDNAKKSLYLQMNSLRAEDTAVYYCASGVYSFDYRGQGTLVTVSSGTGGGGSGGGGSGGGGSEFDIQMTQSFSSLSASVGDRVTITCRASQDISNYLNWYQQKPGKAPKLLIYYTSRLHSGVPSRFSGSGSGTDYTLTISSLQPEDFATYFCQQGNTLPWTFGGGTKLEIKRLEGQPKANPTVTLFPPSSEELQANKATLVCLISDFYPGAVTVAWKADGSPVKAGVETTKPSKQSNNKYAASSYLSLTPEQWKSHRSYSCQVTHEGSTVEKTVAPTECSPIKTDVITMDPKDNCSKDANDTLLLQLTNTSAYYMYLLLLLKSVVYFAIITCCLLRRTAFCCNGEKSRAKRSGSGATNFSLLKQAGDVEENPGPTSMDWIWRILFLVGAATGAHSFEEVQLVQSGGGLVQSGGSLRLSCRASGYTFTRYWMLWVRQRPGKGLEWVAEINPRNDRTNYNEKFKTRFTISVDRSKNTLYLQMDSLRAEDTAVYFCALGGGYAMDYWGQGTLVTVSSTRASTKGPSVFPLAPSSKSTSGGTAALGCLVKDYFPEPVTVSWNSGALTSGVHTFPAVLQSSGLYSLSSVVTVPSSSLGTQTYICNVNHKPSNTKVDKRVEPKSCEVKTDSTDHVKPKETENTKQPSKSCHKPKAIVHTEKVNMMSLTVLGLRMLFAKTVAVNFLLTAKLFFL

SEQ ID NO: 13605 - protein, 780 aa, Artificial Sequence
  Synthetic Polypeptide
MALPVTALLLPLALLLHAARPEVQLVESGGGLVQPGGSLRLSCAASGFSFSDFWMSWVRQAPGKGLEWVATISQAGSEKDYVDSVKGRFTISRDNAKKSLYLQMNSLRAEDTAVYYCASGVYSFDYRGQGTLVTVSSGTGGGGSGGGGSGGGGSEFDIQMTQSPASLSASVGETVTIICRASVNIYSYLAWYQQKQGKSPQLLVYNAKILAEGVPSRFSGSGSGTQFSLKINSLQPEDFGSYYCQHHYGTFTFGSGTKLEIKRLEGQPKANPTVTLFPPSSEELQANKATLVCLISDFYPGAVTVAWKADGSPVKAGVETTKPSKQSNNKYAASSYLSLTPEQWKSHRSYSCQVTHEGSTVEKTVAPTECSPIKTDVITMDPKDNCSKDANDTLLLQLTNTSAYYMYLLLLLKSVVYFAIITCCLLRRTAFCCNGEKSRAKRSGSGATNFSLLKQAGDVEENPGPTSMDWIWRILFLVGAATGAHSFEQVQLKESGPGLVAPSQSLSITCTISGFSLTSYGVHWVRQPPGKGLEWLVVIWSDGSTTYNSALKSRLSISKDNSKSQVFLKMNSLQTDDTAIYYCASHYGSTLAFASWGHGTLVTVSAATRASTKGPSVFPLAPSSKSTSGGTAALGCLVKDYFPEPVTVSWNSGALTSGVHTFPAVLQSSGLYSLSSVVTVPSSSLGTQTYICNVNHKPSNTKVDKRVEPKSCEVKTDSTDHVKPKETENTKQPSKSCHKPKAIVHTEKVNMMSLTVLGLRMLFAKTVAVNFLLTAKLFFL

SEQ ID NO: 13606 - protein, 788 aa, Artificial Sequence
  Synthetic Polypeptide
MALPVTALLLPLALLLHAARPEVQLVESGGGLVQPGGSLRLSCAASGFSFSDFWMSWVRQAPGKGLEWVATISQAGSEKDYVDSVKGRFTISRDNAKKSLYLQMNSLRAEDTAVYYCASGVYSFDYRGQGTLVTVSSGTGGGGSGGGGSGGGGSEFDIVMTQSHKFMSTSVGDRVSVTCKASQNVGNNVAWYQQKPGQSPKVLIYSASYRYSGVPDRFTGSGSGTDFTLTISNVQSEDLAEYFCQQYNTYPFTFGSGTKLEIKLEGQPKANPTVTLFPPSSEELQANKATLVCLISDFYPGAVTVAWKADGSPVKAGVETTKPSKQSNNKYAASSYLSLTPEQWKSHRSYSCQVTHEGSTVEKTVAPTECSPIKTDVITMDPKDNCSKDANDTLLLQLTNTSAYYMYLLLLLKSVVYFAIITCCLLRRTAFCCNGEKSRAKRSGSGATNFSLLKQAGDVEENPGPTSMDWIWRILFLVGAATGAHSFEEVQLEESGGGLVQPGGSMKLSCVASGFTFSNYWMNWVRQSPEKGLEWVAEIRFKSHNYATHFAESVKGRFTISRDDSKSSVYLQMNNLRAEDTGIYYCTRRIGNSDYDWWYFDVWGAGTSVTVSSASTRASTKGPSVFPLAPSSKSTSGGTAALGCLVKDYFPEPVTVSWNSGALTSGVHTFPAVLQSSGLYSLSSVVTVPSSSLGTQTYICNVNHKPSNTKVDKRVEPKSCEVKTDSTDHVKPKETENTKQPSKSCHKPKAIVHTEKVNMMSLTVLGLRMLFAKTVAVNFLLTAKLFFL

SEQ ID NO: 13607 - protein, 781 aa, Artificial Sequence
  Synthetic Polypeptide
MALPVTALLLPLALLLHAARPEVQLVESGGGLVQPGGSLRLSCAASGFSFSDFWMSWVRQAPGKGLEWVATISQAGSEKDYVDSVKGRFTISRDNAKKSLYLQMNSLRAEDTAVYYCASGVYSFDYRGQGTLVTVSSGTGGGGSGGGGSGGGGSEFDQIVLTQSPAIMSASPGEKVTISCSASSSVSYMYWYQQKPGSSPKPWIYRTSNLASGVPARFSGSGSGTSYSLTISNMEAEDAAAYYCQQYHSYPTTFGGGTKLEVKLEGQPKANPTVTLFPPSSEELQANKATLVCLISDFYPGAVTVAWKADGSPVKAGVETTKPSKQSNNKYAASSYLSLTPEQWKSHRSYSCQVTHEGSTVEKTVAPTECSPIKTDVITMDPKDNCSKDANDTLLLQLTNTSAYYMYLLLLLKSVVYFAIITCCLLRRTAFCCNGEKSRAKRSGSGATNFSLLKQAGDVEENPGPTSMDWIWRILFLVGAATGAHSFEEVQLVESGGGLVQPKGSLKLSCAASGFSFNTYAMNWVRQAPGKGLEWIAHIRSKSNNFATYYADSVKDRFSISRDASENILFLQMNNLKTEDTAMYYCVRQGGDFPMDYWGQGTSVTVSSTRASTKGPSVFPLAPSSKSTSGGTAALGCLVKDYFPEPVTVSWNSGALTSGVHTFPAVLQSSGLYSLSSVVTVPSSSLGTQTYICNVNHKPSNTKVDKRVEPKSCEVKTDSTDHVKPKETENTKQPSKSCHKPKAIVHTEKVNMMSLTVLGLRMLFAKTVAVNFLLTAKLFFL

SEQ ID NO: 13608 - protein, 780 aa, Artificial Sequence
  Synthetic Polypeptide
MALPVTALLLPLALLLHAARPEVQLVESGGGLVQPGGSLRLSCAASGFSFSDFWMSWVRQAPGKGLEWVATISQAGSEKDYVDSVKGRFTISRDNAKKSLYLQMNSLRAEDTAVYYCASGVYSFDYRGQGTLVTVSSGTGGGGSGGGGSGGGGSEFDDIQMTQSSSSFSVSLGDRVTITCMASEDIYIRLAWYQQKPGNAPRLLISAATSLETGVPSRFSGSGSGKDYTLSITSLQTEDVGTYYCQQYWSSPWTFGGGTKLEINLEGQPKANPTVTLFPPSSEELQANKATLVCLISDFYPGAVTVAWKADGSPVKAGVETTKPSKQSNNKYAASSYLSLTPEQWKSHRSYSCQVTHEGSTVEKTVAPTECSPIKTDVITMDPKDNCSKDANDTLLLQLTNTSAYYMYLLLLLKSVVYFAIITCCLLRRTAFCCNGEKSRAKRSGSGATNFSLLKQAGDVEENPGPTSMDWIWRILFLVGAATGAHSFEDVQLQESGPGLVKPSQSLSLTCTVTGYSITSDYTWNWIRQFPGNKLEWMGYITYSGSTSYNPSLKSRNSITRDTSKNQFFLQLNSVTTEDTATYYCARLGRRYTMDYWGQGTSVTVSSTRASTKGPSVFPLAPSSKSTSGGTAALGCLVKDYFPEPVTVSWNSGALTSGVHTFPAVLQSSGLYSLSSVVTVPSSSLGTQTYICNVNHKPSNTKVDKRVEPKSCEVKTDSTDHVKPKETENTKQPSKSCHKPKAIVHTEKVNMMSLTVLGLRMLFAKTVAVNFLLTAKLFFL

SEQ ID NO: 13609 - protein, 783 aa, Artificial Sequence
  Synthetic Polypeptide
MALPVTALLLPLALLLHAARPEVQLVESGGGLVQPGGSLRLSCAASGFSFSDFWMSWVRQAPGKGLEWVATISQAGSEKDYVDSVKGRFTISRDNAKKSLYLQMNSLRAEDTAVYYCASGVYSFDYRGQGTLVTVSSGTGGGGSGGGGSGGGGSEFDDIQMTQSPSSLSASVGDRVTITCRASQSISSYLNWYQQKPGKAPKLLIYDASNLETGVPSRFSGSGSGTDFTFTISSLQPEDIATYYCQQYDNLPLTFGGGTKVDIKRLEGQPKANPTVTLFPPSSEELQANKATLVCLISDFYPGAVTVAWKADGSPVKAGVETTKPSKQSNNKYAASSYLSLTPEQWKSHRSYSCQVTHEGSTVEKTVAPTECSPIKTDVITMDPKDNCSKDANDTLLLQLTNTSAYYMYLLLLLKSVVYFAIITCCLLRRTAFCCNGEKSRAKRSGSGATNFSLLKQAGDVEENPGPTSMDWIWRILFLVGAATGAHSFEQVQLVESGGGVVQPGRSLRLSCAASGFTFSSYAMHWVRQAPGKGLEWVAVISYDGSNKYYADSVKGRFTISRDNSKNTLYLQMNSLRAEDTAVYYCARAHNSSSWSFDYWGQGTLVTVSSTRASTKGPSVFPLAPSSKSTSGGTAALGCLVKDYFPEPVTVSWNSGALTSGVHTFPAVLQSSGLYSLSSVVTVPSSSLGTQTYICNVNHKPSNTKVDKRVEPKSCEVKTDSTDHVKPKETENTKQPSKSCHKPKAIVHTEKVNMMSLTVLGLRMLFAKTVAVNFLLTAKLFFL

SEQ ID NO: 13610 - protein, 792 aa, Artificial Sequence
  Synthetic Polypeptide
MALPVTALLLPLALLLHAARPEVQLVESGGGLVQPGGSLRLSCAASGFSFSDFWMSWVRQAPGKGLEWVATISQAGSEKDYVDSVKGRFTISRDNAKKSLYLQMNSLRAEDTAVYYCASGVYSFDYRGQGTLVTVSSGTGGGGSGGGGSGGGGSEFDDVVMTQSPLSLPVSLGDQASISCRSSQRLVHSNGNTYLHWYLQKPGQSPKLLIYRVSNRFPGVPDRFSGSGSGTDFTLKISRVEAEDLGIYFCSQSTHVPYTFGGGTKLEIKRLEGQPKANPTVTLFPPSSEELQANKATLVCLISDFYPGAVTVAWKADGSPVKAGVETTKPSKQSNNKYAASSYLSLTPEQWKSHRSYSCQVTHEGSTVEKTVAPTECSPIKTDVITMDPKDNCSKDANDTLLLQLTNTSAYYMYLLLLLKSVVYFAIITCCLLRRTAFCCNGEKSRAKRSGSGATNFSLLKQAGDVEENPGPTSMDWIWRILFLVGAATGAHSFEEVRLQQSGPDLIKPGASVKMSCKASGYTFTGYVMHWVKQRPGQGLEWIGFINPYNDDIQSNERFRGKATLTSDKSSTTAYMELSSLTSEDSAVYYCARGAGYNFDGAYRFFDFWGQGTTLTVSSTRASTKGPSVFPLAPSSKSTSGGTAALGCLVKDYFPEPVTVSWNSGALTSGVHTFPAVLQSSGLYSLSSVVTVPSSSLGTQTYICNVNHKPSNTKVDKRVEPKSCEVKTDSTDHVKPKETENTKQPSKSCHKPKAIVHTEKVNMMSLTVLGLRMLFAKTVAVNFLLTAKLFFL

SEQ ID NO: 13611 - protein, 783 aa, Artificial Sequence
  Synthetic Polypeptide
MALPVTALLLPLALLLHAARPEVQLVESGGGLVQPGGSLRLSCAASGFSFSDFWMSWVRQAPGKGLEWVATISQAGSEKDYVDSVKGRFTISRDNAKKSLYLQMNSLRAEDTAVYYCASGVYSFDYRGQGTLVTVSSGTGGGGSGGGGSGGGGSEFDSYELTQPPSVSVSPGQTATISCSGDQLGGKYGHWYQKKPGQSPVLVLYQDRKRPAGIPERFSGSSSGNTITLTISGTQAVDEADYYCQAWDTNLGGVFGGGTKVTVLGQLEGQPKANPTVTLFPPSSEELQANKATLVCLISDFYPGAVTVAWKADGSPVKAGVETTKPSKQSNNKYAASSYLSLTPEQWKSHRSYSCQVTHEGSTVEKTVAPTECSPIKTDVITMDPKDNCSKDANDTLLLQLTNTSAYYMYLLLLLKSVVYFAIITCCLLRRTAFCCNGEKSRAKRSGSGATNFSLLKQAGDVEENPGPTSMDWIWRILFLVGAATGAHSFEQVQLVESGAEVKKPGASVKVSCKASGYTFTGYYMHWVRQAPGQGLEWMGRINPNSGGTNYAQKFQGRVTMTRDTSISTAYMELSRLRSDDTAVYYCASPRGRGSAFDIWGQGTLVTVSSTRASTKGPSVFPLAPSSKSTSGGTAALGCLVKDYFPEPVTVSWNSGALTSGVHTFPAVLQSSGLYSLSSVVTVPSSSLGTQTYICNVNHKPSNTKVDKRVEPKSCEVKTDSTDHVKPKETENTKQPSKSCHKPKAIVHTEKVNMMSLTVLGLRMLFAKTVAVNFLLTAKLFFL

SEQ ID NO: 13612 - protein, 786 aa, Artificial Sequence
  Synthetic Polypeptide
MALPVTALLLPLALLLHAARPEVQLVESGGGLVQPGGSLRLSCAASGFSFSDFWMSWVRQAPGKGLEWVATISQAGSEKDYVDSVKGRFTISRDNAKKSLYLQMNSLRAEDTAVYYCASGVYSFDYRGQGTLVTVSSGTGGGGSGGGGSGGGGSEFDNFMLTQPHSVSESPGKTVTISCTRSSGSIASKYVQWYQQRPGSSPTTVIYEDNQRPSGVPDRFSGSIDTSSNSASLTISGLRTEDEADYYCHSYDSNNHSVFGGGTKVTVLGQLEGQPKANPTVTLFPPSSEELQANKATLVCLISDFYPGAVTVAWKADGSPVKAGVETTKPSKQSNNKYAASSYLSLTPEQWKSHRSYSCQVTHEGSTVEKTVAPTECSPIKTDVITMDPKDNCSKDANDTLLLQLTNTSAYYMYLLLLLKSVVYFAIITCCLLRRTAFCCNGEKSRAKRSGSGATNFSLLKQAGDVEENPGPTSMDWIWRILFLVGAATGAHSFEEVQLVESGGGVVQPGGSLRLSCAASGFTFSSYAMSWVRQAPGKGLEWVSAISGSGGSTYYADSVKGRFSISRDNSKNTLYLQMNSLRAEDTAVYYCARTRSSGAFDIWGQGTLVTVSSTRASTKGPSVFPLAPSSKSTSGGTAALGCLVKDYFPEPVTVSWNSGALTSGVHTFPAVLQSSGLYSLSSVVTVPSSSLGTQTYICNVNHKPSNTKVDKRVEPKSCEVKTDSTDHVKPKETENTKQPSKSCHKPKAIVHTEKVNMMSLTVLGLRMLFAKTVAVNFLLTAKLFFL

SEQ ID NO: 13613 - protein, 781 aa, Artificial Sequence
  Synthetic Polypeptide
MALPVTALLLPLALLLHAARPEVQLVESGGGLVQPGGSLRLSCAASGFSFSDFWMSWVRQAPGKGLEWVATISQAGSEKDYVDSVKGRFTISRDNAKKSLYLQMNSLRAEDTAVYYCASGVYSFDYRGQGTLVTVSSGTGGGGSGGGGSGGGGSEFDIQMNQSPSSLSASLGDTITITCHASQNINVWLSWYQQKPGNIPKLLIYKASNLHTGVPSRFSGSGSGTGFTITISSLQPEDIATYYCQQGQSYPWTFGGGTKLEIKRLEGQPKANPTVTLFPPSSEELQANKATLVCLISDFYPGAVTVAWKADGSPVKAGVETTKPSKQSNNKYAASSYLSLTPEQWKSHRSYSCQVTHEGSTVEKTVAPTECSPIKTDVITMDPKDNCSKDANDTLLLQLTNTSAYYMYLLLLLKSVVYFAIITCCLLRRTAFCCNGEKSRAKRSGSGATNFSLLKQAGDVEENPGPTSMDWIWRILFLVGAATGAHSFEEVQLQQSGPELVKPGASVKISCKASGYSFTGYFMNWVKQSHGKSLEYIGRFNPYNGETLYNQKFKGKATLTVDKSSSTVHMELLSVTSEDSAVYYCGRSGNDDAMDYWGQGTSVTVSSATRASTKGPSVFPLAPSSKSTSGGTAALGCLVKDYFPEPVTVSWNSGALTSGVHTFPAVLQSSGLYSLSSVVTVPSSSLGTQTYICNVNHKPSNTKVDKRVEPKSCEVKTDSTDHVKPKETENTKQPSKSCHKPKAIVHTEKVNMMSLTVLGLRMLFAKTVAVNFLLTAKLFFL

SEQ ID NO: 13614 - protein, 782 aa, Artificial Sequence
  Synthetic Polypeptide
MALPVTALLLPLALLLHAARPEVQLVESGGGLVQPGGSLRLSCAASGFSFSDFWMSWVRQAPGKGLEWVATISQAGSEKDYVDSVKGRFTISRDNAKKSLYLQMNSLRAEDTAVYYCASGVYSFDYRGQGTLVTVSSGTGGGGSGGGGSGGGGSEFEIVLTQSPATLSLSPGERATLSCRASQSVRSYLAWYQQKPGQAPRLLIYDASNRATGIPARFSGSGSGTDFTLTISSLEPEDFAVYYCQQRSNWPPTFGQGTKVEIKLEGQPKANPTVTLFPPSSEELQANKATLVCLISDFYPGAVTVAWKADGSPVKAGVETTKPSKQSNNKYAASSYLSLTPEQWKSHRSYSCQVTHEGSTVEKTVAPTECSPIKTDVITMDPKDNCSKDANDTLLLQLTNTSAYYMYLLLLLKSVVYFAIITCCLLRRTAFCCNGEKSRAKRSGSGATNFSLLKQAGDVEENPGPTSMDWIWRILFLVGAATGAHSFEQLQVQESGPGLVKPSETLSLTCTVSGGSISNSYFSWGWIRQPPGKGLEWIGSFYYGEKTYYNPSLKSRATISIDTSKSQFSLKLSSVTAADTAVYYCPRGPTMIRGVIDSWGQGTLVTVSSTRASTKGPSVFPLAPSSKSTSGGTAALGCLVKDYFPEPVTVSWNSGALTSGVHTFPAVLQSSGLYSLSSVVTVPSSSLGTQTYICNVNHKPSNTKVDKRVEPKSCEVKTDSTDHVKPKETENTKQPSKSCHKPKAIVHTEKVNMMSLTVLGLRMLFAKTVAVNFLLTAKLFFL

SEQ ID NO: 13615 - protein, 791 aa, Artificial Sequence
  Synthetic Polypeptide
MALPVTALLLPLALLLHAARPEVQLVESGGGLVQPGGSLRLSCAASGFSFSDFWMSWVRQAPGKGLEWVATISQAGSEKDYVDSVKGRFTISRDNAKKSLYLQMNSLRAEDTAVYYCASGVYSFDYRGQGTLVTVSSGTGGGGSGGGGSGGGGSEFDIVMTQTPLSLPVTPGEPASISCRSSRSLLDSDDGNTYLDWYLQKPGQSPQLLIYTLSYRASGVPDRFSGSGSGTDFTLKISRVEAEDVGVYYCMQRVEFPITFGQGTRLEIKRLEGQPKANPTVTLFPPSSEELQANKATLVCLISDFYPGAVTVAWKADGSPVKAGVETTKPSKQSNNKYAASSYLSLTPEQWKSHRSYSCQVTHEGSTVEKTVAPTECSPIKTDVITMDPKDNCSKDANDTLLLQLTNTSAYYMYLLLLLKSVVYFAIITCCLLRRTAFCCNGEKSRAKRSGSGATNFSLLKQAGDVEENPGPTSMDWIWRILFLVGAATGAHSFEQVQLVESGGGVVQPGRSLRLSCAASGFIFSRYGMHWVRQAPGKGLKWVAVIWYDGSNKLYADSVKGRFTISRDNSKNTLYLQMNSLRAEDTAVYYCARDYYDNSRHHWGFDYWGQGTLVTVSSTRASTKGPSVFPLAPSSKSTSGGTAALGCLVKDYFPEPVTVSWNSGALTSGVHTFPAVLQSSGLYSLSSVVTVPSSSLGTQTYICNVNHKPSNTKVDKRVEPKSCEVKTDSTDHVKPKETENTKQPSKSCHKPKAIVHTEKVNMMSLTVLGLRMLFAKTVAVNFLLTAKLFFL

SEQ ID NO: 13616 - protein, 781 aa, Artificial Sequence
  Synthetic Polypeptide
MALPVTALLLPLALLLHAARPEVQLVESGGGLVQPGGSLRLSCAASGFSFSDFWMSWVRQAPGKGLEWVATISQAGSEKDYVDSVKGRFTISRDNAKKSLYLQMNSLRAEDTAVYYCASGVYSFDYRGQGTLVTVSSGTGGGGSGGGGSGGGGSEFEIQMTQSPSSMSASLGDTITITCQATQDIFKNLNWYQQKPGKPPSLLIYYATELAEGVPSRFSGSGSGSDYSLTISNLESEDFAAYYCLQFFEFPFTFGSGTKLEMKLEGQPKANPTVTLFPPSSEELQANKATLVCLISDFYPGAVTVAWKADGSPVKAGVETTKPSKQSNNKYAASSYLSLTPEQWKSHRSYSCQVTHEGSTVEKTVAPTECSPIKTDVITMDPKDNCSKDANDTLLLQLTNTSAYYMYLLLLLKSVVYFAIITCCLLRRTAFCCNGEKSRAKRSGSGATNFSLLKQAGDVEENPGPTSMDWIWRILFLVGAATGAHSFEQVQLQQSGAELVRPGTSVKVSCKASGYVFTNYWIEWIKQRPGQGLEWIGVMNPGSGETTYNEKFKGKATLTADKSSSTAYMQLSSLTSVDSAVYFCARDHDRDYYAMDYWGQGTSVTVSSTRASTKGPSVFPLAPSSKSTSGGTAALGCLVKDYFPEPVTVSWNSGALTSGVHTFPAVLQSSGLYSLSSVVTVPSSSLGTQTYICNVNHKPSNTKVDKRVEPKSCEVKTDSTDHVKPKETENTKQPSKSCHKPKAIVHTEKVNMMSLTVLGLRMLFAKTVAVNFLLTAKLFFL

SEQ ID NO: 13617 - protein, 778 aa, Artificial Sequence
  Synthetic Polypeptide
MALPVTALLLPLALLLHAARPEVQLVESGGGLVQPGGSLRLSCAASGFSFSDFWMSWVRQAPGKGLEWVATISQAGSEKDYVDSVKGRFTISRDNAKKSLYLQMNSLRAEDTAVYYCASGVYSFDYRGQGTLVTVSSGTGGGGSGGGGSGGGGSEFDILLTQSPAILSVSPGERVSFSCRASQNIGTSIHWYQQRTNGSPRLLIKYASESVSGIPSRFSGSGSGTDFTLSINSVESEDIADYYCQHTNSWPTTFGGGTKLEIKRLEGQPKANPTVTLFPPSSEELQANKATLVCLISDFYPGAVTVAWKADGSPVKAGVETTKPSKQSNNKYAASSYLSLTPEQWKSHRSYSCQVTHEGSTVEKTVAPTECSPIKTDVITMDPKDNCSKDANDTLLLQLTNTSAYYMYLLLLLKSVVYFAIITCCLLRRTAFCCNGEKSRAKRSGSGATNFSLLKQAGDVEENPGPTSMDWIWRILFLVGAATGAHSFEQVQLQQSDAELVKPGASVKISCKASGYTFTDHAIHWVKQKPEQGLEWIGYFSPGNGDIKYNEKFKGKATLTADKSSSTAYMQLNSLTSEDSAVYFCKRSYGNYDYWGQGTTLTVSSTRASTKGPSVFPLAPSSKSTSGGTAALGCLVKDYFPEPVTVSWNSGALTSGVHTFPAVLQSSGLYSLSSVVTVPSSSLGTQTYICNVNHKPSNTKVDKRVEPKSCEVKTDSTDHVKPKETENTKQPSKSCHKPKAIVHTEKVNMMSLTVLGLRMLFAKTVAVNFLLTAKLFFL
